United States Patent Application Publication US 2011/0183924 A1 - sequence listing, part 68

SEQ ID NO: 239167 - DNA, 1965 bp, Homo sapiens
  misc_feature (77)..(77): n is a, c, g, or t
  misc_feature (306)..(306): n is a, c, g, or t
  misc_feature (521)..(521): n is a, c, g, or t
  misc_feature (572)..(572): n is a, c, g, or t
  misc_feature (1682)..(1682): n is a, c, g, or t
  misc_feature (1894)..(1894): n is a, c, g, or t
caaaactctctctggttaatttcagtatcatattatgcatatataacattttattaagaataaaagtgcagcttgangatatactattttgattaagacagtttggataagaatataatttttaatttgtaaaggtgaatgtggtcacacagtgaaatggtcaatttctagctatacatgtattatgagttataggaaaaacattttcaaaagaataattttttattctttctagtccttttccaaggaagagtcaccatgtcattgttttggtccaatcaggtaccttttgcgagtgaaaggggntgttattaacaattatgtcaagccagcaggtgtaaaccgaccaggactgtcccaggcaaaagaggatgaatacccatcctatccaaagggaagccaccatttcttcttctatatattccatgagaagcccagcaatcccttttaaaaggcaaaaaacagcctgcatcgccaagtcaatcctaagccaaaagaacaaagctggaggcatcacgctncctgacttcaaactatactacaaggctacagtaaccaaaacagcatggtantggtaccaaaacagagatatagattaatggaacagaacagagccctcagaaataatgccacttgtctacaaccatctgatctttgacaaacctgagaaaaacaagcaatggggagaggattccctatttaataaatggtgctgggaaaactggctagccatatgtagaaagctgaaactggatcccttccttacaccttatacaaaaattaattcaagatggattaaagacttacatgttagacctaaaaccattaaaaaccctagaagcaaacctaggcaataccattcaggacataggcatgggcaaggacttcatgtctaaaacaccaaaagcaatggcaacaaaagccaaaattgacaaatgggatctaattaaactaaagagcttctgcacagcaaaagaaactaccatcagagtgaataggcaacctacaaaatgggagaaaattttcgcaacctacccatctgacaaagggctaatatccagaatctacaatgaactcaaacaaatttacaagaaaaaaacaaacaaccccatcaaaaagtgggcaaaggatatgaagagacacttctcaaaagaagacatttatgcagccaaaagacacatgaaaaaatgctcatcatcactggccatcagagaaatgcaaatcaaaaccacaatgagacaccatctcacaccagttagaatggcgatcattaaaaagtcaggaaacaacaggtgctggagaggatgtggagaaataggaatacttttacactgttggtgggactgtaagctagttcaaccattgtggaagtcagtgtggtgattcctcagggatctagaactagaaataccatttgacccagccatcccattactgggtatatacccaaaggattataaatcatgctgctatgaagacacacgcacacgtatgtttatcgtggcactattcacaatagcaaagacttggaaccaacccaaatgtccaaccatgatagactggattaagaaaatgtggcacatatacaccatggaatactatgcagccataaaaaatgatgagttcatgtcctttgtagggacatggatgaaactggaaaccatcattctcagcaaactatngcaaggacaaaaaaccaaacaccacatgttctcactcataggtgggaactgaacaatgagaacacctggacacaggaaggggaacatcacactccggggactgttgtggggtagggggatgggggagggatagcattaggagatatacctaatgctaaatgacaagttaatgggtgcagcacaccaacatggcacatgtatacatatgtaantaatttgcacattgtgcacatgtaccctaaaacttaaagtataataataattaaaaaaaaaagcagctatg

SEQ ID NO: 239168 - DNA, 610 bp, Homo sapiens
gcagtctggtggccttgagcaaccaggaaggtaaagccggtacctcagttaaatcaccaagtttactggaagtgcatatttttcatgtgccaaattcagtaagtcatggagcaaatgtttattttgctatgctttacttaatctatgtttgcagcattgcactggaaacaggatttgtctgtgaaatggctctgtcatttgtggaccacttctgtagggagattgtggatttaggaagggcagaagcaacagcagatatgcctggtgtttgaatggatgtgcctctctcggaggcagcaagcagcatacccatattataaagtttttgattttctaacatctgaagacaggcatccagccttgcagaacagccaggtgtctgttctatagactacagttccttgtttccagaattacggtaaccaaataatacacaaggtcacctgattgcacttcccaacaacctgaacaaagagcacctttgcgcttgctggtaggtgctgtaccagactctttgtaatctgccttaggtcagagaagaacaagccattaccagtatgggagtccatccctagtcagggctagttgctattatccctttgatactctg

SEQ ID NO: 239169 - DNA, 373 bp, Homo sapiens
attagttaaagcttttaaaactgtactctaattccctaactgaagatcaatcatcaaaggctaaaatctcacatattagactgtgatgctagaaacactaaagtcatatcaactggggagacttgtgaaattcaaatttggtcaacttcatcccccttagagtccgtttctacattggtaacattgagaaatctgtcctacatactcataacatttttgtaatcagaggagaaaatatgtgtaaaaacactgaaggaggccaaggcaggagatcacttgaagttaggagttcaagaccagcctgggcaacgtagtgaaacactgtctgtattaaaaaaagaaaagcaaaaaataaacattttgaagattattt

SEQ ID NO: 239170 - DNA, 457 bp, Homo sapiens
agctgggagagtatcatctggaggttagggaaagatgagtctggacaagtaaaggccaaatcttcctgactgttggatcaccacaatcaagataacgaatatatccaccggcccccaaaatttccttgtgttaggggctgttttaggaagtatgatcaagaagggctggcctgccagggtggagtggctcacgcctgtaatcccagcactttgagaggccaaagtgtgcagatgacctgaggtcaggagttcgagattagcatggccaacacagtgaaaccctgtctttaccaaaaatacaaaaaagttgggtgtggtgacgcatgcctgtagtcccagctacttgggaggctgaggcaggagaattgcttgaacccgggaggtggaggttgcagtgagccgagattgtgccattgcactccagcctgggcaacagagcgagactccgtctttaaaa

SEQ ID NO: 239171 - DNA, 311 bp, Homo sapiens
taggtgacagagtgagatcctgtctcaaaaaacaaaaaaaaggaataaagcactgataaattctatgatatggatgaaacttgaaaacattttgctaagtgaaagatgccagtcataagagaccacttttagtggggaggagggtggtaatggagagtgactgctaatgagtagcgttttttggggggggtgatgaaaatattcttaaactggttgtacaattttgccaatatagtaaaaaacattgacttctacacgttaaatgagtgaattacatggtacatgaatgatatctcaataaagctgttttt

SEQ ID NO: 239172 - DNA, 448 bp, Homo sapiens
  misc_feature (83)..(83): n is a, c, g, or t
ctgtagaccttccagcttgagctgagctttcactcaccgtccaccactgctgtttgctgccatcgcagacttgcactactccnccccctccagatccagcagggtgtctgctgctctcctgatccagcgagatggattccctacaggactcatgagcagatctcataatttctgggcatgttccacaccttggagtaggaatcagttagggttgttcttggctgcaactaacaaactactagcagtggcttaagcacggaagaacttaatgatctcacaggtgacctgggtagggaagggccctggtctactctacagctcttctagactctctcaccttggagtccaaacgcatggccttcctttggaacaccttctctctctcccacttcgggctcagctcctttgcagtgaaagattggaaagaataaacatctcttactcaatg

SEQ ID NO: 239173 - DNA, 384 bp, Homo sapiens
tactgtgtttttatattagtctaataacacaagagaataatatttagcacgtgtatttctcaggattcattttaacatctgtaaataaaaagttgtctgttgacatgttcaggatttacagtttctattaagcctagatcctttcagttaaaatattgttttcaacttaattactatataataataaaggtagaacaattttaaggtgtataaataagcttttaaatataataatagaagagtaagtagtaccagattaactaattaaatacttgtggccatcgcaagcaggtattcacatctctttaggaagatgtaaaatttgtaattttaaataatgtaaccttatcttaaaatcttttttttgttatcggactctgttaa

SEQ ID NO: 239174 - DNA, 276 bp, Homo sapiens
cccttccttaaaattgctacaagccactgaagagcatcttccttgttctatgtgtccagcttcagtctcgtcgctggacatttggttccagatctaaagcagcagagggcagtggccgtatgtggagctgttattaactgcatcaccttgttgtgaggatcaaatttgatggtgtttgtgaagagctttgcccagtggctggcagcctgtgatcatggctctgtaaatggaggctgccatcatcataatatcattatgaagcccctgatctcacag

SEQ ID NO: 239175 - DNA, 383 bp, Homo sapiens
tgagttgttgacaaatgtagacagccatgaaaccaccatgaaaccagaatcatagaacatttccatcatttcagaaaattccattatgcccttttacagtcaatctcttccattcacccctgacctctgtcaaccactgagtgttttctgtcactataattgtacatttctagggctttatataaatggaatcatatgtagtcactgtgtctgatgtctttcgtttagcataatgcttttgagatctttttatggctcagtaatattccattgtgtggatgtgtactacatcttggttttgtcctttaccaattgatggatgtttaggttgttactagttttaggctatcacaaataaagctgctatgaacattcaaatacaa

SEQ ID NO: 239176 - DNA, 559 bp, Homo sapiens
aatgcctgaatgtcataatggagtgctttgtaagtatacaaaaaatgaagtggcttcttttggacctgaggactcaggaagagaaaatggtaattgttctgagtcatgaagatttgttagaatgtcaagacagaagaaccatcattgtaaggggaagaaaaaataaaactaaaaggactatgaatgggaaagtacaaggtatgctctgaaaacacttggtacacttggagtgttatcaggaaggttgtcaggaggggataaaataggaaagcagagggcagatcaaattggcctcgaatgccaggctaattcattcaaggcacattctctgatattattctaatcctaatgtagctccatgacagagtccaaatcatcctttaacttggttggtgaaagttttatcttgtatgggggcaaagaaccagattgggtgagaagtggcaatagcatggaaagaacacaatcactgctttaagaacttccagactggtgggcagccagtcttatccacagaatagaataaattcagcacttcaaaatttaatattcactagtt

SEQ ID NO: 239177 - DNA, 2350 bp, Homo sapiens
  misc_feature (518)..(518): n is a, c, g, or t
  misc_feature (547)..(547): n is a, c, g, or t
  misc_feature (875)..(875): n is a, c, g, or t
  misc_feature (1007)..(1007): n is a, c, g, or t
  misc_feature (1159)..(1159): n is a, c, g, or t
  misc_feature (1292)..(1292): n is a, c, g, or t
tattggacttcttaaaataggctcagattgcaagaataattgtttcctacagacatattaaacaaaggccctgtggtgaaggaggtgctaaataatcagatggtcaagatgactttgaggatatcagtaaatctctttggtattccagcctttgttcaaacagtttatgggcaaagcggctatactggaaggatagggctacacaggaacttcaacaatacaggcctcctttcatcaaggctgtccttattactgccaggagccgaactggccagcagcagtgaccatcctaagatacaacatctgagggtgaccagatagttagtggcagattgattatatcaaatattttctttcatggagagacaactatttgtcctcatggaatagagccttactctggatctggctttaagtttgccttccctaagcaccatgcttgtgtgtgcaataataagcttcctgttcaccattatgattttccccaaaatattgcttctaagaaacttattttacantgtaatcagtgaggtagaggtagaattanactttcagtcatgggaaactaggtaattaacatcaaaattcccattggcaactagataatccagcaaaactcttcaaaacatgaaaatctaggccaggcgcagtggcttatgcctataatcccagcactttgggaagccgaggtgggtggatcacctaaagtcaagttcaagaccagcctggccaacatggtgaaagcccgtctctactaaaaatacaaaaaaaattagccaggtctggtagcacatgcctgtaatcccagctactcaggaggctgtggcaggagaatcgcttgaacctgagaagcggaggttgaggtgagccgaganagcaccactgcactccagcctgggcaacagaggaagactctgtctctaaataaataaacatgaaaatctagagaggcaagcattggcacaacttctttcctggaggtattggctgattctagaagcatttanggggataagcagtgcttcttactgctccaggatattaggaggacaaaaactgaatgccagtgcctgccaagtcataaaagagggcttaggaaattcccatgctttgggctgggacccaaaaaagctccaccataggagtaagagtgaattgnaagtgcatcaactctcccccatacacagggaattcagcacggattcaaaccatcccaattcctgaaatcagattaaaaatgatcccctaagtgcttggtaataaacaaatcctctgtggaggtggaaaaaaanccccatcatcttaagcctcaagttctacaatttttcaaatacagtcttcacaagagaaaagaaaaataaccagacacttctatagcagagcaacactcattgagaacaacaagcagctttgggtaaaattgcttaaaacctctgtttgaagccattgaagaactttcagctaaacaggactctagaagacaaaacgccagagagaaggtgtgcagaaaagagttaacataagaggctgagatgctatccttagccctgattttaaagctgggctttggctagtgtctgggaacttggattaccggaatgttcccaccattccctaactgataagggggtttactctttgtaaactatataaacaacatggtttatgctgaattcccgctttgcttctaggagtctggaattatgatttgtgctgggcagagggtgcctctatcactaacttccaatacaaactttgggcagtaagactctaacgagcatccctggcagacaacatttcacacctgttgtcacaattcagtactgaagtaattaaccacagcctgtgtgattccacaggcaaaggattcttggaatcttgtgtcaggtttcctctggacttcaccccatgtccttttcccctttgctgatttgctttgtagtacttttctctaataaatcatagccatgagtatgactatatgctgagccttgtgagtgcttctgttgaatcactgaacctggggtgctggcgtggtcttggggactcccaatacaaaagtattttaaccagagaagtgagcagacattctgcagctacttcttccattatggaatttgccaaatctgggtaaaaggcccaagaagagagttactgttaagaatcagagaagcaaacaagttatggaaaccacacaggactggagaaacaaaaagaacagggcctttaaaccaatcgcacttgggagagcagagatcctagtaagacaggaagttcagagaagtgagcctggcactttccttgttttcctcttgagtatttgctgaattcttggattgctcagagaggg

SEQ ID NO: 239178 - DNA, 209 bp, Homo sapiens
ggatagatagcatgttatatcacaaagcaagtcttaccaaattgaaatcataccaggtatcttttctagccacaatggaatgaaattagaaatcaattgcagaaggaaaactagagaattcacaaatgggttaaagttaaacaacatatttttgaacaaccattgagtcaaacaaaaaatcgaaagagaattaagaaataaattaagac

SEQ ID NO: 239179 - DNA, 234 bp, Homo sapiens
ttggaagaacgtgaagtgggtgatgtgaagaacaagacttagattattccagattgtgggtgaacaacaagtgtggtgtttaaccatgatcctaggactttataggctgccatcttgcatccctttcccgtgatttttctcttgaggtgagctgcccacatgtgtagtaccctccttacccttgggaagtgagcacacacagggtgtttaggaagttgtatgcatggccatctg

SEQ ID NO: 239180 - DNA, 415 bp, Homo sapiens
ttctttggtaggtaaaactctccattataaaataataatacactaagtcatacgccatagccttcagcaattttcttaaagttattttactttaagaccagtgttgccaacattgaattcattttacagataaggaaactgaggctattttacccaatgataatgtcggaatgagtcagactattgtaattgaaatcactagcttagttccagatttaaattaaggcctctcacatatttgtaaatgtgacaggcaccagtagagatcattggttaatgagtggaggttggagtggagatagggttccattaatcacaaactctaggccatagttctcaatgtgtggtttggggccatatgaggagtaagaaaatgtactcttggaggaaaggaaacaaacacaaagcttgcaaa

SEQ ID NO: 239181 - DNA, 384 bp, Homo sapiens
tgccggccgcaaggccggggctccccgctgctctcgaaaagccgcaggtactaaacagacaagtactttgaaacaagaagatgcttctaaaaggaaagctgaactagaagcagctgtgagaaagaagattgaatttgagagaaaagctctacatattgttgaacagcttttagaggagaatattacagaagagttcctaatggagtgtgggaggttcattacacctgctcactacagtgatgtcgtggatgaacgttctattgtcaaactctgtggttatcctttatgtcagaagaagctgggaattgtaccaaaacagaaatataaaatttctaccaaaaccaataaagtctatgatattactgaaagaaaggtgagtttaaa

SEQ ID NO: 239182 - DNA, 987 bp, Homo sapiens
tttttaactattaagaatatttactttaggctgggcacggtggctcacgcctgtaatcccagcactttgggaggccgaggtgggcggatcgcgaggtcaggaaattgagaccatcctggctaacacggtgaaacccagtctctactaaaaacacacacacacacaaaaattagccgggcgtggtggtgggcacctgtagtcccacctactcgggaggctgaggcaggagaatggcgtgaacccgggaggcggagctggcagtgagctgagatcgcgccactgcactccagcctgggtgacagagcgagactccgtctcaaaaaaaaaaagaatatttactttatacaaattaatcggtagtttgaaattaactgggaaatatgtcttaatgggatatgagcaaggaatggaggatattacaaaatagaagagccataatttcaggaagaaaaatgttagcaaacttaataacaagcatgtatatttcaacaagtctgtgtatttcatcttatttttctcattttgccacagatcctcatagggccttaaattgagatgggcatttggaaacttctgctttaaaacttaggaagattcctaagtgtcttctgacaaaagctgatagatttataatagtgtagttttatgtattttttgtagtctatggtacttttatttgaaattctttgaaaattggtcattcatgtatgatatacatgacaactaaactcattaattggaaaagcccactctttaaccattgtcttaatgattaaatgtgtttttccatttgtatgtgaaaatatacaaacttttaaaacaatgaaaatgagtttcttaatatgaatggtaaacattaaaacttgttaatattcattaagttcaaaatggatcaaaatttttcatatatttctgagacttgaaaatgaaaagattaagaatgactggtaaactaataaaggttattgtgaacaccagattaaggaa

SEQ ID NO: 239183 - DNA, 327 bp, Homo sapiens
tgcaagcccaggtcttggggcgcgagctaagtcccccttgccagctctaaacaaaattcgggggagaatgagtcggccagtctgggcacagggtgctctcgactgccgggcggcgggcggaagcgcagggccctgatcgcccccagaggtctgagcgcacagggcagtggctgcagagccccggcgcgaggccaactcggatcatccacgttgggacctcagcctgcccggttgtccttagtaataataatagtatgaaaccgagttttaaaaaacctttccccgcattttcctctatgtacaagggagaacaagtatttctaggca

SEQ ID NO: 239184 - DNA, 188 bp, Homo sapiens
tattgttcaagggtcaactgtatactgatagcattcagtaaaaagctgaaaatccaaattcctcaaatctgtgaacagtccaaatctaaaacaaatctaaaacaaatctaaactaaaaaagtaacagtttagatagtattgtgggcttaagacatttcttactgacatacttcttgaaagaattttat

SEQ ID NO: 239185 - DNA, 405 bp, Homo sapiens
aatggaaatgcaaaagaataagaatatgcaaggctactcttaaaatacagttcctggatgttatcaaggccaatataaagttagagtaattaagacagtgtggtaatagcacaagaataaaaattatgaccagtgaaagagaaactccagtaatagatgcacacacacgttcaccattttttatgacaaaggtaaaactgtagggaagaggggaaaaggtacccttttcaataaatgacagtttttccatatctatatggaagacattatatcttgacccctaactcacactatataaaaaaatacagctacatataagagttataacagtatagtttttagaagaatatagaacatattttatgatgttacaatagtcaaagattgactccaccatcctccacc

SEQ ID NO: 239186 - DNA, 333 bp, Homo sapiens
gattccaaaagggtgtctggtttcatggaaacattcttctcaccctcatttgtcatcgcacaccccacccccgctttttggattcaggttcaggaataaccaaatccttggcacccacacaatgtggaagtacctttcacagctcatcgcctgaatgtcttgctccttacatatatgtgtgtgttttgggggaatgtgagcttctcagggaacttgatgccttgcagattatgagaatgtcaaacttgattttattcagtttcttataggatgtgtttcctgtgggcaagaattataggaaataaatgtcagtgtcatatacaactgcagtag

SEQ ID NO: 239187 - DNA, 400 bp, Homo sapiens
atttactaaacttcactccccctcccccaccccagccctttcttttcagaagacacatttagacaatcaccattcacctccaattcaaaagaactgctgcccagtgactccgtgctgcacggaagaatatcagctccaggcctgttggagaaggaagccagcagtgagggggattgcaaagtagagagaggttggtagaactgtggactgtgaagagatcgagaatagcacagttaactaggcatttgccttcggcagatggcatctgaaactcacagctgccaccgtcccagagaaacagaataaacacagagcttcacggtgtcctggctgcggttgttgccagtatttctagactgactttcctgagaactaaagaatgctcatgttagccaagacc

SEQ ID NO: 239188 - DNA, 1735 bp, Homo sapiens
ttgagaaatgtccagatgatttggaaattaggttatgtttttgatacagggcaggttcctggcttcactcaggaaggaattcaagagcgagccagttgtagaggaaaacagctttattgaggtggtgacaatagttacatctctgtgactgctcccgcagagcgggactactccatataggcagtgtgctgagagcagcagctcaggaacagtctgcagtcatatttatacctgctcttaatgacatgctaattaaaagatgggtgattcacaatttgccagaaaatgtactggtgttgcttccaggtgttgccatggcaatggtaaactgtcttggtgcaagtgggtgtgtcttatggagaggtgctttccatgcctcttccctgtttcggtcagtcttcagtctggtccagagtccagtcctgtctgcctcctacctgattttcacctttgagaaatctgttgttttcaatggtgagagcaggaaacacaacgttaagggctgagtaaacagcaggtattgtcagggacggacgcagtaaaaagaaatggactaaagggataagaaggtcattagaaggtggttttacaatggggagagattgaaaacagaagaaaccagcggagaggtcacataacaacattggaagcaaggagagtggaatttagaattcaggacgtggagagtgttatcagcaatatggcagaataggagttccttggtttcacacaccccaccccccaaaatgtaactagcaatgatccgcaggcaaaaaatactatcctgaatatcccagaactctggagtgaggctgagatacttccttggactgcacaataaccaagaaaaaccacaatcgaacagtaagagaaacagttctttgaccatgtcatccttctaatatgctagccagagcaattaggtaagagaaaaaagtaaaatgcatcctaataggaaaagaagaaggaaaattgtctctatttgctgatgacatgatcttatatatagaaaaccctaaagactccatgaaaaattgttaggactgataaatgaattcagtaaaattacaggacacaaaatcagcacccaaaaatcagcatcatttctatagactaacagcaaactatctgaaaaagaaattaagaaaataatcccatttacaatagcaaaaaaattaaatacataagtataaatttaaccaagaagataaaatacttgttttctgaaagctataaaacactgatgaaataaagtgaagaaaacacaaataaatggaaagatatcccgtgtttatagattggaagaataaatgttggacaggtgttcatactacccaaagcaatctacagcttaaatccatatggaatcataaaagataccaaatagccaaaacagtcttgagcagaatgaagaagtctggaagcatcatgccccctgatttaaaaacattatgaagcaattataatcaaactgcacgatactagcataaaagcagacacatcaatcaataggagaggatagaaaacgaagaaataaacccacacctttatagtcaccttatttatgacaaaggtgaggaacacaaaatagggaaaggacaatctcttcaataaatggtgttgagaataccagatatccacacgcagaagaatgaaaattgacgcttatcttatgccatgtcaaaaaaatcagctaaaaacagattaagaacttaaatataaaacctgaaactgt

SEQ ID NO: 239189 - DNA, 919 bp, Homo sapiens
agtcttaatgcatatagaaataagagaaatgagaaaagaaattgaaaagagagacagcagagaactgattctctactagagcctccagaaggaatcaactctgccaacaccttgattttggacttgtggccttcagaacagtgaaatgataaacatctgttattttaaggtacctagtgtgtaacattccgtcatgacagccctaggaaatgaatacagcgaggaaaatcctaccagcacaaaggcatggaggtgccaggatgtctcctctgcgtgaagagtagatgtagatgaggctggaattatctatcctagctgcccagacccatgtgcctttgttttatgtagttacagcacctatgatacatatttgttaccatgtatgtcactatgaacctcctctggaggacggagaagtcaaataccttaattattccaacacaagcttgcgtgaacagataatcatcactacgagtatattgtgtgcctgctaagcaccacgcctgagataagcatttgctgtggtttgaatgtcccctccaaagctcatgctaaaatttaattgccattgcaacagtgttgcaaggtgagaactttaagagatgatcaggtcatgagaactctgccctcgtgaatggattaatacccttatcgcagtagtggaccccccttttctcttgctgtctgtctctcatgttagcttgtgcttcctcctttcaccatgggataacacagcaagaagcccctcaccagatgctggcaccttgctattggacttccggcctccagaactgagaaatacatgtcttttccttataaattacccagtctgtggtattctgttatagcggcagaaaatggactaagacggcattttgcatacattatctgtcttattaaaaataatgtttttgcccag

SEQ ID NO: 239190 - DNA, 352 bp, Homo sapiens
atacagaccaggcagacatgatgccatcattcagagcaaggtaaggagagctcagactatggtgttacaatcagaaatgaagttgaagcaacagatatgaagatattgagatatatgttcagtcaaatagaatggctaaaaagaatataaagagaaaaattatgaaaggaaatacaaatatctaataaacatgaaaaagtataattcactaggattcaaagtcatgatttatgaaaaatagtaattttcagtgctggtaatggtacagtgaaatagacactcatagtgatagtggatatctatatattgacacaaaattctgcaaagtaatgtagcattatgttatccagaa

SEQ ID NO: 239191 - DNA, 760 bp, Homo sapiens
tattctaaagcataccaagctcttcgtgtttgctgctggagtgactgtgtgttcccttgcccttagatgaagaaatgctttcaaaacctctgaagatgcctgaatgggtatcgtgcagcagtttttggtgttactgacgaccagctctgacgagagtcttcggtttcttagcttcaggctggacttcaacgagcattacaaagccagggagcccaggctccgcgtgtctctgggtaccagggggcggcgcagctcccacacgtgaagctcgcggtcctcccagggagctgcgggtgatgttcgttgcactgctagacacgaaattcccattgacgtcctgcaggaactgcatgctgcaggtgtcctgcccttccgcccacgagtgcgccatgtttcagcggagcggcgtgtgggagaagccacgtcgtgttgcacacgtcggagttgaatgcatttgtaaatcactaagtcaagtaggctggctgcactgttcacatttgtctctaaaagtcttcatccccaaaagataccataatttgctgaggcttctgaatcttaagtgctctaagttataacttatatttgtcactttaaaagaactgtttgtttagcaaaatctacagcaagggtatatttataaagtgataatgtcattgctgttatttagcatcctcttcagaaacttttttttgcaatattattagattaaactgaaatacatagaaaatatagagagcattttattatcttggtattcaag

SEQ ID NO: 239192 - DNA, 1567 bp, Homo sapiens
  misc_feature (962)..(962): n is a, c, g, or t
  misc_feature (1144)..(1144): n is a, c, g, or t
  misc_feature (1538)..(1538): n is a, c, g, or t
tgcttgaacccaggaggcagaagttgcagtgagccacctgtgaagagagagcgagcattctgctgggtgtataagtggattgtgtgcaatggtgcttcagtctagatattcatgccttaatcttactgtgttcgtctctccctttttcaggggaagcctgagctttgcttagtgatgatggccctagtgtgaggactggggcttgtggagtagcctcttgtttgctctagccaccccactgcctctgtcctctgcagttactaggaccttccctagcaagtttgcgtcctttccaccacaggcatgacctgcctctctctgctctcttccagcccgtcctctctctgcctagtccttttcagacacttgcttcttggcacctttgacttttctcactgccgggctgcccctactaaggatgattgccctgttttcgtagctctaagaagcagccaaaatccactccacctccctcccaccctccgtcactccaaacagcctggttttgttccagtcaggaaaaggtttctttcttcctcatatttttttgaacaaaatattttgcatacggaagcccggagctcctgcaaaagtgattttgtacctaattatttaagattataagttaaccccacttgcagttttttcagccagagatacatcttaatgaggtgctgacatttttcagaggataaatttaaagatacatttgaatggaactgaataattttcaaaggaagtggtcatacttctgtatcaatatagaaagttgatgtgtgtttgagacatacttggtttattttacttcatcatctgcctctgtctaatttatgaccttcacctgaaatggaataaaagtaacactagattttgggtctgtctttaactggatctggtcttggccgccacttaggagtttgtatgacttttgacaagttcctggcctgttttctcaactgtanaatgggctgaacaatgcactcctcccagatgtgttaaggagattttagaagtagtaggtttaagaatactccgagtgttagactacttccggtcttacttagtacagtaggtaggccttgaattacagtgctgtagtacataattatgtactcctttttcagtagttttttcccagtaatangccttcagtcagtgttggcactgtatttaatttgacattctgaacagtggtattccagagtatgtgcagtaaactcacctgcctacagaagagtgacccaaatcctgtgattaagaaagaaaagaggggccaggtgtggtggctcatgcctgtaatcccagcactttgggaggccaaagcgggcggatcacgaggtctggagttagagaccatcctggccaacatggtgaaaccccgtctctactaaaaatacagaaaatgagccgggcatggtggcatgtgcctgtagtcccagctactcaggaggctaaggcaggagaatcacttggacccgggaggcggaggttgcagtgagcccagatcgtgccactgcactccaacctggtgacagagngacagagtgacagagcgagactctgtctc

SEQ ID NO: 239193 - DNA, 450 bp, Homo sapiens
tgaaagcgaggaggaggaggaggattataagccagtgaatgacgtgcttttgattttttaaaaaagatcagcagtggctggtgggtgtttagagagcagctgatagatatcagaagtttagagatcagataaaaaggttaatgtaggctgggcgtggtggctcacgcttgtaatcccggtactttgggaggcagagtgtggggtggatcacttgaagtcaggagtttgaagccagcctggccaacatggtgaaaccctatctctactgaaaatacaaaaattagcccggcatggtggcgcacgcctgtaatcccagctactcaggaggctgaggcacaagaatcacttgaaccccggaggcggaggttgcagtgagccgagatcgcgccactgaactccagcccgggcaacagagcgtgactccgtctcaaaacaaacaaacaaacaaac

SEQ ID NO: 239194 - DNA, 493 bp, Homo sapiens
ccaagaaccagagaagagaagagaagggaagggacctgtggccacatagcaaggccatggcacagccgaagtctcctctgctttcctcatgcagccccgtccaacccatctctttcatctcttttcttaaaacttaaaaatattttcaggggggtgtggtggctcatgcctataatcccagcaatttgggaggatgagatgggaggattgcttgagcccgggagtttgaggctgcagtgagccactgtagtccagccggggtgacacagccagactccatctttttctctgtatattttttcacctctacctgatgtgactgagtaactgctggggtacatcacctctttcaggtgatggaaatgttctaaagttgattatgctgatggttggttgcccagctgtgaatgcagtaaaaacattgagccgtacactttaaatggacaagttatgtgtgaattatatctcaataaagctctgtgccccacccaaa

SEQ ID NO: 239195 - DNA, 483 bp, Homo sapiens
ccatacctataatcccagcactttcagaggcagagacagtcagattgattgagcccaggagtttgagaccagtctgggcaacatggcaaaataccaactttactaaaaaatatttaaaactcagcctcctgaccatctgggactgcaggtgtacaccaccaactcctggccgatttttgtattctttttgtagtgatggggttttgctgtgtttcccaggcttatctctaactcctgggctcaagtgatctgcctgcctcagttcccaaagtgctgggattacaggtgttaaccatttcagccagctggaaaatgtgtttcaaaataaagttaaatttactaaattaaaagtaaatgtaggctaggctcagtgacacacctataattccgtacttggggaacctgaggtgggaagatgccttgagctcatgagttaaagactagcctgagccaaaaagcaagttcctttgtctacaagaaatt

SEQ ID NO: 239196 - DNA, 541 bp, Homo sapiens
catcctggttctccacgtttaacattggactgtttcttcaacttaggtgcatagcactgacactaatcagggattatcaccgataatttgacttggactatggagttcattcaaatactttatctagacaatttaagtactggcttatttgtcatgaaaatctgacaaagtaatttcttggtattcagttgatttttactctgtttgggttagcagtttataaaccagtcagtctcttcattaaagttctgggaattcttactcgttcaaatgatatgattctaaagttctcaaaaatctgtattctagaattcttctcaggaccttttccctcctttcatgaaactccttaaagatacagtattctataattttgcaagcttgtacagttttcagaaactgcctcagaattaagcaatttacagtggaaatgtttttaaattgtcatagacacaattgacaagaaaattttattatttacaggcgtgagccaccacacccagcctctgaagttaatttaataaaattttatgaataaatt

SEQ ID NO: 239197 - DNA, 436 bp, Homo sapiens
aggggtgaaagcctgatgatctgccaaagcatgggacaggaaggcagaaacgtaagtggaatgtagcatgaccctagcagccggaagaaacagttgaatctctcaaggaacttctcaagtgtagtgatggtggctgctcaggcttgagtccctcaccagcccagccagaccatagtttacagagagctaaaccagcaacctcaacagaacatgttgtcaaatgatcctgtctaaaaactgttgattaatgagctgatgtcagccagatggaaggttatgaaagcatggtgtcaccaggttgccctaggacctatttgtaatattcccttacagaaagcttacacctggaaatgtaagaaatgtgggaaggcaatttattcagggtaaaggccttggaagactaaagaattaaagaattcatactgctgaaaactct

SEQ ID NO: 239198 - DNA, 141 bp, Homo sapiens
cttgcaagtcagatcagccccttccactggcaccagggggtcaacgatcactttcttcttttcagtataagggaacactgttctcttcccttggtctgttaagtcatggttttctttaaaaacatcatccattataatccc

SEQ ID NO: 239199 - DNA, 498 bp, Homo sapiens
tgaacagaacaacacatgtgaaaggggtctaagtttaatagaaacctaaaaaaaaacacaaatgaacaaaaaaacccctttctatcacaagagggctagtatcttatacttcacattttgttcaaggactgagttgccataagttggaactttgacatgtgacttggggagtctggggtgcatcatcggttgcatctcctgagaaaattctcaaactaggaaaaaatatgttgacagtgagccacaaaggttggtatttgtagctgccatcctcagtgtttaggagaaataagttttcattatgggacatggaacagatgtcaaatccccagccatccttgtgctgtttgctgtttgttgagtcaccctggagcttgtccatcccggcaccaattttcatgggaagcatcaatgtggggccagaaggccatgctgatggatgggctcacaagaggagagctggaaggggggccttctgttggctctggtcatcttaat

SEQ ID NO: 239200 - DNA, 443 bp, Homo sapiens
aataaaaaagtggtgattgttattaccagcatggctactactagctaattccaggcttcaagccactggggcataggcatatgtttagctcattccacaggaggggaacagaggctcaaagaacctaggtaagttggctaggcgcggtggctcacacctgtaatctcagcgctttgtggggcttaggcaggaggattgcttgagctcagaagtttgagaccagcctggacaacatagcgtgaacttgtatctacttaaagtaaaaatcaaaaaaataatggggtgcagtggtacatggctgtagtcccaattactcaggaggtggaggtgggaggattgcttgggcccaggaggctgaggctgcagaaagctgtcatcatgccgctgtgctccagcctgggcatcaaggtctgttttgcagaccttgtctccaaagcaaaaca

SEQ ID NO: 239201 - DNA, 599 bp, Homo sapiens
agagtcttactctgtcacccagactggagtacagtggcgccccagctcactgcaacctccacctcccaggttcaagcaattctcctgcctcggtctcgcgagtagctgggataacaagcgcctgccaccacgcctggctaatttttgtatttttagtagagacggggtttctccatgttggccaggctggtcttgaactcctgacctcaagtgatccacccacctcagcctcccaaagtgctgggattacgagtgtgaaccaccgcacccggcccaaataatatatttttaaaagatattatactatttgcaatttgaggttaagctttacaagcatctgttttgtcttttttgttgttgtttttttagacagagtctcgctctgtcacccaggctgtagtgcagtggcacaccctctgctcactgcaacctctgcctcccaaggttcaagcgtttcttgcacctcagcctgctgagtagctgggatcacaggcatgtgccaccacacctggccaatttttttgtatttttagtagagacaggctttcaccatgttggccaagctggtctccaactcctgacctcaagtgatccatctg

SEQ ID NO: 239202 - DNA, 470 bp, Homo sapiens
ggtcggcttgctctacggcctggaaccgggctctagaaaaaaaaggagattccgaacgtatctcatcaaacacttgcaaagccgggagatctgtctgcaaatatccggaattccattgcagtatcggattaggtaggctcataaacaccgtgcttttgaggtgatttggaagaaacgcgagccacgagcgaggaactagtttctggaaaatagccgtaaacctgtgcggagcgaattattaaccccccgccccagctcccccctcgaagctcttttcctgtagctgtgtgttgtgtagacgcaagccagtttcagtgtacgtgggcgtgtttgggaagaagctgcgagctgataggaggtacctagtacaaatgttaatttgtttgagttgggaggggtaagggaggaggaagaaagggcactgatgttagctgtggaggaggggcaattgaaatactaaatttctgtta

SEQ ID NO: 239203 - DNA, 271 bp, Homo sapiens
gccaatacactccagcctgggtgacagaatgagaccctgtctcaaaaacaaaacagggagttgaaaaaataagaaaaatcaacattttcatataaagaaatattagacaggaaaccaattcagctggctgcctgtagggaccagatgggagcaagaggagtaagttcttaaggtaaactttgatatattattttggtttctgggacattaagaatgctttgcctattcaaagcaaaataaatgaatcttaaatgatagaagcaaacaaaac

SEQ ID NO: 239204 - DNA, 346 bp, Homo sapiens
gaagatttacattatttcaggttattatcacaacaagaacagcagttttattcctccatccatttgataaataataattcagatttgaaggatatcttactcattgattcccaaataataaatggtaaagctaggattaaatttagatctatttgattacaaagtttatggttttttgtaagctttaggaaaaactgattatgtgtgcgtttttcatgcataaaaagtaaagaaagctatcattgtcagatatcaaccccagaatttgcaagcaaattttttccttttttttttttttttctttaagttcagagaaaaagcaggtagcagcccaggagcaaaaatt

SEQ ID NO: 239205 - DNA, 497 bp, Homo sapiens
tccactgcaaggaatggtgggacatccatgttagtcggagagcatccgggagaaatccagcacgcacacccacaatgtccggccgcgcgagcctgtgaaagcagaggaggagggaaatcagtaggaaacccagccttggtaacggacgagatgtcgatagcgagccacagcccggcacaaaaggcgctttgctagcaaaggttttgccaggccctattctactgcactgctgcacagcttctgacgtgaagccaagattaagtgagaaagactgagatagctgctctcctcttaaggctcccggccagtgagctccccaatatctattatgcaaccgatctgacagcccgccttgagttgcaagaaagaagtaggatttatttatggggagaacattgcttttattttccatgagtatttgctgagagaatgactggtgtatgtaagcggacttcttacaatcaactgatgaatttcattaaattactagctaaatc

SEQ ID NO: 239206 - DNA, 294 bp, Homo sapiens
gccgctgcctgctgccagcggcttcctggcccccgtcagcaacaccaggggcagggagaggcccaccgtcttctcctgcccgccccccattggcgagcgatgaaggcgggggcctgcgtctccgtgttcgggtctcacgcagctagatgttgattccacggtccagcctaaggcccctcagtctctctgtgcctctggaagccgaatgaggggcagtcaaggttgaacattggtcagtcagttctccgaccatttattgcaccgctgtctcctcccccgtccacctccctttac

SEQ ID NO: 239207 - DNA, 152 bp, Homo sapiens
aaaatattacctcacacctaccaaaatggctaaaatttaaatagtaacaaaaccaaatgctgacaatgatatagggaaactagatcacccatgcattgctggtagaaataaaaatgatccagacactctggaaaatagcatagtgtttacct

SEQ ID NO: 239208 - DNA, 223 bp, Homo sapiens
aagagtagaggttaagaaaggataatacatatgatttgggttatgttacgttgcatattggacatatgaaactatccagcatggagtagaaattctaggactgggctgggcgtggtggctcacgcctctaatcccagcactttgggaggccgaggcgggtggctcactagaggtcaggagttcgagaccagcctggccaacatggtgaaacctcgtctctact

SEQ ID NO: 239209 - DNA, 651 bp, Homo sapiens
tgaggttctggataactagtcaatagattgaaatcaaagagagaaagtgccgttccttaattgatttttaatggagggtaaacagttcattatccttaattcagtaaagagcagaagttattttcatatgtaggtaacttgtttagaggcattaatgtatggctaagtttgagagggggaaaattacacttttaaaacaattatctttgtctggtaaccagtgaaataccagaaaacactgttgtaccagttacatattgttgcataagaaattaactcaaaattaatggcttaacacagtaaacattatctctcagtttctgtggttcagtaatctgagttcaggttatctgaccacctgtgtctcggggtctctcctgaggttgtggtcaagctgttggctggggcattggtctcatcagaaggctcaactgaaggagactccatttctaacctcgttcaggtgattgttggtgggacccaattcctttcaggttgttggactgatggtttcagcttcttgctgcctgttggccagagatttctcagttccttaccacaaaagcctttcctggagcaactctgagcaagacagacaacagagtttttttgtaacctaaacttagaagtggcatcttagaagcaagtcat

SEQ ID NO: 239210 - DNA, 774 bp, Homo sapiens
attcctcagtcatcttctctgaaataatgagatttcatggagcaggtggaaggctattgttttctctttcatgggatgcagccataaggcagataaaagaagagcagagaatagcctcttccagcatctgctgcctttcaaaggcctttaaaataatcagcctaccagggtactgtattttggggtgacattccctgggttcctttagtcacatagctacttatttaataaatgttgatggtactggtataaaaatagacacgtagaccaatggaacaaaatagagaacccaaaaataaaaccccatacatataaccaactgatctttgacaaagtcaacaaaaacatacagtggggaaatgataccttatatatctctcatcatatatatatatactcaaggtggattaacaacttaaatgtaagacctgaaacaaaaaattctaaaagaaaacctaggaaaattctaccaaacattgacctagtcaaagaatttatgactaagatctcaaaagcaaatgcagcaaaaaaatatatacacaagcaggactaaactaaactaaaaacttctgcacaacaaaagaaatagccaacagagtaaacagacaacctaagaacgggagaaaatatttgcaaactactcatctgacaaaggacaagtaccaagattctacaaggaactcagacaacaagaaaaaaggaaataaccccattaaaaagcgggcaaaggacatgaacaggtatttttcaaaagaaaacatacaaatggccaac

SEQ ID NO: 239211 - DNA, 1793 bp, Homo sapiens
  misc_feature (929)..(929): n is a, c, g, or t
ttttgttttgaaactttttgtagagatgaggtcttgctgtcaagaccagcctggccaacatggtgaaaccccatctctactaaaatacaaaaatgctgggcgtggtggtgggcgcctgtaatcccagctactagggaggctgaggcaggagagttgcttgaatccaggaggcggaggttgcagtgaactgagatcacaccactgcactccagactgggtgccagagcaagagtctgtttcaaaacaaacaaacaaaaagaactttaaagatctgggccattgtcgacccataacattaaagcaaactttgtgagattttacattttaattctattaatactgctgttttaattgaggaactaatcaggtaaagattctgtccaccttcaatgcttctgtaaactagagcattttatcttgtaaaatatatgtttttcaaggtgttattctgacacttcttaatgtttttgagagacagggtctcgctctgttgcccagtctcaaactcctgggcttaagtgatcctccacctcagcctgccgagcagctgtgactacaggtgcacaccactgcacgtggcttgatggtttccctataaaatataatcatcgactgagtcacctgaatccttttggaactagatgggagtaaacacacccacaaataagtgcttatcaagagtattccatttcccgtcattactcagggctgcacagattttcctaagtgctcatcaaaagttcagtaaataatgtagggctatttcataaatcttttatgctgtttttcaggggtcagaagtttcctaaaatttttgagtggttttgcctgttatagaaacgtatatgtttattaaggagaaaatggagtgggaaataaaaagaataacgacaggctgccattgtctgaagtctagctatgtatattgnaaaaataccttccttctgctgcattaaaaaaatatggctctagaaaaatcaaccagttttcctggcaatgaggtaagagttaaccagaccagaatatagtccatgcatccaacatgatagctagctcattggcttttagggacaggtttttgtgtgtttgcctggtttttgtttgtttgttgttgtttttattgtaaaatatacataacataaactttccaacgtgaccctttttgagtgtacaatgcagtgggattaagaacctttactttcctatgcaaccatcaccaccatctctctccagaacttttttgtcatcccaaactgaaactccatccccattaactaccaactccccattcctccctcctccctctccttgtttgtcctgaaagcctgagtgtcgtggcctaaccctactgcaagagagcactgcaaccagcacatgggaggcaggatgcacctcttcccttcatgctttctactaaggcattaatatattacccactaacattttgatgtttatatgtgggggaacattgaagaacccagaattttatgattgaattattggtggggcgtggtggcccatgcctgtaatcccagcactttgggaggccgaggtgggcggatcacctgaggccaggagttcaagaccagcctggccaacatggtgaaacctgtcactactaaaaatacaaaaattagccgggcatggtggcgcgcgcttatagtcccaggtacttgggaggctggggcacaagaatcacttgcgtgggggaggcagaggttgcagtgagccgagatcgtgccactgcgctccagcctgggtgacagagcgaggcttcctctcaaaaaaaagcc

SEQ ID NO: 239212 - DNA, 273 bp, Homo sapiens
cctaatattgtttactataggaagttaaaataaaattagagaccatatatagcaggtaccataacattgactaaaacaccataagtgcttcataaacaggaggtatggtttatgtgataataataaatgtaatgttatcaatgaatagtaaacatgaaatgtaatgagcttgtgagcatcaatgtatgttactgtaagtatttgctctgaggatgtgagaggtatgttttgtttttatttgtgaataaacgttcattaaaaagcataatagca

SEQ ID NO: 239213 - DNA, 427 bp, Homo sapiens
tctttaactgtgttctacaacatttttaggtatttttaagtttctctatttcatttaattttaaacaacccttttaggaggagatgtaaccagaggcaactacttctctataaaaatcactcagcaactatatagtatacatgatacagaattttctatttccataatctctaaactggcactgtagatgatttacaaacatcctgagggacaatggcccttggtagacaccatagagaacattaatgttctggtaattttgtagaaaaattattctagtctgctgtactgcaaaacagtctcactacagagccacagggagccactgcacaggacaagaggagggggagatgggagtcacagagagcacagggagtcacagagagtcacagagcagggggacgtgggagtcacagagagatccttc

SEQ ID NO: 239214 - DNA, 388 bp, Homo sapiens
taggatttgccgatagatttaaaggagagtatgttgttaagagtgactcaggtttttagcctgaggccctcttaaagatggtgctggcaggaactagatgatgtagactgcagggtgagccagttggggaaaggaaggaagcaggaggtcagtttttatcccattgtttgagctgcctgctagtcatctccacagtaatgtggagatgtcagttacacagtttggacatgtgtgccgggggttctggggagaggttgggctatgtggatggtatgtaaagctgtgataccggatgatccaccaaagaggctgaggcaggagaatcacttgaacccaggaggcagaggttgcagtgagccgagcttgcaccattgcactccagcctggg

SEQ ID NO: 239215 - DNA, 342 bp, Homo sapiens
caaatcgtgtatctggtaagttacggaaatcaagaatatatagagatcttctaaaacccaataacaaaatccaattcaaatatgagcaaaatatttgaatggacatttctctaaagatatgcagatgatccataagaaaattgaaagatgttcaacctcatgatcattatataaatacaaatcaaaacgacaataaaatatcaacacacccattagaatagttattatcaaaaattaaaaaaacagaaaatgagtgttggcaaggatgttgtaaaaaactttgaaaacttgtgcactggaaataaaaataatacagctgctatggaaaacagtatgctgcct

SEQ ID NO: 239216 - DNA, 443 bp, Homo sapiens
cagtacagtgtgtaggaggggtgttaaattctggggctgcagctccagcagcagcttctcgatttgacaagctggtttattgattgtgtcagggccaacagcttcctctgcagcccagtcttgaggctgaagatattagtagccaagtgaggaatgcctttattagggtgtgcaaaattggttcaactaaactgaatgttaaagatgatcacatgggccaggtgcagtggctcatgcctgtaatcccagcactttgggaggccgagatgggaggatcacttgaagtcaggagttcaagaccaacctggccaacatggcgaaactccatctctgccagaaagacaaaaattagccaggcatggtggtgtgcacctgtaatcccagctactcaggaggctgaggtgagagaatcacccagactgggtgatagagtgagactgtct

SEQ ID NO: 239217 - DNA, 366 bp, Homo sapiens
ggctggagtgcagtggcgccatcttggctcactgcaagctccgcctcccgggttcacgccattctcctgcctcagcctccggagtagctgggactacaggcacctgccaccacgcccggctaatttttttttttgtattttttagtagagacggggcttcaccgtgttagccaggatggtctccatctcctgacctcgtgatccacctgcctaggcctcccaaaatgctgggattacaggcgtgagccaccgcgcctggcccataacagtttcatgaggtggtctgtctcatgttgtatggctgtggtagctgacaagtcttgtgttctggctctccaccagggagaaagaagccacagccaagtc

SEQ ID NO: 239218 - DNA, 138 bp, Homo sapiens
gcctgattgccctgattggaatcttcagtacaatgtggaataaaagtggtgaaggcaaacatccgtgtcttgttctggatcttagggagaaagcttttatcattaactattatgttagctgtggcttttccatagatg

SEQ ID NO: 239219 - DNA, 411 bp, Homo sapiens
actcaatgcttgccccactgtgttggctctgggatatacacttcttacctagacgtttatttttactcacaggatttactaaaccttaggagctgagccaggaatggtggtgcatgcctgttgtctcagctacttgggaggctgaggtgggagatcgatttaacccatgtgtttaaaaccgaacggagctatgatcatgccactgcactccagcctaggcagcagagtgacagcccgtgaagaaagagagagagagagagagagtgagagacagagagagacagagagagagagaccttaagagctgaatccttatcaacggattctaatgaaaggccatgcttttctccaaaatgctggatgaggccatctgtctactattcttgttaataaaaataatgagatgctgct

SEQ ID NO: 239220 - DNA, 335 bp, Homo sapiens
aagctttgcaaacagctccaagctctgcaaataatgacacacagggccaagctctgcaaacacgtgtgaggagacagaagcacacagaggagaattcacctgccagggccatagaaatcctgcgctgctgtccagcactgggattcgtgtctgcccaactctcaggtggatgagttactattacgggtgacgtagcaaagcagtttggtgtgcagaccacaggcaagaactgcttgaatcctggctctgtgatctgtgggaaatatgtaacctctcgcctcctcagtttcctcatctggaaaatggggataataattatacttatctcagagtgt

SEQ ID NO: 239221 - DNA, 496 bp, Homo sapiens
gccgagggagggagctgactgcctttgggcagagcctgggttctctgacagctcctcgctttctccctggggagtctccagcagtggtccccccaccccccaaggggcccatgagcctgcaggatatgtcgcgctgcagccagcacagtgctgcttcaaactgccacttgagagctccagcgtggggacagcgtggggcccacttcacagccaggctgccaggagacgctgtgagagtgcccagaccctggaggccaggaggggaccagggctgcccgccggctccaccacctgccttggccaagggccagccaagagcactgtgacgggcaggcagggggtcgaacagccactgttctgccgacaaaagcaggccaatttcctgaaagaagaggttccggccttggctggtggcgccaggttcatcaccccgagcttcctctaggctggacacggtccctaatgggcacgggcgacgcattacagtgaggtctgc

SEQ ID NO: 239222 - DNA, 241 bp, Homo sapiens
gggcggctgtttactcgggagggaagtttccgtgacgcccgctccattcttgctttgggggaagaagggggaaggggaggcatgcgctggcgcttctgattggctcccaggagtcggccaatgagaagcgccgctgcgccccagcaacagccccgatttagaaggctggcggcgttccagggggtttcggcgttccgggcgcgcggcggggtgggggcagggacagggcccgcgggagggc

SEQ ID NO: 239223 - DNA, 407 bp, Homo sapiens
tcaaaaaaaaaaaaaaaaaaaaaaaattggctgaaacaccagacatttttcctggtgttcacctggtaccacctgtggaggacccggctaagggttcctatgtgtttctctggaagccatttccatgtgtatcgatagcgaagtttgttttaatatttcaaaagttgcccttaatggctccatgagataacagaattattaagctgccttcaattaaagcctcaagttttccatttgtaaattaagaatttttgtggcctgggcacagtggctcacgcctgtaatcccagctactgggattactgggaggctggtaattgggaggctgaggtgggtggatcacctgaggtcaggagcttgagaccagcctggccaatgtggtaaaaccccatctctactaaaaatac

SEQ ID NO: 239224 - DNA, 265 bp, Homo sapiens
gggtgaagagcgtcgcatgcattgcccctgcatctttccagatgcagctgaggacttttcttgtcctaatgtttctaggagtaaagtgaggaaaaacagcagacacgctgcattgccaaaagccagacgttgcattaccttcttcagaaagagattaaactttgtaatgagggcttcataccgccctcgtattcccgcgtcctcttaagcatttcagttattgtgtatcgttccagcaatggaaaatatatgatcattgttccga

SEQ ID NO: 239225 - DNA, 578 bp, Homo sapiens
aaaccaggagaccctctttgtttccatccagcaggtataattatctttagaatatatcaaagagattttctcacttgtttttctattagtcatagctgctaaatgtcaaagagacctcaaccaacttcctgctgattgcccagaggctacaatcagaaagcacagttgatgacatggatcaggtttctcactgattacctcataggaaatccttactccttttaggccttccagcttatggcagccctatggccaggaccctaacttgtaaggtttacttcctgtgacagcattcatcattgttcagtttagccatcataacattagccatagtcattgctaatcttgctctctccttttgctaatattgtattcttaagagtaccttttggttcacaatattattcctcaattttattacccaagtggaatgttctgttttagaacatcacctatgctgattactcccatgccactgttcataaactaccataatggcagaagtaagcatcagtttctcattactgtcagtcactgctaaccttacctctcaacctgccttcagcatataatgagaa

SEQ ID NO: 239226 - DNA, 1488 bp, Homo sapiens
gttgttgaaagtatggaacaggatcgtattccagaagtgcatgtcccaccatcttcagctgtgtctggagtcaaagaatggtttggattgggaggagaacaagctgaagagaaggcttttgaatcagttattgaacctgtacaagaaagctcatttcggagtagaaaaatagcagtggaagatgagaatgacctagaggaattaaataatggtgagcctcaaacagaacatcagcaagaatctgaatcagaaattgattcagtgccaaagacacagtctgaactagcatctgagtcagagcacattcccaaacctcaatccactggttggtttggtggaggatttacaagttatttaggttttggagatgaggatacagggcttgaattaatagctgaagaaagcaatccaccactacaagattttcccaattccatatcatctgataaagaagccacagttccatgtacagaaatattaacagaaaaaaaagacacaatcactaatgatagcttgagtctcaagccaagttggtttgattttggttttgctatactaggctttgcatatgccaaggaagataaaattatgttagatgacaggaaaaatgaagaagatggtggggcagatgaacatgaacatcctctaacaagtgaattagaccctgaaaaagaacaagaaatagaaacgataaaaattatagaaacagaagatcaaatagacaagaaaccagtctcagaaaaaacagacgaatctgatactataccatatttgaaaaagttcttgtataattttgacaacccttggaacttccagaacattccaaaggaaacagaattgccatttcccaaacagatactggatcaaaataatgtaattgaaaatgaagaaactggagaattttccattgataattatcccacagataatacaaaagttatgatattcaaaagttcatacagtctgtcagatatggtctctaacatagagttacctacgagaattcacgaagaagtatattttgaaccctcatcttctaaagatagtgatgaaaattcgaaaccatcagtagacaccgaagggcctgctctggtggagatagacagatctgtggaaaataccctgctaaatagtcagatggtttcaactgataactctttgtcttctcaaaattatatttctcagaaagaagatgcttctgagtttcagattctgaaatacttattccaaattgatgtttatgatttcatgaattctgcattttcaccaattgtaattcttacagaaagggtaagtttgccttttaaaccttttgcaataattttacctattttgctaaatataagagtggctacaaaatatgtttgaatgaatcctccctgtttaatgtttatataatgtttctctttccatgacatcttacctgtaagatttctctttatatgaatgttttgtcaaatggatattgatttttaaaaacatttccct

SEQ ID NO: 239227 - DNA, 627 bp, Homo sapiens
atgggcctcaccaggctggcaggagggttcacgacatggaacagctgtgctaactaccaggacagaagacaggaaggtttgctggaagaggggtgatgagaagttggccaggcctatggggttcccagcattcaggcaaaagcccagaggtcctcagggacccccccactgtctgctctgctaatgcaaagcccatgaggcccaaggagtctcagcttcttcagccacccgcagattcaacttcagccaagacaaatggtcccctcctgcacctgccacaggcactgtttccaacgtgggcagagttgacagttgatgggtgtgtgtgatctttcggagctcctgtcccaggcccacaggatgaacgggaaggtggacatggtgggtagagcaagcaggaaatgatgatggtcaggaggggccttgaatgctggttctgggggcctgtgctttaccctcaaagtggaggagccatggggagcatttcgggtggggcacggaagggagaccgcgtgcttatcatgggcagctggaagggagtgggagaaacgggggcagggagaagacagggcagatgtcctggagacagaaggcaatggggacccatagctcctcctgacacatcag

SEQ ID NO: 239228 - DNA, 2220 bp, Homo sapiens
  misc_feature (9)..(9): n is a, c, g, or t
tcagagaanctagacagaaggacctctgtggcccctcccaagctggagattctacgggcctacttatgccttttgagatacatgcctggcccacggattccttctagaacattgccccactagctcatcacccccaggattgggcctctggaagttgtacatctaatatctgaccttgcctcctgactgatggtcgggtcagcatggcgcctgacccagcagttccaggtaagggtccgcacgctcttgctgccagggcccaagtagcaaccttggttcctgtctttctacaccccagtgcctcatcttcccatgaagttcactggtttccttacaacagtttccctttgtctacaatagtgggtttctggtctccaaacccagagtttgacctaaaactctgttctctgggtttcccaaagccactgagagggctaagaaagacttcatcctggtcccagacccttctgatgagcatggaaacacgggctctagtcctgagctaaactccctgttctttcccgaggcagaaaggccggccatggagagcccagagggcacaggtggctgcttagccctccttttgtagaaaaggtgcaactggactccctccttgaccaaacctcagccagggtcctctgggccctcttcttgactaggcctcacccttggcctgttttaagcccagttttaggattagtgagaatccctctgagcccacgattggagagaatcctgctaagccagtttagggggaatgcccccgacccttgatggctaatcatgttcaccttcccccaccttagatactaagctcctctttttaattttccatcagctgagttcctcactctgcctttcggccgtaaacctccatctacccttgctgtattcagagctgagcttagtcctgcgctgaaggctccctcctccactgcagaactccagtaaaatctgtcttaccgttttaaacaagtgcccagtgcaatttctcttaaacagatggaaacaaccttgcgggaagacacagaaaacatgagagggtgccttggagaatcagccctgctgggaagcgtgaaacccatttaggtctgactccttgccttctactagaatatactcaaggtttaggactgccttcaagtgttattccataatcagcacatattggcagactaaaaaaagagatacaaagccaagagctctgtctccctcccaacccagggttgcctgaacaatttccctgcagcctgcaccgttaacctctagcctccggccaacatgggcttgattcctaagccattaaagtgctcagcccctctccagtaggcatccactgtggaagtgcccggtcctaagataaagaggaccaaggcatccacatttaagtcaccaggcctcgttgttctcacggccacctctgagtgctctgaggaaaacatggcactcttctcagtgtccccaaactccctgtgggatgcaagtaaccagacaggttttgggagcctgcctttgctgttcagaccacaagaagtgcctgcaaatggattcatgttctcactacaggcaatttctgggctaagttttcaaagagttcaaactaaatatctgtcactatcattctcagtaaactatcgcaagaacaaaaaaccaaacaccgcatattctcactcataggtgggaattgaacaatgagatcacatggacacaggaaggggaacatcacactctggggactgttgtggggtgggaggaggggggagggatagcattgggaggtatacctaatgctagatgacgagttagtgggtgcagcgcaccagcatggcacatgtatacatatgtaactaacctgcacattgtgcacatgtaccctaaaacttaaagtataaaaaaaaaaaaaaaaaaaaagctggaggctgggtgcagtggctcatgccagcaatcctagcactttgggaggctgaggtgagcaggttgcttgagcccaggagtttgagaccaggcgaggcaacatggcaagatcccctctctaccaaacaaacaaacaaacaaacaaacaaacaaaacaactagctagggatggtggtgcgtgcctctagtcccagctacttgggaggctgaagtgggaggatcgcttgagcccaggagttcaaagctgcagtgagtcatgatagcaccactgcactccagcctgggtgacagagtgagaccctgcct

SEQ ID NO: 239229 - DNA, 624 bp, Homo sapiens
tgaaaacattaggaagactatagaaaagagcagattaccaaaaaattaaaaaaaaattaatctgtaattatgctgataaattctgaaaggtcttaattgaacttataattatagattcatactcagctatgagaaatgagatcccatgtaccattcatccagttttctccgaatggttacatcttgccttaaaatgtttttcatcctttaaatttggataaaaatttaaaaataaaacccacataccagttctagttatgtatttattaaatacacgcttatttcctctcacttctaaaatcctattaagatgccagtaaggaataaaaaaagaagaggctgggtgcagtggctcaggcctgtaatcctagcactttggaagtccaaggtgggcacatcacttcaggccaggagttcaagaccagctgggccaacatgctgaaaccccatctctactaaaaatacacaaaaaaattagccaggcatggtggcgcgcacctgtaatccccgctactcaggatgctgaggcaggagaatcgcttgaacctgggaggcagaggttgctgtgagccaagattgttctactgcactccagcctgggcaacagagcgaggtgccatctca

SEQ ID NO: 239230 - DNA, 3269 bp, Homo sapiens
  misc_feature (844)..(844): n is a, c, g, or t
  misc_feature (1013)..(1013): n is a, c, g, or t
  misc_feature (1155)..(1155): n is a, c, g, or t
  misc_feature (1836)..(1836): n is a, c, g, or t
  misc_feature (2947)..(2947): n is a, c, g, or t
ttttatggatgaatgcatctgaggccagacaggaaaatgacttattgctggttgaattgctgattagtggctggattggaggtagaacccagatcatctgcctcttcattctactcatgtcctgtcatggaaattagtcaatccaattattattattatagaagtctgttttcaccagaaagtttgtgaactgacaaccgtaaaatctgtggtaaattcacaggcttcatcaatgacactatgaaatattgaccctcagcttcccagattgcaactccccaagtcttggtctgtttgctgttaagatttgttacaacttcttgcttattgccttttgttacacaagcagtgctaaatatgggctggatattggaaagagggcaagaaaatgagaacccacagttctgtgacgtgacaacactgattggccagtcactgttatctgcaggatgtgcttttcttaaggatgaacatattttggtccacaagtttccaagacaagcacattcctgccaacatgatccttggacaaactgttctggaatttgaacttgctactggaagagggttaagtccaggacacacacacacacacacacacacacacatttcagtggggggcaagccatagttggttatgttagcacctcattatacaacagtttcaagataaagtgattccagatgtgctctcagtaagtacctagtacttatgtttttaacccattaggctaaaaatctactttcagaattttggggaagccagagttagttaattaactagtcattcctagttacttcataaagttgattctaagtcgactataatttgcagtatgtttcntgttagaggatacccattataaccatatgaaacatacatatttatagacacatatatgtattttcacacagacttgcctttgacaatgattagaagttcatctgaagtactggtttaatgatcattaggttcctttgtcccggaaatttcatttagaaacattaggaanatatatatctaagaagtagtattctagtttcttcttattaatgaagctgcagtgatagtcattgtgattctgaagcataaatttcatgagtaagtcctggttaaaaggctccctcccttgtttaaaaaaccaagatttgaanttttttgctttgtaacttaaatttacaaaaaagagttaaagagaaaagatgatgaatgttttccttgataattcatattattgttaggaatatggaatttttgcatcacttggccctagaaggtggagagctaaaggtgaacatttcattttgctttcaaatattttaaatttgtctgcagaaattatgttttctgctgaatacaatggaagccttcttagctggtcttacttgagaatattgcatcttagtatgctcttttgattttattttgctctacagtaaatttttaaaaatttaggtatgatatctggcatcaaggacaacaccatttatttgccaaaggctgtaacctagggcattatacactaaatgggaatattggcaaacatactgttcagaggtacctgttgtgctgtagggcagtacctacagcaaagcagtctgggtatgatggactctggatccagactgtttggtttcatttcgcttctgctttttactagctgtgtgctttaatttcatgaatgtgaaagataaataataactcatgaagatttagttaagtctgaacttgtaaaggaagcacttagaaccatgcctggcatatgttaagtacttctcaagtgttagcttaaacaaacaaacaaatctcaaattttgtctttgtcatgtcagagnggctaacatcaagtgatggctgaagcagcaaacagctagttaaatttaaaagaaaaatgatctttgggattaatcctatcttgtgaaaagttttctagagcttccatccagctgtggctaaagctagaggacaagaaggtgaggaaagtgtggcagagtgaatgccattgattaaagaaaggccaggaccttgctgtataacaattgtttctattatttctattttgagagaaagacccttgatgttacccgtcagcaggagatggatggtagtctttgtgtggattgacaaacattggtagtttaacaatgtgaagggcttcctttgcaggaaatgaaaaagttgtgattttccataagtcatttagagagtcactattgagccagccaggctgggcccgctagtctatacaatggttttgtgacaattagccttgtgctgttgcagcatttcagactcatggagcgttttgcttagaagacctctcttccttctggctgacacagccccatcccagggtgcagggcctgataagtggagtacaggctggatttcagccctaaccacccgctccccccaggacatggtacagtacacaaatggcacattgaaggtggtagccatgaagacaggtttttgaattttactttctgttcttcagctcaggaaatatgttgtttatttttgtttttcagtcatagtctacttcaatagctggaactggggaagagatggttcagtattttttgtcattgaatccaatggttgattgttaattattacttaagataatccacaaacatcctgctgacagtccaagactgttttctatcagaggttttatgaagccacttaatttagggttaaggtcctgctgaaccttacaggagtctaaaagcaaggagaaaggcatcagaatatcacacccttttagctataaatcatatttctgtaatgctgttgctactttttttctatgtgctcttgcaatttaagatgatgcattttatttccaatggtttgcaatctgtaactgaaagacagaatgctcggaaaagcctctggctaaaaaccagtctattgacatagaatcatgtcaggagtggcccnaggagatttgtgggttttggcctgtcttgtttctcatccaatatttcttttcagtattatcacagttaaattcctcattggatatgcaatagattaaaatcacattaaagtttggacttaaatcaagcatagcaaaaaatgattctttgacattagctcccaagattcttctattatggtttcagtggtcctgaactttggaagatgctgatcaggtaataactgttctgtgccctacaaggaggatgccacctgtaaaaaggcactgagaagttttattgtctcaaatatatttattctgattcttaagaaaacttgaaat

SEQ ID NO: 239231 - DNA, 398 bp, Homo sapiens
atatttggagatgtagccatagaaactgtccatgatgaaacagagaaaagagaattttaaaaaatgaatccagcatcagtaagctgtgggacaatttcaaacactgtaatcttcatgtaactggagacccatagggagaggaaagagagataagttctttttaaaataagaaacgtagatagaaaattttccaaatttgatgaaaaccataagcctggtgagaggactttttttttccctcttgacaccaaatacaggtatcttttccaatgatacttcttgaactgacaccgtctgggtgtccaaggatttaattcaattctaatactcaacctgcaactagtgtcagataccacaagttagagttgagttacacaagactgcccccactttacaca

SEQ ID NO: 239232 - DNA, 295 bp, Homo sapiens
gcattttttagtagggacggggtttcaccgtgttagccaggatggtctcgatctcctgacctcgtgatccgcccgcctcagcctcccaaagtgctgggattacaggcgtgagccaccgctcccggcctgtctctctgtttctctgtctctctctttgtctctgtctctctgtctctgtctctgtgtccctctgtctctctgtttgtctctctctgtgtctgtctctgtctccgtgtctctctgtctctgtctttgtctccctgtctctgtctctggatccctctgtctgtttctc

SEQ ID NO: 239233 - DNA, 388 bp, Homo sapiens
tagcagatgttggaaaccatagtcacattctccttccctattccaaactttctttttcactggcaatactcaaatgttgcttgagtatccattctctacacaactacatattcaggataaatgttttcttctccagttccagggaataaattacataagtgaaatgcaattatggtgatctatttctcttcccagtgattgatttaatcacataacccaattttgtccagtgagacctaaggagaagcctcttgtaaagcctttataaaaggttgttcttactaccgttgctccttgattctctctggtagagctatattggtattcttgctgtgtagattatgccacaatgctgtgaaaatagtgtttaggaaagtctccaaatcca

SEQ ID NO: 239234 - DNA, 456 bp, Homo sapiens
tttgttggtaaaaatttaagccttttggtgagtacctcatttctaaagttgatcatgctggttgtacataattaggctacattatcgcccttttctggcaagcagaacaaaacatggttttctctccccctccccttatttcccatgtaatagctcggaatcttaatcttaaggcattctaagctttcaaagtcttttttaattatacattttcctgtcatcttccctaaagacacttttactgttttcaaggctggaattccgttctattttttatccctataatgcctgttgaaataaatggaggtaagaattaatgataaactaaatagataaaaataatgagcaattgtgtgattattgtttttggttgttaatttatctacttgatgtgtttttattgagattctactgttaattagacaaatgaagcacccagaacagtactggggacat

SEQ ID NO: 239235 - DNA, 318 bp, Homo sapiens
ggctgtagcggcttgcctgatcacatgctcaactcttccacctcagcttccccttagcacacacacaacttctctccctttgccaccaacattcttatgggagtggacactcccattgcttcacctgccctgatgatatgacctttcttccaacagtcactgaactactttgcaatctgcctgacctaccttcagtaatctgcagcagccaaccacactctccttgaaatgctttcttggacttcttccattaagaagtggtattataccgtaccaccctgagccatcaaccttgctctccagtcccttcttagtatc

SEQ ID NO: 239236 - DNA, 379 bp, Homo sapiens
ctgagagaagaataggatttttacaaatccgtagcccatagagtatttcaataaggacagataccaaatatgtcatcaagttaccagctgggaaattaggctctacttacaattctgtcactagcaaactacatgaccctgagcctttgaagaagaggaattctctactgaactactttagagtcgctgtttagcttctataatatcataagtctaaggcttcaaacactctattttaacaaacagcatacatagcctttgaattcattccacttgtgaaaacataaaaagaaatcagttttttaaaagttatataccaacaataaaagctacaggcacaaagattttcaccaagatacacgaagcacacacacagtat

SEQ ID NO: 239237 - DNA, 873 bp, Homo sapiens
  misc_feature (75)..(75): n is a, c, g, or t
  misc_feature (77)..(77): n is a, c, g, or t
  misc_feature (108)..(108): n is a, c, g, or t
  misc_feature (120)..(120): n is a, c, g, or t
ccatttaagttaagtttagacacttaatctccaaaaagattaaaaatgaagccaaagtctgaagttttccacttnantctttacgctggtacatgaagttggaagagnccataccacagnacagcgttttctggtgtatgccttgcgctctgcccgcaacgtgcgacccccagagatagacgtggtcagggtgacacacggcctgcaatgaagttcccgctggcgggtacaaacaaggtataatgtcagagttagaagacaacattcttgttttccttaagttgtacccatttcagtactttacctgttaatagttctaaaatgtttaattattcctctagaccacctggtacacaaaagcaaacagaaaaactcttaagtttttctgcaatactaaagaaagtgagataagactttaaagttaaagatctatagacactttaggcaaaacaggctcataaagcaattaaaaaatcaacaatttagtaaaaacaggctacatagtattttgtttttacgtttcatttgtctattgatctttaaattaaattagacatttctactgttttcctgtactcttatacacacctgttttctccaatgttctcctttagtatggctggtaattgttttggtgattgccaccccctcgagatgccttgccataagtgctctgttggcctattttgaaaacacagaattctcattaagatagtggtctactcaactttcggtacaaacacaaactattaaatctacgaatcgttgcaggctgaaataataagttattaagatatttgagctaccctattagactgctactctataaatcatacatcctagttctatttatcaccaccagtctatggtagt

SEQ ID NO: 239238 - DNA, 763 bp, Homo sapiens
  misc_feature (75)..(75): n is a, c, g, or t
  misc_feature (77)..(77): n is a, c, g, or t
  misc_feature (108)..(108): n is a, c, g, or t
  misc_feature (120)..(120): n is a, c, g, or t
ccatttaagttaagtttagacacttaatctccaaaaagattaaaaatgaagccaaagtctgaagttttccacttnantctttacgctggtacatgaagttggaagagnccataccacagnacagcgttttctggtgtatgccttgcgctctgcccgcaacgtgcgacccccagagatagacgtggtcagggtgacacacggcctgcaatgaagttcccgctggcgggtacaaacaaggtataatgtcagagttagaagacaacattcttgttttccttaagttgtacccatttcagtactttacctgttaatagttctaaaatgtttaattattcctctagaccacctggtacacaaaagcaaacagaaaaactcttaagtttttctgcaatactaaagaaagtgagataagactttaaagttaaagatctatagacactttaggcaaaacaggctcataaagcaattaaaaaatcaacaatttagtaaaaacaggctacatagtattttgtttttacgtttcatttgtctattgatctttaaattaaattagacatttctactgttttcctgtactcttatacacacctgttttctccaatgttctcctttagtatggctggtaattgttttggtgattgccaccccctcgagatgccttgccataagtgctctgttggccactgtagtctgcatatccctgtccatatccttgatcataatagttattaaatccttggttccagttttggccctggcctcg

SEQ ID NO: 239239 - DNA, 210 bp, Homo sapiens
ctaatgttctacctttatattcaaatgcattagtcaagacatacattgcactgaaactttgtgggcatcatccaatgaagaaaaatatgaagccaggtgcagcagctcatgcctgtaatcccaacacttcgggaggccgaggtgggaggatcaattgaggctaggagttaaaagaccacactgggcaacgtagtgagaccccgtctctac

SEQ ID NO: 239240 - DNA, 475 bp, Homo sapiens
agcaggacattcactgtgtgcttatcacagccattcaatatgtccaaggcttattttcccccaaacacattcttcctcctgtagtcccaattttggctaatggtgacaccatgtttccagttattaaagctagaaactcaagctttattgagatttaacacacatatcattacaacttacccatttttaaagaatacaatttgctgggcgcggtgacacatgccggtggtcccagctactcaggagggtgagctgggagaattgctcgagtccaggagttctgggcagtagtgcactgtacccactggtgtccacagagggtggggggcaccatcaagttgcctaagaaagaggactctgcccaggtccaaaacagagcaggtcaaaactcctgtgctgattagtaatgggatcatggccattgcactccagcctgggcaacatagcaagactctgtctcctattaaagaaaaaa

SEQ ID NO: 239241 - DNA, 549 bp, Homo sapiens
ggagaaagcagcccgactcagccccgagaggttcggtgtgcgggcagcggccagggactttgcggggtagcgcggactcctggacttccaacaagggccgctgcgcaggcgctgcaatcactgcaggcacttgtctgcatgcctggtggggcttggagtctggggaggcttatcagtaaagcccagagcatttgctatttattgctcaaggggcacctttgtacagtctggccgtttgcttggcatggcctcttagaactccttattgtttaagaaatccgatctggtgaataagaagttagtctttctctcccagtcactgcctcctggacgaatatttgccagcacggaggcagagaggacagaaaaccacaagccatttggggaactgggaacagttcagtgtttctggggtgtgggggtgtcaaggtgggggatggggttgatggaaaacatttgcaatttctgctttacctcacgattcccagctctgacctctggacctgttctctcccacccctaacataaatcattttagtttcattcagt

SEQ ID NO: 239242 - DNA, 756 bp, Homo sapiens
  misc_feature (718)..(718): n is a, c, g, or t
ctaaaatcatcagcatttttatgtattgagattattaatattgaatgcaatagttattggatatagctggtaagttctctgccatgcatacttacaataatccttctacctctcacttttaacatgggctatgatacttcaatataaatagaggaaataattatttaccagatatcccaggaagcattcttatggaactattataacagtgcactccccaccccctgggaaatctcaaaagccaagttcttcagtgtattctatggtgtatgaatctgcatttgtttttccttttctatcattagcttttcctaaaggcaaaatattataactttataagaatagtccttctcctgcctatttaatatttcaatgttaatataattgtattggtttttaaaaataattaaaatggcaacactttgcgatccaatctgatatttaatttttaaaatgtaacaatttcttataaattcatgctgtgttttaagtaaaaatcatgtatatgaattattttaccaagtagtattatctgcacgagacaaatttaagtattttaaaaattactccttattaataaataatcctcatataatgcacagtattgccacaaatgcccacttcattttgtctgcatagacatattaagaatttttcaatgatgtaatttaattatcctaaaagaaatgacagattcttctgtaggaaaaaataaaancatgaatatttttaaaattttaaatggttaaatttcta

SEQ ID NO: 239243 - DNA, 453 bp, Homo sapiens
accttatcttaaaataagggagaacttccttcctcgagtagacacaggagccccctaaagccacaaagatgcagcctatcaaatgtgagggcctctgcttctcttccctcttcccagctcgcaggtcagagagactagcaggccaggcgcctgattggattttgtgtcctaaggacagaaggcaagctcccgtctgcccaggtggccttggagaaggctggggaaagggatgccctgtgggtaacttcaagccccttctttcagagtcaaccaggcacatgatgggattgggggtgggggacaggaagattggggagggggagggagggaaagagaattcattaacccttcaatctccagagtatcaggtcaatgctatacctgcctgaaagaaaaactggtgaattctgaagtcttctaatagtatataaaacaaaggcgctgcttgcacag

SEQ ID NO: 239244 - DNA, 510 bp, Homo sapiens
tgaaagggaacatgtgggctaacaggccacaaatacctttgtaactacatgccaaggacaaacacatggacgcaaatcctctgagcccttcagggtacttctttatttgtaaactaaggatactgggcatagaatttgaatcaggttcaaagaaccacgctcttttgattcatatcaagttcacaatgtatccatttctattcctccactgcattgccatcctccccaaagccgttggtcacctgtgggtgggggagggagagggcagtttgtagtatttgctgggtcttttttctccccctgggttttgtgtcaactcccaagtgacattctgtagagaagctccccccgcaacctgggcatatgtcccacgccgtccgtctttgaagaggctggtctctagggcatgggcggtagtcacggtgaattccataccaggggatatacattcccttgctttactagaaagaaaacagggccacttgggatgggtctttcactgttcatggc

SEQ ID NO: 239245 - DNA, 385 bp, Homo sapiens
tgattagggtggacagttggccatattggaatagctagttctctttcttgaaaatttagaagtgaggataagataggataactttgggatcgtctcataaattgagaaatgtaaaccagaaagctactgaatgcatatataagctaagccagtagacagaaagagagagagtagaaaaaaatgcttaatgtgtagagagagtgagagaaactgttttcctgtcccaggcctctctttcttaagctgctgtgaaagagttttgttacttgcaattaattttcttattaagaaattttccttgttatgttagatttaatttattgtaaatgccctttctcaatagaatcaaacatatatgaatttaactgcctataataggtaagta

SEQ ID NO: 239246 - DNA, 361 bp, Homo sapiens
tggctggggataagaatggtcaagggcacagaggtgtgatgaccagggcaaggcaaggaatgaatgtgatgagtttccacagaggttccctatgggaaggcctcatctgctgttgagcagtatggcctttctgtaggtgatggggagcccctcagggcttaagctaggtggtagccggctcagttctgctgtgaaagaatgctcactctagctgcaacatggagaggcaggcatagggaggtggaggttacaatgaagctgaaagacaggaggatcgcttgaacccaggaggcggaggtcgcagtgacctgagatggtgccactacactccagcctgggcaacagagcaccagctcaaaaa

SEQ ID NO: 239247 - DNA, 288 bp, Homo sapiens
taattttcttatataagtctttcttgtgtttcagaatcatattattcattatcatgccctcgtttaagcattactttcttgggaaaaccttttcagatctaccccagtttatacatctctcttatgggagctattaccatatgtttcttttaaattagttgtgaagatgttaaccctggacttcttaaatgtctaattcaagtccttataattatttcatgacaccaatactgacaaaactagcacacagaagatgttcaattaatgtttcctgtgttttcataggat

SEQ ID NO: 239248 - DNA, 319 bp, Homo sapiens
ttgtattttctgtagagacagggtttcgccatgctgcccagtctggtctcgaactcttggactcaagcagtctgcctgcctcagcctcccgaagcaatgagattacaggcatgagccaccatgcctggtgattcctgccatttttacactaagaacctgtatcttattgcaaatgcatgaagatggcatcattatattgacaaacttgattccattctaattttgtattcacataggaacacacatttgtgtgaagtgagtcactcatttatatcctaatgtctcagattcatcctcttcccccttctgtcgtcttctc

SEQ ID NO: 239249 - DNA, 453 bp, Homo sapiens
atgagacagtgcatttctttttcatttttgacattttagagattgtgcatttctacatctataacatatcgagagtctgtaccctagtaccctactcctcactcccccactgccaccccccttagtctggactgctctatagtcttgcctggatgatggcaccagcctcataaataattcctgtttctgttttttttgttgttgttaatataacagtttcattgagacataactcatataccttataattcacctatttaaagtgtacaattcagcaagttttagtgtatttgtagagttgtgtagctatcactacaatgtgagggccaggcgcggtggctcccgcctgtaatcccagctctcagggaagcaagagtcaggaggatagcttgagcccaggagttcgagacctgcctgggcaatatagcgagacctcgttctccagaaaaagga

SEQ ID NO: 239250 - DNA, 693 bp, Homo sapiens
tatcttttctttcatttattactttcatgtcatcttatcctgtataatttaagtcatcctatatatttttgcaaatactatctttcctccttctgtccctccattccttccttcttttgtgtattcaagtagtatttattaaatccttcattttattccaggcgtaatactacatcttaggaacaacttattattagacatgatactttccgtcatgaaccacataacttgggtatagttggccagaccttaacgttgacattagtcaggcatgcacacacacatacatgcacacgcatgctacagtgctgtagatattctgatggacgttagtgggaaggtaaatggaagacatgaacaattctaactgaagatggctggttatcaaaaggtgttttggaggcctgccttttgatatcagtttgttgatactatacacactatttccatattgagttataaaactaggagcctttagttttctcaaattagtaaaatgctgaaataaaataaaatattacaaaataaatttcttaataataggatcacaaaagccttagtagaatgaacaatttagagaatggtcagttctagtatgggtgttagaatatttataaaataaatgaagatttgtcacctttatttcatacagtagaatatatttacgactaacagtattctacatgaggtcag

SEQ ID NO: 239251 - DNA, 389 bp, Homo sapiens
gtgactagtactatgtttcaaatgctgaaatacctttgtattaaaaaattaatgagtgtgatgaatagcatggaatctaaacctctggccttgatttcacatgtaagtcctgtgtgagttattgcagtgtctagtctgctttcacagatgaatggaaagtatattttggttttcttcttctggaagccagttgtgttcacagtagaatggtgttaaaaaaggcttcctttttggtaaatttataactttttttatttttgagatggagtttttgcttttgttgctcaggctggagtgcagtggcgcaatctcggctcactgcaacctccgcctcctgggttcaagcgattctcctgactcagcctccaaagtagctggaattacaggcg

SEQ ID NO: 239252 - DNA, 451 bp, Homo sapiens
agaacaacatatcagtcagcacaaatgagtctagcagagtgcccactgagagaacacagaagatgagagaataaacaaagatggtcgtggttgccttccaaaggaggagagttttgagaatttaatttgtttccaatctttgctattataagatatatattatgatgaacctgttgattcataaatctcttactatattttggataattttctcaggacaaatgctcccaaatagaattactaagttaaacagataccaaggaaataaacatttttaaagagattttgatatattgccagatagattccaattgctgtctagaaagattatataaatgtatgctcctcaccccccagcagtgtataagcgtatccatctcacaaaaacttggaagcatcaataattacgattttttaaaatctctaataaagcaagtgaaaatatctaatt

SEQ ID NO: 239253 - DNA, 355 bp, Homo sapiens
gtgatcctccgccttggccatttctgaagttttaatgctaccaaactgatagtgcctggttcttagaaggttatcaagtaagtttcactcactcaagctctgctctatagaagaaaacacagaatttgtggaatcttggctttaatactacagtgtgaacttaataatgctttcccaacccttctattctgtcagtaagccttttgttttgccctttcactggataattaatttgagggtttgctctcttgaagtgaagtttagcactagaggactcaaagaatgattctgaggttttgagcctatagaatggtgatgccattaacgtggaaataaagaagcagagggcaaagta

SEQ ID NO: 239254 - DNA, 333 bp, Homo sapiens
agggcccggcgggcgggctgggtagggagggcaggcacatatgcacacacaggcactttgtatcttctgcatatacaggaagagatgggtttggtgatcagcagagcttaggtttcatcagggcaggtgctgagcttcattccctccaccctaaacactgccctgcaggccggggatgcttccaatcctgaatgctcaagctctgcccagaatgtggttgtcagggcaaccaaaattcacaggacgaaaagattgagaagcttacagtgcttgacatgccatatagagaacccttagcttgctacaaactcagtttttaaaaatgctacttgg

SEQ ID NO: 239255 - DNA, 325 bp, Homo sapiens
aggttgatgacagccctatagctggcctaaggaaacaccagtccatactggaagagaaaagttctggaaaagatatggaaaagaaatctatggtaaagggagaactgagtagaatacctgatagatttaaacagaaatctctaggaagataatcaccaagaaaaacaggagtcacatagattacctgatgtattggaacgttttgagaaatgtatactcaggctaagaagttgaggatgagtaaatgacaggtacattacacaataggaaatgaaaattaaggcaactagaaactcccagggaaacaaaatagtgatcatgaaag

SEQ ID NO: 239256 - DNA, 622 bp, Homo sapiens
aacagttggtaggtcagtttttttaaatttagtcattcttatagatgtggagtatggtatctcattatggttttaatttgaattcccttaatacgtaatgatgttgggcttcttttcatgtatttatttgccatctgtgtatctttttcatgaaatgtttgttcagatcttttgcctatttttattggattgtgtgttttcttattatggtatttaacttgtcactgttaggatacatttcaaaaatcctgaccaagttctaacagtagaatgtgtcagtaaatgctcagtttaagtaaaatgtcacattgcaaactaactaccagggtgtggcccagcaatcttaagtactttccctggaagtttctgtaatatgcagaacactttcaattgaaataaatgctgttaaggaggtcaactcaacctttccaaatttttattaattaaaagcagttgttggagagttgtagaaaagtattttttcacagaggcaaatttgtgggtcatattgccatacatcttgccacgaaaataataacataaagtgttttgaagaattcaccctgtaaatctgtcagaggcatgtgaaccaaagcaactccatcttgaataggggctaggt

SEQ ID NO: 239257 - DNA, 857 bp, Homo sapiens
  misc_feature (468)..(468): n is a, c, g, or t
  misc_feature (855)..(855): n is a, c, g, or t
ccatgaaccaaccctctgtcccttcacacagcaacattcattcaaccccatgtctcagtactagggaaatggaaagacggtcattgatcctcaaggacatcccatttagaagaagaaaagacaggaaatcacttccaacatggtgtgttactgtcaggccaataatgtccagaacggtaaaagtataaagaaaaactaacccaacccagagaagtgtcaaggaaagcaagatagaagaggcgaggcttgagtgcttactgaggaacaagtaacagtttgccagaatgagaaggtgagaaggacgccccagtcagaggggccatctggaaaaagcatggctgcttctgaaatcccccagggtgtggctgcaacatggatgtctatgggggcatcatccagatgcagaggaagagggagccacatggaaacacccaacttgtcattttggaacttgaactttatccagangcttcccaggagccactggaagatttaagaaaggtcctagccaggtttgcattttgggtaggtagctctctctgctgacaaggcagggagaataggatgggaagggctgtaaccacaccagatgcggtggctcatgcctgtaatcccagcactttgggaggccaaggcaggaagatcacctgaggtcaggagttagagaccagcttggccaacatggcaaaaccccatctctattaaaaatacaaaaattaggccgggagtggtggcacatgcctataatcccagctactccagaggctgaggcaggagaatcgcttgaacccgggaggcagaggttgcagtgagccactgctctccagcctgggtgacagagcgagactccatctngg

SEQ ID NO: 239258 - DNA, 408 bp, Homo sapiens
tctctcctgctgacagtgagaagatgggcttgcttccccttcaccctttgccaggattgtaagtttcctgaggcttctgtacagcctgcagaactatgagcatgcagaggtcaggacaagagcagctggtccagccacactgtgtgcacagggacaggcctgtcttcacctgtgctcaccggggcctcttccagaggtctctgcagcagaaagcatgtgctccacgtaccggcccccagcgtcccaccagaccagcgccgatccctgtgggagctgaagaggaactgtgctgaatgagaacatttaaagtgaatcatgtgtggactccctatgctccctgactccttgtttatttctaccttttctggcggatgctattaataaaatgctaggaaaatctttaaacat

SEQ ID NO: 239259 - DNA, 435 bp, Homo sapiens
ccactggccttgggagggcacacacaccttgtatggcacggtcagaacaacaataccaacaacaacaaaaagaataaaccagcaccataaccaagtcacactgacttgctctgggctttgagttgctgactccctaaggaactgatttttgcagtgctgatgtctaaaatttggaagaaacatacctttctgtgcagggtaaataatttgagaaagttgtttttgcagcatgaatggactacatacacaggctatcatcagtcacctggcaggattcttccctttaaatatccattatgcttttcatttgttgagcaagacttctaaagaccacttcccttgcagcttccttgcaagtaaccttctcttcttttataaatgttttcatttctgaatcttccttttaaacacactagtgcaaggaattcactacca

SEQ ID NO: 239260 - DNA, 343 bp, Homo sapiens
agggctgtacagtttccccccttatgtgggacaggatgactggagggggttgaagctgtatatttccctttccccatgtagaaagctacagtaggctggagttaggtatttcccttcccccaggtaggttaggctttggtaataccatgtctcctgagggtaggctttgttaagaacagaaagctcttgcatcttcaatattcactgtgaggtcaagctcctagaggtaaaaactcaaaactgtggcagccctcccccgtgactgggtccctctgaagtttctaactctcagagttgtccatactgggcatctagcgattcatcaattacagttcagcctttc

SEQ ID NO: 239261 - DNA, 1109 bp, Homo sapiens
ccgagaggacaggactggaaggtggctagggatgtgtagcgggagaagggtcagtctcgatcttcccctgtgaagctgtcagcgaccatcagagggtacgccggggtggcgcggggacgatgccaggagccttggagtgcagaaggcttcgactccccgcacccacagagttgcgtagggaaccacgggcaaccgactcttccttgtcagcccctccctagcttctgcggcttcacacctccattccgcgccgggcagagtctggcggctcctggagcacggaaggcccacaagcgtacccgtggggccgcggccaaggctggactttgagcccaggaccccaggaccgcccttagaaggctgcgccggcccgcgagaggtctgggatctggacagcgcgggggctggctcacagggactggtgaaggaaactgccgggacccctgccacagccatggctccccgcaaagacgacctcgagcaggcactgcgggcagtttgtactagcgcctagaaccctgacaccgggaattagtctcttggaagagctagcgattggaggctcaggagttaggctgtttccttgttaaccaacaaaatcaggtgaaaccaacgaagtcaggaagcctaaagacatatatgtacagatatctaaccctttacgctaattatttagatttttaataaatctatcttaatgtttaggtatgaagacgggaggaactgtggaattttagtcaagttacagggaagaaacgctttctaaaaaaagaaaaacattgctcacatgtgacctcacagtcttatttaacccatggaaccaaaatatatcagagtttgtatcaaactaatcttataaattttcagcaaccccatccattcactcactccccctccaggatgaggaagctcgtacaatgggatgtaatcctcagagaaatttaggaaataacttgtatatggttggaaggctggataaaaatactttgggcaggcgtggtagctcacgtctgtaatcgcaacactgcaaggccgaggcaggcagatcgctttagctctgtagttcgaaaccagcttgggcaacagtaagaccctgtctctacaaaaaa

SEQ ID NO: 239262 - DNA, 438 bp, Homo sapiens
cctgaaggctgtgggacccatgatcctggttagattctccttctgcttgtccctggctgtgctgcctcaggcacattacttaacctttctgggcctctgccacctcatctgtaaaatgggcatgatggtgaagccaggttgccagataaaatataggctactcagctaaatgtgaagttcagatcaatattgaatttggttttactgtaagtatatcccatgcaacatttgggatatacttatactaaaaaaaaattattcattgatgctatggtttgaatggtcccccaaagttcatatgtttgaaacttaatcctcaaagcagtcctttcaaccttgtcaacctgtcggcgcggcctctggtgcagtggcggcggctcctgttcctgccgcagctctctccccttcttacctccccaccagatcccggagatcgcc

SEQ ID NO: 239263 - DNA, 514 bp, Homo sapiens
cataccccagagagccccaattcaataaggtgagagggagtggttcagatgaataccctgattaaggatgaatagaatgttcttcatctattgctctcttaatcattagattcctggaggcacctttttactgggacagtattaaatatttcaattatctggacatccccttaagaaatctcttgctttacctcccaagatgaattttgagggaggaccttacctggcacaaacagcagtggagctccaaaggctacattgggtagttccagccgggactcccagcccctcacctcacttgttgagggcaggaaaggctgctgtggttttcccttcctgggcttgcccatcctgctaattttaggctgcttcctcatgccactgccatgggtatcagagcatgtggctccccttggaggagctattttctcctgtgagcctcacttgtttgtttccagcttctctcccttcccctccctgctccccacctctgtagggtagagttgtttcatag

SEQ ID NO: 239264 - DNA, 2045 bp, Homo sapiens
caggatgctgaggcagaagaattgcttgaacccaggaggcagaggttgcagtgagccaagatcatgccaccgcactccagcccacacgacaaagtgagactgtctcaaaaaaaaaaaaaaaaaaaatcgcagcttagctgaattcttgatagaaggtggtgacttagatgccttctcttctggtttgtctgctgtgtctgtgtgcacctggacccattgtgctctggaaagcaggcacactggagtcctggagtgcaggctggctggcgccttgcagtgcctggtgatggctggggtttggtccctggtctgtcccctggggttcccatgtctattggtgaggcagcagtgtgtgctcgtaggagaccctctgtcaagaggctctgtcgggagccagcctgctgccctgcctttgaggctgatccttcaccctaggagggcaggcactgagggccagcactctggtcacgccaaggatgctatggcgacccactgaagaatgagctattaccctgcccacccctgcctgctgtgcccccaagcaccccttgggggttactcacttgccttcctggtatcaggttaagaggttattagaccttccatttattcactcaattcttttccctgctctcctgagtaatagctcaggaacccgtgccccagccatgctgggaacatgcttagaaagtaaggggaaacctttgggccagcacccacgtggttttgaatcactcaaggacaatctgcctaagtcactggcttggtggccgtgggccaagcaaggagtcatccagtagcgcctctgccctcactgtcctcctcctccaggtttctttaccgagaggaagccagcgggaggcccgacatccaaaacattgactagtgtgcccccgtgtggctctggtggaagggtttggaaaatgcagccaggttttcctaaccttacccaccaaggccggaggatgccctaaggacagcctgcagcccctgcagccctctttttgcgtaatctttgatttttcttgttattatttcttaacagttaagcgccttaaggcctcatttaacttgagttaaagaagtgtgattttggaggacccaaagattttccactggtgtagggaatgtctcctcccggctctgagagacttcctccaatccacaacctaccgcaggtatgtgttcttattaaaaggggcagggacaaaagctctgcctgtccctcttgtactttcaggctataatcaatcagcaggcacacctgttcagactgtgacattgaatttccaggatcagaaccagagcctggtacagacacaagccttccagtacttgtattttaagttccatagatgcttggaccttttgtgggctcctgggacagtgatcatgaaagaagagtgctcccaggggatgagcaagatgatcccctttggctgggaagaaaagattccatgtccatctggtttttattactcctctaaaaatgttccctttatagttttataattgtacttaaataaaaataattgcacttaaataaaaaaaaattggggagattatagcagaagctgttggtgtcccggccatagctgtgtcccttggtctgccacagaggtcactcccagaatacacttaggactccctgtgtctccttctgagggtgacctgagccacgatgttatgggatggaggctaacacctggtaggccccacatttttgacaatttggttttaagaaaactcataggtatggccacacgtggtggctcacgcctgtgatcccagcactttgggaggctcaggcgcgcggatcacgaggtcaggagatggagaccatcctggctaatacggtgaagccccgtctccactaaaaatacaaaaaaaaattagccgggcctggtggcgggcacctgtggtcccggctactcgggaggctgaggcaggaaaatggtgtgggcccaggaggtggagcttgtagtgagccgagatcataccactgcactccagcctgggtgacagagtgagactccgtctcaaag

SEQ ID NO: 239265 - DNA, 1997 bp, Homo sapiens
atatagtggtagccacagcaccacaggctagctgggggtagtctgaggctcgttaaaaattgacaaaaaaaaaaaaaatcgcagcttagctgaattcttgatagaaggtggtgacttagatgccttctcttctggtttgtctgctgtgtctgtgtgcacctggacccattgtgctctggaaagcaggcacactggagtcctggagtgcaggctggctggcgccttgcagtgcctggtgatggctggggtttggtccctggtctgtcccctggggttcccatgtctattggtgaggcagcagtgtgtgctcgtaggagaccctctgtcaagaggctctgtcgggagccagcctgctgccctgcctttgaggctgatccttcaccctaggagggcaggcactgagggccagcactctggtcacgccaaggatgctatggcgacccactgaagaatgagctattaccctgcccacccctgcctgctgtgcccccaagcaccccttgggggttactcacttgccttcctggtatcaggttaagaggttattagaccttccatttattcactcaattcttttccctgctctcctgagtaatagctcaggaacccgtgccccagccatgctgggaacatgcttagaaagtaaggggaaacctttgggccagcacccacgtggttttgaatcactcaaggacaatctgcctaagtcactggcttggtggccgtgggccaagcaaggagtcatccagtagcgcctctgccctcactgtcctcctcctccaggtttctttaccgagaggaagccagcgggaggcccgacatccaaaacattgactagtgtgcccccgtgtggctctggtggaagggtttggaaaatgcagccaggttttcctaaccttacccaccaaggccggaggatgccctaaggacagcctgcagcccctgcagccctctttttgcgtaatctttgatttttcttgttattatttcttaacagttaagcgccttaaggcctcatttaacttgagttaaagaagtgtgattttggaggacccaaagattttccactggtgtagggaatgtctcctcccggctctgagagacttcctccaatccacaacctaccgcaggtatgtgttcttattaaaaggggcagggacaaaagctctgcctgtccctcttgtactttcaggctataatcaatcagcaggcacacctgttcagactgtgacattgaatttccaggatcagaaccagagcctggtacagacacaagccttccagtacttgtattttaagttccatagatgcttggaccttttgtgggctcctgggacagtgatcatgaaagaagagtgctcccaggggatgagcaagatgatcccctttggctgggaagaaaagattccatgtccatctggtttttattactcctctaaaaatgttccctttatagttttataattgtacttaaataaaaataattgcacttaaataaaaaaaaattggggagattatagcagaagctgttggtgtcccggccatagctgtgtcccttggtctgccacagaggtcactcccagaatacacttaggactccctgtgtctccttctgagggtgacctgagccacgatgttatgggatggaggctaacacctggtaggccccacatttttgacaatttggttttaagaaaactcataggtatggccacacgtggtggctcacgcctgtgatcccagcactttgggaggctcaggcgcgcggatcacgaggtcaggagatggagaccatcctggctaatacggtgaagccccgtctccactaaaaatacaaaaaaaaattagccgggcctggtggcgggcacctgtggtcccggctactcgggaggctgaggcaggaaaatggtgtgggcccaggaggtggagcttgtagtgagccgagatcataccactgcactccagcctgggtgacagagtgagactccgtctcaaag

SEQ ID NO: 239266 - DNA, 406 bp, Homo sapiens
gaggaatagtccagattccagtggatttcctagagccagactgagtaagcatccactgctctgggtgtatgtaaactctgaatattgcaaataaacatgcagtaacttctatacccagatgcccacagagctccaggacacacaagggagtgcctcccatgcactgtcctgctgaggatgggtacacacagaggtgcccaatttcagaacaggagagaaatcaggaagtgtccagtccaactcttgccattgttacagatcaggaaactgaggcccagagcaaggaagtgatttgtctagagtcatacttgggataggcttgggagttggaaggcctgaatttcagatgttccagcttggctatgtgacatgaggcagggcactccttgggcctgagtgtcccctt

SEQ ID NO: 239267 - DNA, 2094 bp, Homo sapiens
  misc_feature (915)..(915): n is a, c, g, or t
  misc_feature (1364)..(1364): n is a, c, g, or t
  misc_feature (2081)..(2081): n is a, c, g, or t
  misc_feature (2086)..(2089): n is a, c, g, or t
  misc_feature (2092)..(2094): n is a, c, g, or t
gtttaacattacagatatccttaacatatatatgtgcagagtagatatctgggaagacacacactgaactctttacaaaggttcatgctaaggactgggattgggggccatgtggttaaatagaggataaggagatgatttatgtatcagttatattttttataatcaatctatattatcttaaaactaatttttaaaacaaaacaccttaaaactttcttcataaatactttatgacaattttacttattttggaactagaaattataattagaaagtcatcattactgctttgaactgttgaaagggtagttgatcatatgaagtgggatttttcccccgctgtcatgaaaatgtttgtcaagttcctccagcaaagcccagaacagagttgttgttcagtaatcgttaattatctctttctaccacaaaaccagaagcaatgagaactaatctctatcccagatgaaagtaacttgtagcttgtggaatattataaaatcatcaggttgaactcttcaccttaaactacaaattcacccccattctccactgcttttcatcttatattcattctcaagattttttccttctaagggttcatcttctatgcagtctgagaacacctgcattcatagggcctttttgtaatagcctggtgcttttaaggcatctaaaagatcttatcgttataattctgttgttatcaactttcacgttggtttttttaatctgcgcctggaaagttagatttttagaatttactttattcatttatttatttatttatttagagacagggtctcgctctgttgccaaggctggagtgcagtggaacgatcttggctcactgcaacctccacctcctgggctcaagcgatcctccaccctcagcctcccaagtagctgggactncgggcacacaccaccatgcctggctaattttttgtatttttgtagagacaaggtttcactatgttgcccaggctggcctcaaactccggagctcaagcagtcttcccaccttggcctcccaaagtgccgggattacaggcatgagccactgcacccagactagaatttacattttaaactgtttattctaactcttttgcccttctcttctgccagtgaatatgattgtttcttcatgtaaaaagatgttttattccagttgactacgactgagaagccattgagaaagccaccttccagactgaaaaaactcaagatcaaaaagcaagtgaaggatttcacaatgaaggacatcgaggagaagatggaggctgccgaggagcgcaggaagactaaagaagaagaaataagaaaaaggctacggagtgaccgacttttgccttcagccnatcactcagattcagctgaattagatggggccgaggttgcatttgccaaaggacttcaaagggtgaggtctgctggatttgaaccatctgacctgcagggaggaaaaccattgaagaggaagaagagtaaatgtgatgcaaccttgattgatagaaacgaaagtgatgaaagttttggggtcgtggagtcagacatgtcctacaaccaagcagatgacatagtctactaagccattttttgtgaatttcataagaaagcattcattctccccatttgtgacatttgtagtatgtctcatattctttgactgactgacctcattccactgggatttctgccttgggcttaaggatgattgtgtgggctgcacaggctgaaggttagttgagtaaattaagtagctatgctagcttttaaaaaaagagcgagggggagacttgaccagcatagatatttggcactctcctttgtgtggcttcaaacattatggagatgtctttaattcatttataagtgccttcagtttacattaataagttcgtgccaaatgaaatccttcctgtttactcctgccttgtggcggggtccatcctctgctgctcctttaaaacaaattgcatggatttgtattaagtattttaatggcttatatgttttttatgctgtatgtctatggttttataatttttttctctgtgttgtgaaggaataaagcnatgtnnnnaannn

SEQ ID NO: 239268 - DNA, 362 bp, Homo sapiens
gggggcacatccggcgtgaggggggtgttggaagttgcagcggagctgggaccggagacccgcggcccccgcgcagcgatgggtctgatctgagccccagcctctccccctgcccaagagcagtagaggctggatatatttttcaaaagccaaactgcaaacaactctggcgatgccaaaattcccctccaagtgacacggctttgcgaaggaggtttcctcaggctgggctctttctgtcattcccttctgcctttctcggcgacgataaaaggctttgctctggcaataggaatttagaaaaaaagaaaaagctgcgctaaactccaccgtgacctcaaactctttggactgtttgaaaa

SEQ ID NO: 239269 - DNA, 181 bp, Homo sapiens
ggctttacatgtgccaggtaagctgacagcagaacatcagtatccacttgttgtggttttaaaatatgttcacatatacagttgaaagcattccttctgagaactggaacaagacaaggatgcccgctttcaccacttctattcaacatagtgctggaagtcctagccagagcaatcagac

SEQ ID NO: 239270 - DNA, 526 bp, Homo sapiens
ctgtagattttgaaagaccatggagaggattttcttgttggcaacaaattcagctgggcagacatacagctgttagaagctattttaatggtggaagaactcaaagcttctgttctttctgacttccctctgctaaaggttcgagtgcagtggcatgatcatggctcactgcagacttgacctcttggcctcaagcgatcctcccacctcatcctccagagtagctgggaccacaggcatttaaaataagaatcagcaacatccctacaattaagaagttcctgcagcctgggagtcagaggaagccacccccgatacccactatgttgaacttgccaggaagatagtgctgctctaatggcagcaggttgcgtgatgacaaacatgatgatccagtcacagcaccagcatgtgctgtctgcagaggataatagaagcaaactgtagatcccaggagcaaagtgtctgaaaagaacaaaaccatgctgccattaacagcaacgctgattaaatgtagtataaaatc

SEQ ID NO: 239271 - DNA, 1018 bp, Homo sapiens
cctctctcctcaaaccattttcttccaaatactttggctttattccaaatcctctctagtcctctgagatttttttataacacaaaacacaacttacagaagttgtgttgttgttttgctgtttatcttgtcacattatttctctaccttgaggcaacaggacaagggcctgctgtccagcgcacggaggcagggaggaaggggtaggggaatactaagaaaaaaaaatttctcgatcacatgtgtaccacatttaactttatcaggtccttgtgaggtgagtatctgtgtgtcattgttctgaaactaacagtgaggggacaaagcattgataggagttcttacaatatatttgggaactcgcaggtgagggcctctcctgcctgattggtctttcaatgtaccatcccaacccacccacctcaatccccatggcttgatcctgctgtctcggtgatcaagctttcagttaagaattgggtgataatgagctagttaatccaatttaaaaaaaaagaattaggatctgggctcagaagccccacagctgtgaaagcctggccgtagattactagtcttctagatgtagaaaagatttttcctttctctggctatttaagtctttatcagtcaccctgcctcagttatcaacacacaccctagagtaaatctgttccctgggggtggaaatagaaggggcatgtcattgtacatccacactgatgaaaggaaaggaaacattaagatggcttaagtggaaaggtcacatacggcttgtactagagagacaccatgctaaagcaaaacatcgtttaaaaaaattctgacttatcatgtgctcagaaatgctcaaatgggtacaaccatcaccaagggtgggatgggagggcaggggaaaaaaatatgaagcatcaaaaaaaattctgatttgtatttgtgaaattcaatagtaaccctattcattaactggattttaaaatcatttcaaagcacattcggctttcaaaagatgtttgtt

SEQ ID NO: 239272 - DNA, 205 bp, Homo sapiens
agacagggtcttgctctgtctcccaggctggagtgcagtggcgcattcatagctcaagtgatcctcccgcctcagcctcccaggtagccaggactacaggtctgcaccaccacacccggccattggtctaatttctaagcaaggccagtgtcttccaatgagctcagggtgggaaaccccacgggggttgggctgtgaactgtac

SEQ ID NO: 239273 - DNA, 492 bp, Homo sapiens
aaaattgtcaatgtggatgattctttaaaccataatttgggccaaaagctgagcatcacaccaagaaaatatctctgcttctagacatcaagaaagagaggtggagataaaggaaaaaacttaatcccgaattgataggagtgagagacaacaaaccttaggacagggaattcttaacttgtggcagagcaaacagtagaaactcatgagacgtgttatccaataatagaaaataggaacatgagatttattccactagacagtactaggactctacatgtaaactcatgggaattgaaataaagttctctgctgtaattggagcaagatagactgaggagagagtaaaccacgaatgctggctcaagacaaaaaacctagcagaggtgcattgcagacatacccatgaaggaaaaacttacacaaggtcaccctaaaggaaggacattgttaagccctttgaaataatggggtggagaggaaaatgaactg

SEQ ID NO: 239274 - DNA, 326 bp, Homo sapiens
ccaatgtctaggtattctgaattatgttcactaaaaagtaggtctcaaagagcatcgtaatctccttagctttgtataaggaagccatgtaacaaagcagccttactacgtttctgtttttgcttttgttttatttttatctccattacttgttaagtggtaatggtgtagtagcatcttaaaataccatactattaagattgagccggggaaccttctcctattctttgctcttcagatatttctctactgtaaccccatagctcttgaacatctcatgacatatatcattgtattttaatttaataaattcatttttctatgca

SEQ ID NO: 239275 - DNA, 350 bp, Homo sapiens
gagtgggagatttgggagaatgttttagaattctacttaccacgcctcttttcaatttagttctgatttggttcacctgaatctacagaggtttttttagttttattgtgctactagaatgtaacatgtttcactgtaagaaaactccaactaaacctagaagcatatttaaataggttaaaagtctgtaatctcaccttttagaaaaacaaaccctgagggtttctgctgtgatgtgaaggcagggtgcttttgtcccagttgttttgttgttgttgttgttgttcttgttttctgctgagcctggtagctgatgaaatctaaaatataaactcttttctactgcacaa

SEQ ID NO: 239276 - DNA, 329 bp, Homo sapiens
tatgaaatgcacagaagagaaggttggagaaatagcaaggccaaggtggcccaccactttagattaaccattcctgcccaggaccttccacaagttggtctttcctcacttcccttccctaccagtgaccttactaggaccttacaaaagttgaccactttcaagggaggagcaatgctgtacttgcttcctctgcccattctcatgaattaaagaagtgatccttggagaatttgttagattgttttcactgatgtctgaattaatggctgttctgtatccatgttctttcccctgtaattttgtattaaaattcccacccactctga

SEQ ID NO: 239277 - DNA, 281 bp, Homo sapiens
agcataacgttaaatgacaatatgagctatcacaggatattatttgatgaagggctaaattcaggctacaaataataggtagtaaaaatgtagacaaagcatagaaacagtagtacacatggtacagtagtaacctggcaggaagggcaggctgtgggggaataatgagggagagaggtttggaaggtagagtgggatatatagagtattatattgaatgtgaagctaaattagagattgtggactttattctgtaagtcaaaaggaacgtgaacgtcagt

SEQ ID NO: 239278 - DNA, 1913 bp, Homo sapiens
  misc_feature (1110)..(1110): n is a, c, g, or t
aaatgcattagtttttttattttacaaggcctcctgtgcatggataacttttaaatttatttataagatttcttggtcataattaagaatatcaattctgtatttttgtagaattatgcgataatgtttctgatttagaaagctgaaatacaacttgtttttataattctgagggcattttatgattcataacaagtgcaaatgacattttctagttaatgttaagaaaaaaaaagcactgaaaattaattttgtcagcagtgttgagttttggaaatgcaaactaagtcaacttacttcctttccctagaagtgctgccactgttgtgacattgtgtttcattttgtaacccatctactacttaggccagatatgcattttctggatgcaatctgttggtttccaatggtttactacatggtgggctctattgacaagtaggtgacaaaatctttggcacactaactagtgtagtgtcctgtggtttgtcatgtgctgtgccttgttactgcatgatgagtgtaatttgccgtgtcagtattgcaaatatgatatattttgcatgtagagcttatgttctcgtgttatacatcttgtattaaactttctgagtagtaatctattgttgaattaaaacaaatcttgctgcatgtcaattttgtcagttttgctcagtttctaatgctgttttagttttgtgtcatctataacaacattattactattgacatagtggtagagaaaactaaagttgcaatattgtgatgcattgatagcgttacgataacttctggaaactttgaaataatttagaaatgctcattttaacttagatttataaattggagcaattcctttagagtttcccttggtcacatgtcagagtttataatttctaaaatatttgttaatgaaaaggtcatatgtgtttaatacattagtaattaaatacaaattcttatacatgtattatggtgacattaaaaatatatataaaaataaaagatcaaaacgctaatatacttgaaataatatatgttacttttccacttctaaaaaatgtcagccagagccttcaaaataaaatgctaaaatttaccaattgaganctttaacacttacattttatcctgtagatgttgaagaaaacacagttttacaactttgaaagtatttagtgctgtggatacattaaaggtcaaacagtctaaaatatgattagcctccattctatgttaatataatttacctcatcagttatgataatactaaccaagtaaataaactgtagttagatgtactaaaattactatttaaattctacacatgttttataaccaatcatcttttttgaaatcttttgaggtaatagtgttctgttaaaatttattagaaaaacagtatatctaaaagctaaagaataaacgtcccatataccttttctgatgcaaactatgaagtggattcttcctctgtacaagtatttatggtgagagaataaataattgaaaggatcaaattcctagggacagaaataaaacagaattggctacgaattgataattgttggtctggggacagttatgttcatctaacaattctcctcttttgcttgtatttgaaatctttctttaaaaatacctctttgaatgaattaaaacacattcatgaacacttctttacacttacgtacttcacattctagtccttgcaaaaaggggtcttagagagggatagaaagggaggctttgccaattatccctataacttgttttccatctagattgactttcttgtgctcccatctgctggccacactgtgtaaagcagccatgctgagggaaaaataaggcaatggccttgcagaaattatgatggagaggagttataagaataagttggcagcctactt

SEQ ID NO: 239279 - DNA, 1855 bp, Homo sapiens
  misc_feature (1052)..(1052): n is a, c, g, or t
aaatgcattagtttttttattttacaaggcctcctgtgcatggataacttttaaatttatttataagatttcttggtcataattaagaatatcaattctgtatttttgtagaattatgcgataatgtttctgatttagaaagctgaaatacaacttgtttttataattctgagggcattttatgattcataacaagtgcaaatgacattttctagttaatgttaagtaagtcaacttacttcctttccctagaagtgctgccactgttgtgacattgtgtttcattttgtaacccatctactacttaggccagatatgcattttctggatgcaatctgttggtttccaatggtttactacatggtgggctctattgacaagtaggtgacaaaatctttggcacactaactagtgtagtgtcctgtggtttgtcatgtgctgtgccttgttactgcatgatgagtgtaatttgccgtgtcagtattgcaaatatgatatattttgcatgtagagcttatgttctcgtgttatacatcttgtattaaactttctgagtagtaatctattgttgaattaaaacaaatcttgctgcatgtcaattttgtcagttttgctcagtttctaatgctgttttagttttgtgtcatctataacaacattattactattgacatagtggtagagaaaactaaagttgcaatattgtgatgcattgatagcgttacgataacttctggaaactttgaaataatttagaaatgctcattttaacttagatttataaattggagcaattcctttagagtttcccttggtcacatgtcagagtttataatttctaaaatatttgttaatgaaaaggtcatatgtgtttaatacattagtaattaaatacaaattcttatacatgtattatggtgacattaaaaatatatataaaaataaaagatcaaaacgctaatatacttgaaataatatatgttacttttccacttctaaaaaatgtcagccagagccttcaaaataaaatgctaaaatttaccaattgaganctttaacacttacattttatcctgtagatgttgaagaaaacacagttttacaactttgaaagtatttagtgctgtggatacattaaaggtcaaacagtctaaaatatgattagcctccattctatgttaatataatttacctcatcagttatgataatactaaccaagtaaataaactgtagttagatgtactaaaattactatttaaattctacacatgttttataaccaatcatcttttttgaaatcttttgaggtaatagtgttctgttaaaatttattagaaaaacagtatatctaaaagctaaagaataaacgtcccatataccttttctgatgcaaactatgaagtggattcttcctctgtacaagtatttatggtgagagaataaataattgaaaggatcaaattcctagggacagaaataaaacagaattggctacgaattgataattgttggtctggggacagttatgttcatctaacaattctcctcttttgcttgtatttgaaatctttctttaaaaatacctctttgaatgaattaaaacacattcatgaacacttctttacacttacgtacttcacattctagtccttgcaaaaaggggtcttagagagggatagaaagggaggctttgccaattatccctataacttgttttccatctagattgactttcttgtgctcccatctgctggccacactgtgtaaagcagccatgctgagggaaaaataaggcaatggccttgcagaaattatgatggagaggagttataagaataagttggcagcctactt

SEQ ID NO: 239280 - DNA, 500 bp, Homo sapiens
tcttgatatagagacctatgaattaaaagagcaagcatctttttatcacataccaaacatacaacaaatgatggaatagagacaataataaccacaaaaaaatactcttattcacaaaggggagaaatggaagcagatcacagccactggtccataacaattaggaaaactcattggacaatggttgtcaggttcctccattggagggaattgtgtttcatgattaggcactgtttctgctccttaaaaatgactttccagtctatcctccacagctctttgttctacactctagggaatcattctttttccctcatcttccttagtcacttgcaaaggacattagagaatatgccctttttggtggataaatgggttcttcaacctgctttctgcctgtagaaaattagaggccaataatctgtttatatcttgtagaatgtctattttagctggtaccggtacttttgtcaataaagttcttttttaaacttaatgga

SEQ ID NO: 239281 - DNA, 430 bp, Homo sapiens
cagatggtgggagaggtccacatttagtaaggaagcttatgaactcatttctctccaacattttattatgaaaaaaatgcaaaccaggaaagtcatttttggatttgttaaattagggagtactttggcgtcatccaagaaaagatgtcaagttagctactgtatagttgagtctggagcgtggcaaagatgtgtgggctgcaaatacacctttctgagttgcctgtggcttccgaacttgctctcaaattacttcctcaagaaagcttctctatcctgcccctgcaaactagctgtgtgccccatgcttctacgtagtagcatcgtttctcacaattataaacttgtgtttagttatgtaatgtctgtcttcctaagtataatttaatctctctaaaagcagggacttcaccttgttcagagcagtatc

SEQ ID NO: 239282 - DNA, 489 bp, Homo sapiens
gggctttctgctgcaccaacctgtcactgcacatcagcacgtgttgtaagcaacggctcccgcctgagaagccggaagtggaggaagaaaattatgtggacatttgttctccacttttgaaaacatggaatgtgcttgtgtgtgtatgaatatgcaaattatcttattcaactataaagaataaaattatcaacgtggtctggcttcatccctgcagtattcacagcttcacgtgctctcgagcacagcacctattcatttatggctcacctgctgtataccagacgccggctggtgctggcagagggtcagagacccaccctgacctcatgggacaagaggaggacatgggcagacaaactggcattgcccagaagtgtggctgtggcagccgagcttaagggcagaacaggtacccctccggcctgctgaccccacagctcacagtgatgatgaaggcaggaggggctgcctgtaggggcggccgca

SEQ ID NO: 239283 - DNA, 387 bp, Homo sapiens
tggaatttgaatcacattatctcaccaattttaggtcttttttcctatattaaacaatcaattcttaccactaaacataggtaagaccaactttgaggaaaatagttataattgactataatttgggaccgaccataacatttccttttttttttcctttatgaatgtagaatttcaaacacaaggtagaatcaggttaatttcgacactatgttcaaactcattacttttgacccagtgaagggtttaagagttaagaatctagtagtttagttttcactcactttccttacctattattcatcaagttaaacatttcaattgaactctagcatgccagaatactgggatatactcctatccatccttgcccttcattgtcttttt

SEQ ID NO: 239284 - DNA, 484 bp, Homo sapiens
tctatcgccatttcttacaggttccatttccaaaatataacatgagtccatctatttctgtttctacagtcatcaccctaggctaagccactacttcagtagcctctccattaggcttagttcactccagccctcctccagtgtgattcacacagtcctgcaggtagtcattagaaacataacttaggccctgtcattgctctgcttaaaatttgtggtggcttcccatcatgcttagaataaaatctgctttttttttttaagcatggctttggtgctttacacaatttagtctccatatcctctttctagcctgatctgaaggcaccatccaagtatatgtgacaaaacagcagtgaacatgggggttatgaacactacagaggaaacacaacttgcccaatagtagcaataggcaggtagacaggagggcttgcaaggaggacactggaatagaattttgaaagtagagtggaaatttccc

SEQ ID NO: 239285 - DNA, 364 bp, Homo sapiens
attcctggcctcaagtgatccacctgccccaaccttccaaagtgctgagattacaggtgtgagccactgtgcctggccagtatctgccattttttattgtacttctaacatctttttcttatcgattcgtaattgttgattatggatttatataggggaaaactagtcccatgtcaattatatgcctcacaaataactttataagtttgttattagacttttatttgtttatgcttttttatttagtttctttttaatttctattttgaatatattgatctcttcctttatgagtttcctttgtgaatttcttgctacaaattggaagacccctcacgctccaagatattttatacaatttaat

SEQ ID NO: 239286 - DNA, 309 bp, Homo sapiens
ccaacaacaaaatgctagcacaatgtaacgtccttcactccctgcttgacttctaaccataaagaacgtcattttttacaagagcgttcacaggactcagcagttttccccaaggcctcttgtgaatctttggtattcttcctccaccacacctgccatgttatttatttgtccattttgtctttttctgttaactagtctaaatttgccaaatatgcatctgatggatttaaagcaattctctccgatgttggtttcatccactttggctatcctatatccttagcaacatttgcagttttactttgc

SEQ ID NO: 239287 - DNA, 599 bp, Homo sapiens
atcccaggccgaagaggcttaagttgccacacagcaaagagaaacatagcagtactttacaaagaaatacatgcacacagacaaaaagacaagagggtcctaaacttccccccatgtgagatatctagagctacagttccattcagtgaattctacttacaagtgaacatgttcatgcaaattggttctcagcatgtttcttttcccatgcacagcagagaacctttaaaatgttgcatgcttgtccccagactgtggttaaagaggtgtttctttacctagtgacagcaacaaaacctagaatgctcccaagtttacttttctcctacctcaaaacaatgcccatccactctaccctaaattttgatgggtttttagctacaaagaaggagcatggtagagtttatcaaagggtagaaggaagatcatgatggtacattttggtgatatatttcttataattaattggtacttacgcaatttggtattcgtgtttggtatttaagacgaaaaattctaggtcttcaaattgaatgaacatttgctattttatatttaacagagcagacatctgtatttctctagctttatatctactt

SEQ ID NO: 239288 - DNA, 425 bp, Homo sapiens
tggcaccaccccagaggggcagggagtgttgcttggttactactgtcaggaggaggtgaagtccaggcccccaggtagtctctccattgtcacaatgaggggagtactcgttgcaggcctgtgggagatcaaagtcctccaggcacggtggctcacgcctgtaatcccagcactttgggaggccgaggcgggcaaatcccctgaggtcaggagtttgagaccagcctggtccccatgatgaaacccagtctctccaaaaaaaaaaaaaaaaaaaaaaaaaagaattagctggacatgatggtgggcgcctgtagtcccagctatttgggaggctgaggtgggagaatcacttgaacttgggaggcagaggttgcagtgagctgagatcgtgcccccagctgggcgacagagtaagactccatctc

SEQ ID NO: 239289 - DNA, 533 bp, Homo sapiens
aaaggcaaaggaattggaacactgaatgatattggaaaaaaaaatgaagttggaggaatcacaccactcgtgcccggcccttttatgtgctttttaaaagtacgttatgtatttcagtttttcacacacacgcacacacacacacacacactcacacacagacacacacacacgttcttctctaggttttttctgtaaattttacatctctaggtgggggtagtaggggaagagaagcaggttttttttacagctgatgtgatcactgtacagacaagcttggaaaatgctacccaatctgccaattaattaaagcgttaatctgaggagcagccgggcccagggaatgtttacccagggaggagtgggggtggtaggaactgagtaggcagctccctatatttgcatgaaaatgaaggtgcttaggaaaccctgcttccttttgtctctaaaggtggggcagcctagatcacatccctaaacacttttggtctctttaggaagccttttagggagctggtctctgaaagatg

SEQ ID NO: 239290 - DNA, 576 bp, Homo sapiens
gggagcatgctgtctgagagaatgttctgctagcttccagatgcacaggtttataaaaataccaccctgccatttaaaacatgtttaaaatgttgatagaaaacaatgaatcgtatccttagaaagacagaccctagtgaaagaaacactaactcacacaggtagggtctagcttccataacatttaagtttattctatggaattgttcattggtgctcctgttttagttacttctccatagacttgtttttcccttgactaatcaatgccatctggtgccaggtggtatcctgggtgtagcacagtgacagggtggagactgccctggccgtggcatgtgcagggggcgttcttgagcctgtcttctgggagccctttcttttcctttttccctcctttaggttgaagacttcatcattccctgcgggcagtttctctgtttttcctattttcttttcctcaagaaaaatgtaatttttaagtaacagaattgttttctgtgttgcagcatttaagttgctgagttgagaaatcatggctgagtttgccaagtaaagtttttaaagcaaaaaaaa

SEQ ID NO: 239291 - DNA, 624 bp, Homo sapiens
aatgaaagtatctgaagcaaagtcaacaaaataccaagacttgttagagtcgggtggtgagaacttgggtattacttatattattctccaaagttttttgtatgtttaagcttttcataattttttgttgggcatagtggctcacacctgtaatctcagcactttgggaggctgacgcaggaggaccacttaagaccaagagtttgagaccagcttgggcaacatagcaagatcccatctctatttttaaaataaacattaataaaataaaaattttaaaattttgtaagttttaaaaatgagaaaaataaaaaccgttaacgaaatagatattcatgtccatagctggtaactttgggtaagccagttaacttttccagaatattagtttatttttttctaaaataacaacattaatttcaaattcggagggtgatagctgttgtgttttctaactctacgaaggctttcctgctatatattcaacattgttgttattgaatgactcctgactgaggtttgtgggcttaattattggctagtggagccccagatgggtcctatgtcatgagattcagaatttggaatgtctatggtgctcaccaaaatataatcccaccttca

SEQ ID NO: 239292 - DNA, 498 bp, Homo sapiens
agtggatcatattcctgacttcccaggatggggagctggtgcagccctctctttaccaccctggaaacctcagtgcatcccaccacaaactccctccatgagcttcattagggcaggtgcttccacacatcatctcaatatccaaagggaaactggctctggcaccacctactggagaccaaacttcaccaaaacaaaacaaaaagtggctgacagaaggacacagtgctagggaggacatcagctacctgagatccctgtattcctggcctcctagaagagagtgaattggctcatatgcccaatgtatagctacaacaagcagaatttgagaaagccaccacacaaaagctatctataaccaatgaattcatacagagcctcggttgtctaaaagcacccagaagccaaatgatcatacaaaatatgtactacagtcacaccttcaagggaggaaaaaataaatataaagtcccttgcaaacaatagcaatttcaa

SEQ ID NO: 239293 - DNA, 538 bp, Homo sapiens
ggcattgtggagttgctggacagcttccctacttttcacgttcctatgacacaatgttatcatcgtccttgttgtatcagccagggaagctaaagaatgatgcgctccaccacaatgagggactaaacaacaaaaaggaggcatgagattcaggaagcaaaaaaggaattcatcatatgaaggaatgaagatgttcaaaagaaaaccttcaacctcatgccagaagatgttcccagctgtataaatgcctaactcagcttctagtccttggaaattaagcagctcattgaaaattcaagagttccagccagaagctacagctaggctcagatgttgaaatcagtctctcctgctgatcaaactgtgacatagccaaagcaataggcctggcttttcagttaattctcagcgagcccttcctttccctctgtagtggttggtgtggcatttataatataactcctttatgtacactgtaaaccattccttctcagggcagatggaagtatgaaatctatctatttcagtctataaaatt

SEQ ID NO: 239294 - DNA, 776 bp, Homo sapiens
gtgcagggaagcactccacaccctcacccaggtcctgtatccctgcaagactgcgttggaaagactgaagaggctggagtgcagtggcgcaatcttggctcacaggaacctccgcctcccaggttcaagagattctcatgcctcagcctcgcgagtagctggaattacaggaagctaaagaatgatgcgctccaccacaatgagggactaaacaacaaaaaggaggcatgagattcaggaagcaaaaaaggaattcatcatatgaaggaatgaagatgttcaaaagaaaaccttcaacctcatgccagaagatgttcccagctgtataaatgcctaactcagcttctagtccttggaaattaagcagctcattgaaaattcaagagttccagccagaagctacagctaggctcagatgttgaaatcagtctctcctgctgatcaaactgtgacatagccaaagcaataggcctggcttttcagttaattctcaggtacttcaggatcctgcaataccatctttgtgaacatcaggaatattacgttggtacatacagaaagaagtcttgagtaataccagatatttttggttaataagatgcacccaaatgtttcagaatcatgaggaaactgatgcaactaatgtagaaacatcgactctggagaccagctggagagaatgagaagatatttttttcattccctgggaagtctcatttacatagcttgagttaaattttgctatcaaattttctttaactaaaattttcttttct

SEQ ID NO: 239295 - DNA, 472 bp, Homo sapiens
agactctagaatccagtggatttgaattatacagattttgctagcattttactgctattcaaggtagaactcataatgtccggcataacttcttcaagaataaagaatgacacaatcaaatatgttattactttaatgaaaccataagtaaacattgtcacaaacacctggattctcagagggaagcttgttagaacaataaatgtgtccactttcatccaggtgtattactattctattttaggtcaaatctttttctgttattactgaagtaaataatacatttcttcatgtttctgtccaaattctgtttatttatctccaacagatataacttctctaaaatagaaattttcctcacatatttccttgccaaacgttcacttctgcatgtcaaggaagaaaacaagatttttgtgttgttatggcaaatgaatcagtagctttctgtttattacagtggatataatag

SEQ ID NO: 239296 - DNA, 393 bp, Homo sapiens
ttgagatggagtcttgctcttgttgcccagactggagtgcaatagcatgatcttggctcactgcaacctccagctcccaggttcaagcaattctcctgcctcagcctcctgagtagctaggattacaggcatgcaccaccacacccggccactttttgtatttttagtagagacagggtttcaccatattgggcaggctggtcttgaactcctgacctcaggtgatccacctgtctcggcctcccaaagtgctgggattacaggcgtgagccaccctgctgggcctctctttcatattaatgatcacatctaagcaaggtttaacatgttacatggtgttaaacgtgccatgttgcccaggctggtctcaaacccctaggctcaggtgctctt

SEQ ID NO: 239297 - DNA, 493 bp, Homo sapiens
tccactttttaaaaagagttagttatatgtagcatagtaaaaatatttcttttgaaatatactattatatccatttatttaagttctaatagactatactgcctaaaaaaatagagttgatcttagtcaaatcacttaaatcaggaacctttaagattcagtttaatcagttttgtatataaagtattagacttactttcaccatttttgcccaaaaacaaacttctgtacttcattaaataacatcaacaaaagtaaaaagctaacatcaacctaggaaaaccattttcaccgtaacagttatgtatattaactatattatatacttttaaattagtaaaaaaaagggtaaaagacatgaacaattatcaaaggaaaaaaatcctgaaatattcaaatgtttaccttactaaaggaattcttaatctgctgattatgtttcttaattgtaccatgaattacaaaaacctattggcaagatcagtcttattta

SEQ ID NO: 239298 - DNA, 578 bp, Homo sapiens
gtttttacaactagagaagggtagtggccagggacaccagcttgtttttgttttgtttcacgtgaaaactacaggactctctccttctattgctccatttggagttgtcaagttgagctatcaaaaattgagaatatatatgtctatgttatatccataaaggttgttgtcctttttttctttgaaattgccaaatgatgtggatttagggggagatgaataatgagcagtgggagtcccagtaactgtgaggcttttgggtgggctcagagattgatgaagcataaaagggcagaagcgtgtgggtaaagccagctaaatgccccgtccaaagtgccagtggtttgtgtagatgggctccatgcaaataaatagaattaattaattgatgattttttaaaaaaataagacagcccaacttgcagtgactttttgttttaagtgaaagcaagtttattaagaaagtaaaggaataaaagaagggctattccttaggcagagtgcccaaaactggatttctcctaattctccaatagaaaagaatttcagacacaacaatgatacttaagtgaaaacaa

SEQ ID NO: 239299 - DNA, 376 bp, Homo sapiens
ccaggctggtctcgaactcctgacctcaggtgatccacccaccttggcctcccaaagtgctgggactacaggcgtgagccaccacgcccagactccaggtataattattaaagcacctcccttgcatccacaaaagtgtcctggtgtttgtgataagtcacatggttgtcctaaatataacaaaaaaagagtaccagtgaagattttatttcctcagagaaaaaacttgtcctaaaaaacatgttttactgtagaagttaccccttcattcacatacagtcggccgcttgtatctgtgggttctgcatctggggattcaaccaacctcaggtggaaaatatttcgaaggaaaacaacaataaataatacaaaatgt

SEQ ID NO: 239300 - DNA, 386 bp, Homo sapiens
tgtcacaaaatataaacaaggctaattcaatattttggtctctggcctcagctgagaaataaagattggcctgctagtttcagctgcttccactgagccactgcatgaggatgagggataatttctttcctcccctaggtccaacagcaaggaaggctcttccagacaggaggcatgctggggttagaggtcacagaggaggaatgagtatctggtccaaatagtgagggatcggtccatgaaagtggttaaacttctgcttctccttcaagttgttacttacattgtcactggtttaaatgattcatttgccaactccttcgaagtaaacgttatcattaagaataagaaaataaaaagacactgtctttaggacaatttaggac

SEQ ID NO: 239301 - DNA, 469 bp, Homo sapiens
gggtgtggagaaataggaacacttttacactgttggtgggactgtaaactagttcaaccattgtggaagttggtgtggcgattcctgagggatctagaactagaaataccatttgacccagccatcccattactgggtatatacccaaaggattataaatcatgtctattggcaaagtttttaagcttaaatgtattgtttatacaagatgcttctttactttttgatacatgtggtagtgttgtttcgttggctagcagtttctttttagttgttgtaactgtcaaatttggttcagtcaagggctttcaaaagtgtttacctgtgatctccacatataagcaaatcaaaggtaacattctcttagaagtctctcagttctcagtgttgagacatttgccatgtttgtgtcatatatacacagtagtgccctatagtggtgactccatttgaatgacagtgcaaaata

SEQ ID NO: 239302 - DNA, 120 bp, Homo sapiens
ggtttatagccttaagaaggttttcagtgaggctcaagaaccataaaataatatgctttgttttatgagcttctttggaagtaaatcttgcattcttctatgtcacctcctagagaagcc

SEQ ID NO: 239303 - DNA, 397 bp, Homo sapiens
ccttctgtgggtagcaagaaaacagtcctctgagaagactgtcaccccagacctctcagtggccctccttgggccctggagagtgtcccagacagagcagagataatgagaataactgatgaagacagggactcattgtgcctctgtcaatgtgcagttagtggaggaacccgggagaggacactttcatcaacagagggagttattcctgagctttgttgtcttaacatctgtaattgggcttccttctttctttttgcaattagacgttctgtttgaagacttaaactcaacacaatgaatattgtataacccgctcattaactagacccctgtggccactaagcttcctctgttgtggtaaggaagccatagaaataaaaatactgtccctcct

SEQ ID NO: 239304 - DNA, 374 bp, Homo sapiens
aagactttaagaaactttcaaagctgtatgtacagcctgggatttgagagacattgatcaaaaagctagaaactataaaccaacattggccacataaaaaattgtgtagcaaaagataccagaagccatttgtcaatagtcatgtgatagagtttaggaaaaggaaattttgcaaacagcattcattttagatttagtgttcatattcatattatacaaagagatcctataatttgacagtaaaacccaattgaaatttgggcaaaagatgtgtaaaggcagttcatagaaaaagcaaatgcaaaatagttcttagtcattaaaagatggtccctttaatttactaggaatctgggaattgcagattaaagaaa

SEQ ID NO: 239305 - DNA, 810 bp, Homo sapiens
aagaaagaaagaaaggaggaagagagaaaaggagcgtggaaagaaaagaaaatttcaggagcttctacattggttatgccagcagaaacagttaagccatggaaactgagtcacatacacgctgtttttcttctctggtgcatgacctttgcttctgacctttgtgttgagatgttatgaattaaccacccttcctattcttcattcaaacctcaactaaatgacattggagatagagacccttacctctttacgatggatgttaagtaactcccatagagtatagtcaatggtggccagccaacttgtgtgtgtgtgttttatatcttatatttaaaaaatgaaaaaaatgttgtaattctggccagatacgtggctcacaactgcaatcccagcactttgggaggccaaggtaggcggatcacttgaggccagaagttcgagaccagcctggccaacagggtaaaactctgtgtctactaaaaatacaaaaaattagccaggcgggcatggtggcgcacgcctgttatcccagctgctcggatgactgaggcttgagaatcccttgaacctgggaggtggagtttgcagtgagccaagatcatgccactgccctccagcctgagcaacaaagcaagactttgtctccgaaaaaaaaagagcatgttgtaattctgttcagcacccctgttttttgcttatatgaatgatcttcacctttccccgcactgaggagtgatgatcaccattctttggtgtctgctaccctaacacttggcgcttgaataaactcttttaagtggagcctga

SEQ ID NO: 239306 - DNA, 359 bp, Homo sapiens
tagagagcgtgcctctttatgttgcccaggctggtctcgaactcctgagctcaagtgatcctcccaaaatgttgggattacgggcatgagccactgtgcctagcctaaatattattttaacccctttttcttctaagtttctgaggctcgtttttttcttttggttgatttcaagaggaattccagggcttagacttacaattcctaggtgtgttaaaatatgattgtttagaaaaccacttctggctgggcacagtgactcatgcctgtaaccccagcattttgggaggccaaggcaggtggatctcctgagctcaggagctccagaccagcctgggcaacatggcgaaaccctgtct

SEQ ID NO: 239307 - DNA, 195 bp, Homo sapiens
gccctgtggatgggattagtgtctttataaaagagacctaagagagacctctcaccccttcctccatgcatggacacaggaagaagatggctctctacaggaagagggacctcaccagacaccgaatctgccagcaccttgatcttggacttccagcctccagaactgtcagaaataaatttcttttgtttgtaa

SEQ ID NO: 239308 - DNA, 534 bp, Homo sapiens
atttgaataaacttacattaggagcaccaagaaaaacacacaaaataatctagtttttttttggtcagactatgagaattgacaatgcttggtcaagttcaaggacttccacactcatcagttccattgatccaggaatgctctttctcttctcagtcctttccagcaaaccaattttgtggaaagaccaactaatagttacaaatggaaacttattattaaaaaaaaattacagtataggaacaggtcttcccaatcaaaaataaagtagaacatgagtcagagataaagtcatttcaaatgcatgtagaaaactgaaagtccttgttttttttttttattcacaggatttttttctttcctttttaggttgtggtctagaaagcatattgtgatttgtacaagaagcacattcccattttacaaaagtacaaaagcacattttggacttttaacaaattcaactgttttgtgttctgtgtgagtaaattttaggttgcccatcattgaaaaccagtttaaaaaaaaataatg

SEQ ID NO: 239309 - DNA, 540 bp, Homo sapiens
cagtgtgtggagtagaagacagaacaacgtataccttcagaatgcacagagccaatgcatttttggattacaaataaatcaatttaagacctattgcttctgacaatgatttgcaaattgagaaaattctggaaaaatagacatccaacaaattaacagtgattatacctaatgacagggttacaggtggggatttgtttatttgtatgttcttatttgtttcttgtttcttatgtcagcaaattttaaatagaatatgcaaaatgatgacctcaataataaaaaatattgtgtttattcacaagagttaaataatgtttatagaaaggaaaagatgcgaatgtttttggacagattaggatttaaacaaaaatgttaaacacagaatacaaaatatgttttttctcctgttgtctagcttttgtacagtgaacacatgttgcttttatagtaagaaatatacattttaagtttcaaaattactcagattttgtaaacaatctaaaagaaaataaatgtgtttggaaaatccatttccga

SEQ ID NO: 239310 - DNA, 316 bp, Homo sapiens
aaaacgctttgatggggtcaaggatgacagacttcaaggattagactctccaaaggagaaataaaggattgtgaatagaactaggcaggaatcatgctggggtccagggtgaggtgtgttataggaaaagccccttttgtctctgagttcagagggggcttgttcagaagggacaagaggggcccttgagacctgtgtgaaatgctgccaaactccatgggaagaagaccagaggaaggtttatgtctgaagcccaaggttaatgaagagtgcgtttatgctgactattccctgccctcagaggacagcaccagca

SEQ ID NO: 239311 - DNA, 450 bp, Homo sapiens
ctcccaagtagctgggactacaggcacctgccaccactcccggctaatttttctgtatttttagtagagacggggtttcaccgtgttagccaagatggtcttgatctcctgaccttgtgatccacccgcctcggcctcccaaagtggtgggattacaggcgtgagccacggcacccggcagcacttgctttttctaataacaaagtgccgtgactgctctgccatctgccaagagctgtggaaccaagggtctgggctggaggctagaaggccatggttctggggaccccacttgcaccctcttactgattttatggagtggacccgagagcaccagctctgtctaaagggggcagctactggttttgccttgtatgaagaagagtccccttttgcccaatattctgatttttttttctaggagaatttaaaaattttaatactatgtga

SEQ ID NO: 239312 - DNA, 775 bp, Homo sapiens
gatctcggctcactgcaacccccacttccagggttcaagcaattcttctgccttagcctcccaagcagctaggattacaggcacccgccaccatgcccggttaatttttgtatttttagtagagacggagtttcaccatgttggcctcaaactcctgaccttaggtgatccacccgtctcggcctcccagagtgctgggattacaggtgagagcccccacgcccggccaggctcggctttctttccaggccccgtcacactcttagatgttccctgggccccagaaggcagcgtgaggtgctctgcccatctatgctgtccttttccaccccaccctatccactgggcccctggggctcccactccactccaggtctcttcatggacccttctttcccttcacttctgtcccaggagacctgggagactcatgggaacaggcatcatcttctccagcacagttcattgtctaatgcacgaaagtgctgggctgtgagaaggtcaggagcttacatggaatgggagtcagctgtggtacaaagtacgctgcttagttctactgattttttattttttatttttacataagactttgatggtaaaggaagcagtgtgtgagcaagctgactcctgtcttgtcaagtaccaggtccactctgatgagcccctgtggacagcactgctgtaactccccaagcctgggctcaggaggtgggccctaagcgctgttcccagctcttcctccatgctgtcagctcttccaccattcttcctg

SEQ ID NO: 239313 - DNA, 506 bp, Homo sapiens
acattaaattctctttatgtgcttattattaggataaacatttttgttttctactcttttcattgtatatgtacccattgcatatgtagtggaatattacagagacattttgggaaggaaggtcaccccaccagattattttgaagaataataaccccccagaaatgctgttttgaagaataatgacaaaaatgcaaacattatatgtttgaaaagctatatttaaaataaaggcagtagccaatatcttttgagtatattaacatttaccataattcatgcaatgtgctaataattttatatgttatgttatgctttctattgccttctttaaaaagttccatattatctccagcttgcatttgtaacagtggtttcacactccttgggaataatttaatctggacacatataacaacaggtggggtgccctttcttttcagaatgcatgaaggtcgggaactacttgtgagaattgatcctgacataagaggccaggctcaaag

SEQ ID NO: 239314 - DNA, 389 bp, Homo sapiens
  misc_feature (10)..(11): n is a, c, g, or t
gagagagagnnagagagagagagagagagagagagagagagagagagagagagagagagagagagagagagagagagagagagagttcttaatgtggctactggaaaattttaaattacatctgtggatcgcattgcatttcagttggacagcaagcactgcctcatagagattattcagataatgtatgaacttaattatttcatatatgattaacaagcagaccataggccagtgtctgactttcactgggaggtcttggcacccttcctcaccttgatggtaaggccccaggacaaggtggagaggtaatcaagggcatcttagttaggatcagttggcaatgatgaaccggtcattctacactattcagtgatgtgcgggtttac

SEQ ID NO: 239315 - DNA, 426 bp, Homo sapiens
catttcaggaaatttgaaaaaagtacaaaaaaccaccaaaaaaaattacttccattcccaacacccaaattaactgctgttaacattctggcaatttgattccatcattttcctgcatattaccccccttcaatttaatgagtaggctgggcgcggtggctcatgcctataatcccagcactttgggaggctgaggcaggcggatcgcctgaggtcaagagttcaagaccagcatggccgacgtggcaaaaccctgtctctactaaaaatacaaaaattagctgtgcgtggtggcacgcgcctgtaatcccaactactcaggaggctgagacaggagaatcacttgaaccgaggaggcagaggttgcagtaagctgagatcgtgccactgcactccagcctgggtaacagagcaagattccgtctc

SEQ ID NO: 239316 - DNA, 343 bp, Homo sapiens
ccttattttttccttcatctgctccatcgtcttccctacaatatagtcaccataacaaatttgagtagaattttgttttgtgtaaagaatatggtagccatagaagagaacattgacttgaaagaataatatttataaggaaggagttgcaaggaacatctaggaaacataaaagtaaatgatcaaagaagttaatgggttgggtggtaaagtgttatggaagctcagcaactcgggaggctgaggcaggagaatcgcttgagcccgggaggcagaggttgcagtgagctgagattgtgccattgcactgcagcctgggcaacaagagtgaaactctgtctca

SEQ ID NO: 239317 - DNA, 354 bp, Homo sapiens
aatttaagggtgccctgaacattaggatatattagttggtagtagtgatgtgagaccagattgataggcttacattcttaaatagggtggcctgaatttatcagtccaatgaaagtgcatgtctgtgaggcaacaaagattattatgtttgagaattttttttggcaataaaatagtgcagaactaaccaaatacatttattgaccatatgatagaaattgcagtgagtttaggtagaaggtttttagttgcaatgtgaactgtactggttttttgcttctgagcatgttgagtgaagtgattttgagccagtcattcttacccctgtctgaattgtttaaaggagatcaagag

SEQ ID NO: 239318 - DNA, 303 bp, Homo sapiens
agtgctttggtcattttttgttgttgttttgttttttgttttgttttgttttgtttttagacagtcttgctctatcccacaggctggagattgcaccactgcactccagcctgggcgacagagcgagaccctgtctctaaaagaagaaaaagaccacctgggcatgggtctggaacccaccctagtggatcccagattccccacagagtctgtctaccccccttggtggcagttcttgagccaaacgagttactgctagaaattgaagggtttcctttgtgataaagtttttaagtatccatt

SEQ ID NO: 239319 - DNA, 480 bp, Homo sapiens
cttatagccaatggaaaatggaaagcaaaaaccccttaaaatgtcctccagcttcttgggaaaatgtgtaattcccaaggaaaacatgttttgttttgtttcagagatctccaagacatagacccgccctacctgcttacatggaaggacaggtgggtggctgccacagaggtgtgtatgtgacaagtagggagcttcagggaggaggaggccttgactctgcagtgagacagtgagggttcacagccaaactgggggcagtggagtaaacaaaaatccttacaaagcatcacagaaaaaaaaatagaacaaataaaacatcactggttcagaacaactaaggctttagtataattttaaaaaattaaaagtaggccaggtgcactaatcccagcactttgggaggccaaggcaggtggatcacctgaggtcaggagttcgagaacagcctggccaacatggcgaaaaaccgtctctact

SEQ ID NO: 239320 - DNA, 523 bp, Homo sapiens
cagaggcatctgcatatatattttttaaaactctcaaagtgattctgatgcatactgaaggctaagatccaccgatctccacctctctgatggtactgatgcttttctacttggtgatgcagttatcagtggatatgactcttctgcttttctggatttaaaactctgaatctcattagtctctgtcatttctcctattcccaatacatgtacactgactacctcagtgctatatacataataggtaatgatttattgggtgaatatgattatcaccctacatctaatagtaatagctactgctgcaaaagaaaaatgtctataatatatgataaagggaaaggtatgattttaacatccaaaatttggtacaaagttcttaaacaaaaaattgcaaatatccaaatccataaaaagtctttgaaaaatggaaagtttgaaaaaagttttaaaaacttgcttgtttttcttattgcagaaacattttatgttcattactgaagcattaataaatacaagccag

SEQ ID NO: 239321 - DNA, 378 bp, Homo sapiens
ggtaaaaatgaattgcttgtattctaacatagaatagctactacctgttgagtgtttattatatattagacatttaagactaatcaaaatatctaatctaatgaaataatcactgttttgaatttgcttagatttagtagatgtagaaactgagacttagagaggtttatttactcaactccacactgctaattactggtgaaagtagaattttactcctctggttttctcatccagcacatcatcactataacccttatagtttgcttttggcacaagtattcattattaatggaaatgcatagtattatctcagcaaatgtacaaatagtttagcttcactaaactagtcaattttttttttctaaacatcaatgc

SEQ ID NO: 239322 - DNA, 551 bp, Homo sapiens
taattatactttaagttctgggatacatgtgcagaacatgcaggtttgttacataggtatacacatgccatggtggtttgctgcacccattaaccagtcatttacattaggtatttctcctaatgctatccctccccttgcccccaacccctcgacagggccccggtgtatgatgttcccctccctgtgtccatgtgttctcattgttcagctcccacttatgagtaagagcatgcagtgtttggttttctgttcctgtgttagtttgctgagaatgatggtttccagcttcatccatgtccctgcaaaggacatgaacccatccttttttatggctgcatagtattccatggtgtatatgtgaaaatgggcgctctttaatgtgattgatatattaagaatttgagaatcctgcacaaaattcagtcttgagaatcctgcacaaaattcagtcattcccttagtaaaagtgaagtcacttcactgaaaattctcatgcatgggaatgtagggcctgaactgtgtgtcattatgagatcctcttactaatt

SEQ ID NO: 239323 - DNA, 458 bp, Homo sapiens
tcaagagtatgtcttatgtccattactacactgcacattcctggagagcagagtgtttctgatgtatttctgggtctgcaaggcatctaattggtgacttggataccgcaggtattcattgtttgtggtgttttgtttcttgcttggtgtggagacacttctactgaaagaactgtcttacaatgcagggaattgataaggggctatattagagaattctctgtttggatgtgtgattaaatatcttgttttctgaaatttgagatatttaagtactttataaaaataaaaacttgtaagaaattgtaaaaagaaagaaaaggctgggcacggtggctcatgctagcgttaaccttacctgacgtcccttctccaatcctaactttactaacctcagaatagcaataatgataccacctaccttagagggttctctgagtgttaagtgagatacctct

SEQ ID NO: 239324 - DNA, 3097 bp, Homo sapiens
  misc_feature (2588)..(2588): n is a, c, g, or t
taatcagaggataacatgatcagagttgcattttagaagtagtactttggttgtaattttgcaaactggagatggggtgactatttattttgatggcatgttagtcatccttaggagaaatgacagtggcccataataaagaggcatcagtgaggatacagagtaggtagattctagaaaaatttatgagagagaatttataggcatttgattggtatggagagacaagaagaaagccagggattttgtccaggattctggcttgggcacttgagtgaatggtgtaaaactgaggggacgtataggatttacttaccatttcatttgcttgtttttttgtgtgtgttttgtttttctgggagggatgacagatatagctggtgtattagtccattttcacactgctgatagagacataccagagactgggcaatttacaaaagaaagaggtttaattagacttacagttccacgtggctggggaaggtctcacaatcatcatggcagagggtgaaagacaattcttacatggcagtggcaagaaagaatgaggaagaagcaaaagcagaaacccctgataaaccgatcagatctcatgagacttattcactatcacgagactaatgtgggaaagaccaaccctcatgattcagttacctaccactgtgtccctcccacaacaggtgggaattcttcagatgcaattcaagttgagacttgggtggggacacagccaaaccatatcagctgcgttcaagtgaagaaggaaagaagtacatatttcagctgaaactctataagtagttttgaatctgtggtggtagaaggatagagtttttattaatagaaatgaataggaaaaagtggctggttttggagataaacctcttgttgagtatctttgacagtggaacatgcaagtaaagtagcttgtaggcagttaggagataggactgggttttgtgtgagggttaggaggttataatgaaaattttaaaaacagcaacataggggattttgctaaagccttcagggaggatgacttctcacagtgaaggcatggagagaaagaggatggaatggctttagacagttctcttttcctgaggagaggccatgttgggaaggaacgtaaagctccaaagccgaaagtctcaagaaagtgaaaggaaagtaaggtaatgttggaatgtgggtgctaggaagttggggggtgagaaggcaggtagaggagcttccacaaagggaaaggtggcacaaattgctgaagcttcagagaagtagaaaattgattaagaccttcctttggattttcctagaaggtgattattgatcacctttgagacaacactatatttcctttttgttctcaatgattttgccgctcagtgacccctttcctgcccccatacttgtcttttcttttttattattggcttcaacatgactctctttctgcaacccctcagctttcataaattaacccagaaattattttatagcctcctttgagagaagcccttattttcacttccggtgagaccttgaaagttaatttacctagatgctataagcagatcagcaggcatgaccacatactgctttgtggcaattccattgatgtctttatgtccagttatttgtatcaaagcatatgattatgaaggaaaaacaaaaaatacagggtctaggttaactcagcagtagccacatgcaggatataaaatattctcatcctgaaaattcttgcaaaacaatgtgtcctgttttgttgcagttgagtatgtactgattctgtaccttcagccttcatgcagtagaacctggatgacttttgtatgggagatacaaaacccagagtctcactgaattttgtgtatggatatataggtcagacatcagtgtacatgacggtagtacaagggtgaaggatgatggaagggaagttcattaataactggtagtaagtttttgtagctcagaagaaagagggacaagtagaaataattggagtaatatttaacactttaaggaagcgatgtgatgttcagataggccttgaaagataatctctgtagtgaagaggatgacgaagggcaggtaatgacatgattctagaaagcagatatcccacagcgtgcacagaggttagaaaacaggcatctttgagttgaacactagattaattagggaaggttgaagttactgttggtaagatctgatgagagagcctagaatgtccttttaattcacaagcagtttggggggcatggcttgggaagttatgtggttagtgttttaagaagcttagttaacatggtggtgacatacaggtaaaattgtagaaaggtctgtcaataggatggactgagttactggttctcagctaagggtgacttttgcaatcttggggaaatttttagttgtcacaactgggacagagagagatgagataggcctattggcatctagtgcatagaagctaggaatgctgctgaacatcttataatacaagggacagcttcccacaacaagaattatgtggccaaaaatgtccatagtgtcaaggttaagaaaccctagctagnttatgctatagtagcaaacaaccccaagttcttaatggtttgaaacagtaaagatttatttattgctcagactcgctgtacataactatacatcatccacattctggaatccaagctaatggagctaccactgtctggcacattactcatactgtattggccaggacttgttacagaacccctcttaaccacagagaggacagaaattgcaatcctgtcacatccccagaaaggggcaaactgtaatattgactaacagcattagttacaaccatggaaggctgtcttggagtagaggagttgtcagtaagagagaaaccagtttcttgctgattgctgttaattcttcattctttgccccttcaggaaagtaaaatcacagtatatacagaatgggattagaaagatgtagcataggctgggcacagtggctcacacctgtaatcctggcactttgggaggccgaggtaggaggattgcttgaagccaagagttgagaccagcttgag

SEQ ID NO: 239325 - DNA, 1895 bp, Homo sapiens
  misc_feature (1386)..(1386): n is a, c, g, or t
cgcccgtccgaagggtccgcggcaaatcattgagaacaaaaaggaaatatagtgttgtctcaaaggtgatcaataatcaccttctaggaaaatccaaaggaaggtcttaatcaattttctacttctctgaagcttcagcaatttgtgccacctttccctttgtggaagctcctctacctgccttctcacccccctttcctgcccccatacttgtcttttcttttttattattggcttcaacatgactctctttctgcaacccctcagctttcataaattaacccagaaattattttatagcctcctttgagagaagcccttattttcacttccggtgagaccttgaaagttaatttacctagatgctataagcagatcagcaggcatgaccacatactgctttgtggcaattccattgatgtctttatgtccagttatttgtatcaaagcatatgattatgaaggaaaaacaaaaaatacagggtctaggttaactcagcagtagccacatgcaggatataaaatattctcatcctgaaaattcttgcaaaacaatgtgtcctgttttgttgcagttgagtatgtactgattctgtaccttcagccttcatgcagtagaacctggatgacttttgtatgggagatacaaaacccagagtctcactgaattttgtgtatggatatataggtcagacatcagtgtacatgacggtagtacaagggtgaaggatgatggaagggaagttcattaataactggtagtaagtttttgtagctcagaagaaagagggacaagtagaaataattggagtaatatttaacactttaaggaagcgatgtgatgttcagataggccttgaaagataatctctgtagtgaagaggatgacgaagggcaggtaatgacatgattctagaaagcagatatcccacagcgtgcacagaggttagaaaacaggcatctttgagttgaacactagattaattagggaaggttgaagttactgttggtaagatctgatgagagagcctagaatgtccttttaattcacaagcagtttggggggcatggcttgggaagttatgtggttagtgttttaagaagcttagttaacatggtggtgacatacaggtaaaattgtagaaaggtctgtcaataggatggactgagttactggttctcagctaagggtgacttttgcaatcttggggaaatttttagttgtcacaactgggacagagagagatgagataggcctattggcatctagtgcatagaagctaggaatgctgctgaacatcttataatacaagggacagcttcccacaacaagaattatgtggccaaaaatgtccatagtgtcaaggttaagaaaccctagctagnttatgctatagtagcaaacaaccccaagttcttaatggtttgaaacagtaaagatttatttattgctcagactcgctgtacataactatacatcatccacattctggaatccaagctaatggagctaccactgtctggcacattactcatactgtattggccaggacttgttacagaacccctcttaaccacagagaggacagaaattgcaatcctgtcacatccccagaaaggggcaaactgtaatattgactaacagcattagttacaaccatggaaggctgtcttggagtagaggagttgtcagtaagagagaaaccagtttcttgctgattgctgttaattcttcattctttgccccttcaggaaagtaaaatcacagtatatacagaatgggattagaaagatgtagcataggctgggcacagtggctcacacctgtaatcctggcactttgggaggccgaggtaggaggattgcttgaagccaagagttgagaccagcttgag

SEQ ID NO: 239326 - DNA, 370 bp, Homo sapiens
cgttctaggtccagcctcctccccgtcccactaacctggatagtctagcttgagtgcccagtcttaaccagttctctcaaggcccccaggcacagaaaggagggagggagaaatgaaaggagggtaggctgaggtgggtggagcatctgagttcagaagttcaagaccagcctggccaatatggtgaaaccctgtctctactgaaaatacaaaaattagccaggcgtagtggtgggcgcctgtcctgtaatcccacctactcaggaggctgaggcatgagaattgcttaacccaggaggcagaggttgcagtgatctaacatcgcgccactgcactctagcctgggtgacggagaaagactcagtctcaa

SEQ ID NO: 239327 - DNA, 2452 bp, Homo sapiens
  misc_feature (772)..(772): n is a, c, g, or t
  misc_feature (847)..(847): n is a, c, g, or t
  misc_feature (854)..(854): n is a, c, g, or t
  misc_feature (869)..(869): n is a, c, g, or t
  misc_feature (872)..(872): n is a, c, g, or t
  misc_feature (879)..(879): n is a, c, g, or t
  misc_feature (919)..(919): n is a, c, g, or t
  misc_feature (938)..(938): n is a, c, g, or t
  misc_feature (1334)..(1334): n is a, c, g, or t
  misc_feature (1452)..(1452): n is a, c, g, or t
  misc_feature (2182)..(2182): n is a, c, g, or t
tatgtcatcttaaaaatctaaaatataacatggcacataaagccaaaaaaaaattttttttttttgagacggaatcttgctttgtcgcccaggctatagtgcagtggcacgatctgagctcactgcaaccttaacctcctgggttcgggcgattctcctgtctcagcctcccgagtagctggtacgacaggtgcatgccaccatgcctggctaatttttgtgtttttactagagacggcatttcactatgttggtcaggctggtctcaaactcctgacctcaggtgatccacctacctcagcctcctaaagtgctgggattacaggcatgagccactgtgcccggccaaagcaaaaaattttaagaaacacccgattcagtaacaatagctcttaatttagtttatatcattaaatgttttgatcttcatccttgttttaggaaacacaaaaaagcatgcacaaagaggcttataatttttatataatttaaaatatttcttcatttaaacagaaatgttctactctccaacttttcatgtgtacatacttaccatttctgtgggtgtgtgcataaaatgtaagcatcatttgatcaattttctgttgttgccttgtttatatcaatcttctcagttatgaaaactgctctggatgttgttttacagttatctctgtatattggctcataagtccttttgagataaatttcaagtcagataaataggggtaaaacgcaaagctcagctgggcgtggtggctcacgcctgtantctcagccctttgggagggtgaggcgcgcaaatcacgaggtcaggattccgagaccagcctggccaacatggtgnaaccccntctctactgaaaatncanaaacttngctgggcgtgctggcaggcgcctgtaatcctagctactcnggaggcagaggcaggaganttgcttgaacccgggaggcggaggttgcactgagccaagattacactactgcactccatcctggcgacagagcaagactccgtttaaaaaaaaaaaaaatacaggctgggcgcggtggctcacgcctataatcccagcactttgggaggccgaggcgggtggatcacgaggtcaggagattgagaccatcctggctaacatggtgaaaccccgtctttactaaaaatacaaaaaattagccgggcatggtggcaggcacctgtagtcccagctacttgggaggctgaggcaagaaaatggcatgaacccgggaggcagagcttgcagggagccgagatcgcgccactgcaccccagcctgggtgacagagcgagactcagtctcaaaaaaaaaaanaaataaataaatacaaaaatagcactcaaaaatgtatattcttatattgattcgtgtttatattttgttttatatgtgcatatttatgctagttttgtggatcttatatttccacagnattagagaatatattcgaaatattactgtgtttaaaagtatcttatttagtaactcaggtcactcataagtcagaaccagttgtcttaactttcttatttcatcttgggtcaaattaggaactctgcccttgactgcatgatcaatgtgttatttatttttattagagaaactgttgacattcagggatgtggtcatagaattctctctggaggagtaaaaatacctgaacccttctcagcagaatatgtatagagatttgatgttagagaactatacatacgttgtctctgagtcggaataacttaccttcagaatatctaatgtctaataactatgataccgtaccttgttttaacctgattgtctctcttagctgagagagccggacagactccattttagtttctttacttgcagcccctttacccctctcccttaagggcataaccagtgcaagctgactccaagcacatccaggaatacacttactgataagatactgaggcaagctgtaccagcagctcctgggaatgcgctcaaagcccctgcgtttatcactttgtgatagtttaagcccctgcacctggaactgttcattttttctgtaactgtttctgtaaccatttatctttttaactttttgcctgttctgcttctgtaaaattgcttcagctaggctcccccctccccttgtagactgaggtataaaaggaaatctggccgggcgnggtggctcacatctgtaatcccagcactttgggaggccgaggtgggcgaatcacgaggtcgggagatcgagatcatcctggctaacatggtgaaaccccgtctctactaaaaatacaaaaaattagctgggcgtggtggcggcgtctgtagtcccagctacttgggaggctgaggcaggagaatggcgtgaccccgggacgcggaggttgcagtgagctgagatcgcgccactgcactccagcctgggtgacacagcaagactctgtctc

SEQ ID NO: 239328 - DNA, 439 bp, Homo sapiens
cagcctcccaaagtactggaattacaggtgtgagccagtgtgcctgcctctcagacccagttcattgtaatagctagattctttgccggtttattctgctctaaagattctccttgagggaggtatgaaattagaacaagctgcctttctcttatttgtaaatattacactgtcttcctcaggcatttggcctctctttttaaattattgctctaaacatagcttttttataattgtgaaacatgctatgtaaatagagtaagatagtttacggaataaagtgaacacactcctgaacaacccccaagttaacaaaatgaataacaatagctttttataaacttttataactttataaaatagtatttctgtgagacccagttcattctgagcttcagttttcctcaagtttttcataggtttgtgctatttttatata

SEQ ID NO: 239329 - DNA, 325 bp, Homo sapiens
tttatagcagcaaagtcaaaataattaaaatagtaaaaggttattcccttccccatgtattttatacccttcctatatattaaggtattctgtaagtatttaatgatttaaactaagcttgtattctttgccttggtcatgaaacgattagaataaactccccccaaatagctcattgtctgtctagtctccaattatctctgtagagaaaagtactattgtaagtagcaaaaaatatttatgttttacttgagaaaccatatttattctttaatatgtgtgtttacacagaagcttgttctctgaataaaattgtgaaatgcta

SEQ ID NO: 239330 - DNA, 485 bp, Homo sapiens
tatccagtgtgctgggactgactgaaaggttgttatattcttaggtgggaccaataggaaaagcacatccaagataaaagtgctatatttcctctatacttctttgagttgcaccacacttgggttaatagctccattctaagcattacctacaaagaaggagactgagaaagagaaacagaaaggactaggaaccatgagaacagtgtaaaccatgcccactgaggatgaattataggaatgaaggatattttgcctaaaaaatagaagactgagggtgaaataaaagtcctttttagaaaactagacagtggttatgaggagagagaatccatatgcttggtgagcaatgtgtgaacatcgtggacaagtcagttttgcttaagtctgagcagcacgtttgaagtagttgatcggcccacactgtaatgggcattaccttaggggaagttaatggcctattgctatgctacaagtcttcttta

SEQ ID NO: 239331 - DNA, 381 bp, Homo sapiens
cagaaggtgacctgcaacatcgatatctgtcctccagagagaagaaagaaggttttcttcagaagggaagatcatgtgctaagcaacaggaatttggaggcactaggtaaaagagaaagttcaagaaaacttagggtttttcattctacaagaagataattggactgctaccttatttccatctcttgcatgtgtagccacagaaggagcagttgcattttcttttagcacctcatcttgactctaattctactctaaatgtatctgctatagattagcctatttttgtttccatatgtacctttacgataagactgataataaatatccagtgataatctctccatttattcaataaatatttattgaactacattgtat

SEQ ID NO: 239332 - DNA, 444 bp, Homo sapiens
tgcgactcatgagaatgatgttttcttctctggtacataaggttatgtaggtccaatccattgtgtagaagatcttttctcccttaatgggatgtacacttatttttagcacaagtataaaactactttaaatgaagtcagcctcagccagggaaatatgctgagtaataatgttgccaggtactataccactgagttgagtttgcaattcactgctattaatccctgcatgttagttctgaatttttactctttgcatacgtagaaaaaatggtgtttctcttcagagtcaaggagggaaaaaagaaaagttaaaagacacttataacacttttgtgtccacccctaaaatcagcatattgatctactatttttctaggtattgatggaatattgactcatatactttcatacaactgctaataaatatatatatatagactc

SEQ ID NO: 239333 - DNA, 455 bp, Homo sapiens
cggccaagaaccctcccgtagggcagagtgaggattggcgggagagaaaagcctaaagggactgtagcaattggctgccgccttttccaccgtaggaggatcgggctgacactcccagcgttgggacttattcagtggactctttagtatggttatttggatgatggttttgattcggagagtcaaaagccatggtatgtgagggaaaaaaagcagaaagtaaacattgtttctgctgaaagagtgatgaagcagacagatattatgcccctctgaactgatcccacccagggctcaaatttccaagagaactgtatgcttataaatattatgggaccagaagcaaggaaatgaatggattcttggttaaaacagaaaatcatgaattttactttacttttaatttatttcaaattgttcttactccagtagacaatagaattatgaatttctga

SEQ ID NO: 239334 - DNA, 737 bp, Homo sapiens
ggacaatgtgagggcccaagtcctatgggatcactgcactctgcctgagatgcccttaccctaaggaacaaacacagaatcaagttgtcctagaaaggccagggtgggtttgtcctggaggcacactcactgcgagcgtgctctttttccagtatttgaaggactctctttatatgatctgtcttaagagttctattagatgtagcttttagaagatcaattaactatgaatatatactataggcactgaatttagcaagtatagtactattctgttatgctgagcttcttctctctttgtaaatttgatatagtaaattcaaaatccatttcactaataagagttatttatttgtgtcttttctaatcatgcttgagaatcctattcgtcccagaaatttattttcctgtgttatgtgcatgtatgtttttttactgatagtgcctaaagttgtagaagttgataagcttacaagatctctgttgcaatctgtttttccttttaagttggctaaattatgtttattgcaaactcctcatgtatatatggatatgttttcaacttttttatttagcaaaagtaaaaactgctgctttctctgattaaaataaagtggaaacactttaatgtcatagagtgccactttttttgttgttgttgttaaagatatgccatgcatagcaaattgaagtttttggtactagctcattaaaagagtatgggagaggggagggag

SEQ ID NO: 239335 - DNA, 354 bp, Homo sapiens
gaaaaagaaaaatagtagacaactaaaacctcctaccaagaaaacctctgctgttttggataacacgtatgccatattattccactttgatggaaagatcaaaaaaatgcaaaggaattcatgtgtgtggatggcttgagtgcatccacccatctcccaaagcagcgtgtttccaaagggcagagatagcctcatgtcatgcctcttttgtttaatttcctcaagatgcatcattctccaaggagatgtgctcaagttctctgtctctcccacattgttttcaaacctggttaccactgaatgcatttctaaatgacaaggcgactgggtctaaatcttgatatgttgagagaa

SEQ ID NO: 239336 - DNA, 501 bp, Homo sapiens
tatggaaatagtgatgttgcatgactaatatttttatttacccattcccagttgctccactgtctcttttagcttgatgctcaagttccagcactatccagctcctagttgttcagccttattttcttccatttcccccagtatttataaactctatacactatgtgctatacttgaatagctcactatttttattcctccacacctttgttcatgttgtgcctagaacatttccttctcctctactgcccttccatcaccagcctggtaagcacttagccatacctgtcaaggtccagctcaggtatcactctatgaaacctttcagagcttctcagaaggaactcatcctccttttactatattcacttaattctttacatagttcttattatgcttatcagattgaatcataattatttattcccaaaggtagggactcttatttatctttgtgtcctcagcatctagccttctgcctggcaattcttaaatcttctt

SEQ ID NO: 239337 - DNA, 309 bp, Homo sapiens
cttacttttcgtaataacctcgtgaaggaggtattcttcccactttatagataaggacactgaggctcagatgctaaaaggcttgtttacatttgcacatctagagggtgactccaaagccctgttcctgccctgtagcctttgcagatttcaaccacccccgcccatgcttcctgctcccccgccacattgtgacagatgaagccaccactggtcaagcgtgggctgcactcagttggactgaagcacacatgtctgaggagggacttgggccaggggctgggttggagaaattctagaaaaaaaaga

SEQ ID NO: 239338 - DNA, 554 bp, Homo sapiens
taggataaattgctaagtgtaaggttctcaatacttctcccaatatttctttttgtttctccaaaggagagctctctcacaggcctatttttaatgtgttgtataacaaaagaaagttttaaacagagccaaaacaaacatccaccactgcacttagggatgagcagcttcttttcttttgggaagaacaatctgttaatttcccacctccagtgttgtgtcaaccttttggtcagagaatgtggaaatgatttaccaagacagaagttactcccttcttaggtaactagattcatgaatgagcgtggatttcatattctgccagtattttttctattctaacattataataaaaagaaaagaaaggcaaaataacttatgaaaaagtttccattttcactttccatagacttttctgttatttgatcatatgtagatatgattattatgtatttccagccagagttgggatacaattctgttattttaaaatattgcattgaatattcttctgtgttattgtcttctaataaatattttcaatgaccatatat

SEQ ID NO: 239339 - DNA, 205 bp, Homo sapiens
gagatatttaatatgctttttcacgggaagcgtctgtgtatgtgcgtgtgcgcgtgcgcttgcgtgcctgtgagtttagggatgggtgcaggctgcctgcaccgtttcagcacacggccttgtggacacagcccaaatgagttcctaaagatacccagctctctgcctaaatcctctgtatgcaaataaaggtctctgcttgtct

SEQ ID NO: 239340 - DNA, 338 bp, Homo sapiens
ggaaatatgatagtcttcaaataatactgatagttatggagaaaattgactcttcagtctctcaggaaagtgaggaaaattctggcttccatggaagaggccataggggatgtcagttttctactataatgaaaagctggagacaagaaatttggactatgctatgggtaaagaggtgttttctcttaggtataagaaggggtcctggagggtgggaaaaaaggagtcccaaagtagatgagaaagtaagaaaatacatcccttcatgtgtgcagaaatgcatgttgagtgatttgtgaaatactgtggtttatatgtcaaaaacataaactctagaa

SEQ ID NO: 239341 - DNA, 404 bp, Homo sapiens
gaaaatatatgcacatcaatttatgacttgtgtaagtcaattactaattcaattactaatgggaaattggatgaactcagtaaaactgtcttaactatgtctcttgagtttctttttctattacatgctaaattacaataaaaccttgactacctaaactctcagagattcagttttttttttgttttgttttttggttttttttgagtagttgagtatttgtttagaaaacattgctgttgtctgagttgttctgtcacagtaagaaaaatatttaggccgggcgtggtggctcacgcctgtaatctcaacactttgggaggccaaggtgggtggatcacctgaggtcaggagttagagaccaacctggccaacatggtaaaaccccatctctactaaaaata

SEQ ID NO: 239342 - DNA, 377 bp, Homo sapiens
atttcagtgtgtttttgtagtggctggtaatggtcttttcttcccatatttagtgttttttttaggacgtcttgtaaggcaggtctagtggcaacaaatttcctcaggatttgcttatctgaaaagaatctcattttcctttcattgataaagcttagtttgctcaaatatgagattctgggttgaaatttattttctttaagaatatccaatattgggcagggtacagtggctcatgcctgtattcctagcactttgggaggctgagggggggtggatcacttgagctcaggagtttgagcccagcctgggaaacatggcaaaactcatctctacaaaaaatacaaaagaaaaaaaaatagccaggcatggtcaca

SEQ ID NO: 239343 - DNA, 1090 bp, Homo sapiens
ttttttttctctagagaaactcactgcagagctgggtaagttctgggtgcggggccacagtgctgcctgtcagccggaccctgtgcctgtgcagtgggaggaggggctccctttggacagcggctggcaactatctaattctaaaccatccctgtgagcctccacctcttcccttgctaaggggctgaaaggatggctgcctgccaccgtgcagctgcccgagaccctctgcacagaccctgccagctcctcccctgcaaattagacaattcagttaaaattcatcataaaacgtttactgtctccggttcatcttcttaaaatatccttttctttttaatgcaaatggcactaggaagggtggcacctttaatttgcaccaaaatggaaataatttctcagatccacttttctccccagagggactcagagacgtgaaaccatgggatgtgtctctgtagagaggaagagagagtgaacccaagggagggggaatggaggaaaaggccatcatggtgttggggttgggggggcaattcagatgaaactgtaaggttgggaaagcttgtctggcagtctacctcgcccttcaaggggaatgagaaaaacatagccctaataagtcattaaggctatagtctgaattgtaagtcataacactatagcatgaatgcctctcccaggagcatttacttttgaaagagcttgacattgggtggacagatcaaaggaatgcatttttagtagcaaaatgttggagtccttggtaattatttggggaaataattgggtgtgatgtccttccagtccttcagataacgcacccggtgagtgaccgtgaggctcacgtaggcggccctcagtgcctgcacttaggcgggagctccgccccaggaagcttgtgatttcaggcagaaggaacaaccccaaccctgggaagaggcctgtcagtactaagatctggtatcccttctaggctgtgtgcagatttccacctttgagctaagataggatgaggcataagagtcctgcagatgggcctctttttgagggcaatgaaggggcaaagaggaagctgtaaaaaaaaaaa

SEQ ID NO: 239344 - DNA, 319 bp, Homo sapiens
cctctcggtgctcagcggcgcctggaccgacacggcccccgcgggtgttttccagacgtgttcgtacccggagcctctgcgtggaagagcgcgttcgtcgcgaccctgccgctgctgttggtcctcgcggcgctggcgctgggcgtcctccggaagcagcggagaagccgagaaaagctgaggaagcaggcggagaagagacaaggctgtgtgcagatttccacctttgagctaagataggatgaggcataagagtcctgcagatgggcctctttttgagggcaatgaaggggcaaagaggaagctgtaaaaaaaaaaa

SEQ ID NO: 239345 - DNA, 405 bp, Homo sapiens
ggggcctgtagggccttcaccatcttccacctagaggtggccccacccccaggaatgagcaccgtgctcttgagcctgctgggccagtcctggggcggcaggctgctgcagggtgagacctagtctggtcctttcttcttctactcatgataccttatgatgactagtaatggtggcttcccttggagacagaaactcccacgaggcctgggtagggccgggagtcctctctctccaacgccttccctcaacccgggaggcttcttggggtggaacctggagagctggacagccatgctgtcatttctccacacgcatacatcctgccctcgtctcccacttcctcctggttggtttttgaggagagatgagagaataaaaactaaaatacagagagtgacataa

SEQ ID NO: 239346 - DNA, 647 bp, Homo sapiens
tcataacaactttcagtatcagagtaggctttttttttgtttactatagagactttctttgctacagagtaggcattattattttcacatggcagatgaagaaactgaggccacacagaccaagtgacctgatgtaatttcaaactagaactttcaaaagtgttttgtgcaatggcattattttcagaatgaacttagcttctcaaggcaactacacaaagcagagctgggaatgggagggaggagcacaccagcactagcggtatttaaaatcagccacttccaatgctagtcccttctcagtcagcaataggaatggactttggggaaggagttttgccagcagcctcaacctcaggccagattccaatgactcctggactcctcaaaggcccgtgagtcaatgagagagagcggaagttatgttttcccaaatatacctcatcagggtcctcaatcgactactaaaccaaattgtccatcgaatttattaccacttctcctgaatatacaggaatagatctgaatccagggattttgaactcaggaggtctaattcttacccatcttgttacattggcttcaaaagggaaggacacataattcctcattttgttttataacgatttagtaaaatagggatcaga

SEQ ID NO: 239347 - DNA, 1074 bp, Homo sapiens
atgcacattaaaaccacagtgattccagtttacactcacaaggatggtcagaacaaaaaagccagataacaagtgttcgtgaggatgtggagatattggaactcgcatacattgctggtgggaaggtaaaatggtgcagccactttgaaaaacaatttggcagttcctcaaaaggttaaatataaagttaccatatgacccagcaatttcactgccacatataatatccaaaaggaatgaaaacatttacacacaaccttgtacacaaatattcatagcagcattatttttaatagccccaaagcagaaactcaaatgcccagctgatggataagcaatatgttgtatctatacatacaacatattgtatgtatatggaaatggaattgtatgtctatggacatattgtatgtctatggaaaatggaatattatggccataaaaaagaatgaagtgatgatatatgcttcattgatgaaccctggaaacattacgctgagtgaatgaaatcagacacaaaaggctgcatattatatcattctaattacataaaatgtctagaattgacaaattcatagagacagaaactagtgttggttgccaggggctgaagggaatgggaaaggggaatgacttctaatgggtatgagtcttcttttaggggagctgcataacggaatattccaaaagccacacattaaaggggtgagtttatggtatgtgaatgatatttcaataaagttgtgattaaaaaaataattataccatcctaaacaaaacaaagggggacgacaaaaatatcccgagagggcccaggttaacggagaccgggatcaggcaaagggcgcaaagcaggagcataaacgaacgccacggcgcccgcttaacagccgtggaggtgaaacacaccccggaccttccgagaaccacccgcggggcgcaatggcaacacccagaacgaccgcgagacacagcgcaaggaaagcaacgcacggaagcgaaaaagagacaacacaccgacgcgacacaacgacaagcgcgcgcagcgcgataacaagacgagaccagagcgat

SEQ ID NO: 239348 - DNA, 649 bp, Homo sapiens
aaggtatgcagagccaacagaacattttattcggaatggcagctggtggtttctgttatctgtgaatcattgtgaagtctgtctgaggcagagaggagacagctagccgaattcccctttcgcaaaaactgattcataacattgtaaagctcacagaaaatgcattttgtatcacaagaacacataaaaatctctattttttgacataaaggctatattgatgaactttaaaataaaaagaacctgtaaatgtaaaaccataaagaaacattttttaaaatagtatgaataatttatgggcagttgaatacagcttttgttgctttgtaggtaactcacttataacaattgcataaatggtaatgcagttgtgtgtaacaaaggaccattaattatgacacttatgacaatgataacataattaactattttttgagctgctactatttgctgccacctaacatacattattacatttattccctgcaacaagcctgcaaggtaggtattattctcctgttgaaaatgatgctgaagttcagtcacacaaacaccaagtaccagggccaaactgcaatccatatccccctcacatgaaagttagtgtggtttccactctactgttaccattgatgagacatggtaacca

SEQ ID NO: 239349 - DNA, 363 bp, Homo sapiens
tgttatgtctaagaattctttgcctagccttagattccaaagatttcctttaatcgttcttctataaaatatttatagttttacattcaagtttatcatcctgtttgagttatttttatataagatgtgagatttaggtcaaggattattttttggcctttgagtgtctagttgtttccacttgctgaaaaggctagctttcctccattgaattgcttttgcacctttgtcaaaaatcacttggtcctatttatgtggatctatttctggattttctgttctattctattaatatttgggtctgtccctctgccagcaccacacagcactccagcctgggcgacagagtgagactccgtctca

SEQ ID NO: 239350 - DNA, 453 bp, Homo sapiens
tgagaacgaactcttgaaatatgttgttaatttctgtgcattttacacatttcaaaacattcttctgaggaggggtccagaaggccaaaagggtccatggcagaaaaaggttaagaacacctgttctgtactttgtaccatgtggctacaaatataaaaacagacgttaagccgggtatggtgatgcacacctgtagttccacctacttgggaggctgaggtgggaaaatcacttgagcccaggagtttgaggccagcctgggcaacagagcaagaccccatctcttaaaaaccagtcagcacttgactagtcagttagtgggggaaaacacaggtacagtaaaaggagtcaaaattacacttactgggtacttgagaggctgaggcaggaggatcacttgagcccaggagttctaggccaacataggcaatatagtgagacagtgtctctta

SEQ ID NO: 239351 - DNA, 194 bp, Homo sapiens
agccaggcatcctctgctgcactgggtgtgcctgctttccctattcaaggcagcttcatgtgactgtggacactgtacgccatcctcatcaaagcgcttggagtaggggtgcatggaatggagtttctttcttacaatgggggtctgaaatccagggtttccacaccagggaaaaataaagattctgtctctta

SEQ ID NO: 239352 - DNA, 447 bp, Homo sapiens
cagtcccccacactccaacctcattctctaggagccacccgaagaagattagcatcagcacacggcacggttagtaaatgtgtgtgctgttcaattgtccacatttatggatcaatgcattcaaatatgacatttactttaatgcacctcgttttttaaaaacggtattgctattcttccatactacatatggcaatttttgtctttcaaaacttctatactttggtgtagcagaatacatctagattttgtctttcaaagcttctatactttggtgtagcagaatacatctagaaaaacatagtagaagattatttggatgtaaaaggacataagtataacaattttattacttttctaaaaaaaaggactggatgtttttgtgtaagtattatatcattattatttaagtaatattatcaaataaaatattgcaacaggaactgc

SEQ ID NO: 239353 - DNA, 1769 bp, Homo sapiens
  misc_feature (63)..(63): n is a, c, g, or t
  misc_feature (1130)..(1130): n is a, c, g, or t
  misc_feature (1647)..(1647): n is a, c, g, or t
aaaatgacttccctgggaaccagaacatccaggttggcctcaaacttgctgccaaacaggaantgtggcaagccggagaggattctgatgcttggaagtgggcgaatgttttgattttcaagcaaagaaaaagctagcttcctagaattacaggccagtgaacttgtcatcattcccagagagtgctgaaaagaattaattaaatgatttttcagctgttaaaaagggatcctctgccccagcagaactggcagagatccctaataacagttcctgccaaaaaaaaatgattgcagctttgaaaaagagggttacttcaatgatgaatgagaaagcgttgtagatgctgtctcaggattttggtaaggtatttgagaaaggcactacatttctttgtgaaaaggcaggagaaacagggcttggatggcagtgcagtcccacaggctcatacccaccatgctactcaaactaccgattaatggacctatgtctacctggggtggagggctgcaagggtggacctcagaccccaatctcataatgaggtagtgagtgaggcaagacacccccttacctggccatggcttaagagttgtagagcagagatcagaagccacagccttggtcagagggagggaaacaagcccagctggatgaaaaaaaaggagcatggagacaaaatggggggtggggagcaagggacactgaggacagctgagaaccaggggctgcaggtctgccctggggaggcaggcaggtgggtttcaaaggcggggcaccatcgcttgtggaggtttgtcattctcagtgcactcttgagattgtcacagatccatttaaaagggctgaaaggagacagagatttgtaacctcagacctgccctcctcaactgatttattaccagtgtgaatgaggacgtggatataagacatgttcattaagcctgcaggtgatgtgaaggtggaagagagaactaaaacgttggatgacttcggtacctaggtccaaaaaactcagttgttctgagtgtgtgataaaatgctatttagtcgtgacccgtgaggaggaggtagaggctggagagtcagtacagattaacgtggctacaaaagcgtaaggaagacttagncctctgtagcagaagaatatagttcaagctgagatgggtaacaagccttaccttaacaatatttctctgtcccccacaagtcagaccacatctgaaattttaaaatgagctccagtttccatcactgaagggcaaatcttgagtgtatccattggagaatgccgtagatactttgagatttcattcatatatatatatggattaatatgctcaccctggagagcatttgagggattttaaggccactggcttgaaataagcgacgtgcacctgagggattggatgtatctttggtaacaccatagggcgtaggtttgagcttcttagcctttggcgctgtctgaaaagaaaatggaggccttgggccgggtttggtggctcattcctgtaattccaacactttgggaggctgaggcaggtggatcacttgaggtcacgagaccagcctggccaacgtggtgaaaccccgtctctactaaaaatacaaaaattagccgggtgtggtggctcatgcctntagtcccagctactcaggaggctgaggcaggagaatcgcttgaacctgggaggcggggattgcagtgggctgagatagcaccactgcattccagcctgggcaacagagtgagactccgactc

SEQ ID NO: 239354 - DNA, 358 bp, Homo sapiens
ttgacgttttaataatcaccattcttcctagggtaagatcatatctcattatggatttaatttgcatttccctgatgtctagtgatgttgagcatttttccaggtatctgttggctgcttgaatattttcatgtgagaaatgtctattcatgtccttagcccactttttaatgggattatttgtttttttattgttatttgagttccttgtatactctggacattaagttgacatattttctcccattcagtaagttttctcttcactctgttgtttccccttgttgtatagaagctttttagtttaatatgatcgcatttgtctatatttattacagttgtgcttttgcatccttag

SEQ ID NO: 239355 - DNA, 792 bp, Homo sapiens
agcggatactaaggacgcgacttcttgtttggagagggtggagctttggagtgagacccaagaggccaaatcccaaagagaaaaataggagcctaaataaggatcaggaccaagggaagggaatcgtgaaaaatggaagacagtagcacagacacagaaaaagaagaggaagaggagaaagatgaaaaggatcaagagcccatttatgccatagtgcccacaattaacattcaagatgagcggtttgttgatttatctgaaactccagctttcatttttctgcatgagttacatgctatgggaaaacttcctggaaccagaatggcagcgttaaaagccaagtataccttgctgcatgacgccgtgatgagcacacaagagtcagaggtccaactgctacagaatgccaaacgtttcactgagcaaatacaacagcagcagtttcacctgcagcaagctgataattttccagaagcattctccacggaggtctccaaaatgagagaacaacttctcaagtatcaaaatgaatataatgcagtgaaggaaagagagttccataatcagtacagattaaatagcttaaaggaagaaaaaatcatcatagtaaaagaatttgagaagataacaaagccaggagaaatggagaagaagatgaaaatattgagagaaagcactgaagaattacgtaaagaaataatgcagaagaaattagaaattaaaaatttacgagaagatttggcatctaaacaaaagcagttattaaaagagcagaaggaactagaagaattg

SEQ ID NO: 239356 - DNA, 617 bp, Homo sapiens
gcagttattttctacgctacctgtgcgccataaggaatttcaaaggaatattaagaagaatcgtgaaaaatggaagacagtagcacagacacagaaaaagaagaggaagaggagaaagatgaaaaggatcaagagcccatttatgccatagtgcccacaattaacattcaagatgagcggtttgttgatttatctgaaactccagctttcatttttctgcatgagatgccctggggatggagcatgcctgagatactgtctctaaatgaaagtgatctccgccctgtcctttcaacctcacgttcatggtaagtagaggtccaaatgcggagatggctttccaaagtatgagacagtcagcaacagtggtcccagtgactcaggtgaaaagccaaggtttggagagtcaataccactgttagttcgtgggtggagtaggcgattaagtctgtggaatttcacatgtatttattaaagttaattcaagtaatttggatggtgaggatgggttctacttctatctgcttgaattctaacttcaggtaaaagagaaagaaatatgaataccttcccttagtggcatgctaaaactctccccttaaaatattttttgtgcc

SEQ ID NO: 239357 - DNA, 547 bp, Homo sapiens
agcggatactaaggacgcgacttcttgtttggagagggtggagctttggagtgagacccaagaggccaaatcccaaagagaaaaataggagcctaaataaggatcaggaccaagggaagggagtgaggctcagtgtcatcaaggaacagccaatccaatgagattgacatgagaaatgatacatattcagcagaagatcagaccctaaaagcatgacaattgcagttatcttctctggcaagagaagagtgtgaagacactcctaaatagccacatatggattaattttattttagaatcgtgaaaaatggaagacagtagcacagacacagaaaaagaagaggaagaggagaaagatgaaaaggatcaagagcccatttatgccatagtgcccacaattaacattcaagatgagcggtttgttgatttatctgaaactccagctttcatttttctgcatgaggtatatttttctttatatgttactacagtaaaacccaactcaacatgtacttaaaaattcaaatgaagccaatatcattatcaa

SEQ ID NO: 239358 - DNA, 448 bp, Homo sapiens
gaacgtgctttccatgttatagagtgaggctcagtgtcatcaaggaacagccaatccaatgagattgacatgagaaatgatacatattcagcagaagatcagaccctaaaagcatgacaattgcagttatcttctctggcaagagaagagtgtgaagacactcctaaatagccacatatggattaattttattttagaatcgtgaaaaatggaagacagtagcacagacacagaaaaagaagaggaagaggagaaagatgaaaaggatcaagagcccatttatgccatagtgcccacaattaacattcaagatgagcggtttgttgatttatctgaaactccagctttcatttttctgcatgaggtatatttttctttatatgttactacagtaaaacccaactcaacatgtacttaaaaattcaaatgaagccaatatcattatcaa

SEQ ID NO: 239359 - DNA, 351 bp, Homo sapiens
aaaaaaaaaagaaactccacagaaattccagacaatgcgatgccagtgtcccaacagcttaggagtagcatcaaagagcctgtccctgccaggcacggtagcttacgcctgtaatcctggcactttgggaggctgaggcaggcagatcagttgaggtcaggagttctagaccaacctgaccaacatgatgaaaccctgtctttactaaaaatacaaaaattagccgagcaccccagctactcaggaggctgagccaggagaactgcttgaacatgggaggtggaggagattgcagtgagctgagatcagatcacagcactccagcttgggcaactgagcaagactccgtct

SEQ ID NO: 239360 - DNA, 1226 bp, Homo sapiens
gtgcctaactcccagtgttaggaagctatgggaagaatccaatattctttagttgttgagaccagtttatatgccatgggattttttaaattgatacataataattgtatatattcatgggatacaatatgttttggtacatataaacattgtagaatgatcaaattaggctaattagcatatccatcaccttaaacctttattattttttgtgagaacattcagaatcatctcttttagctatttgaaatatgcaatgcattattgttagctatactcaccttactgtgtgatagagtaccagaatgtattcctcctacctaactgtaacattatacccattgaccaacctctcctcatcttcccctccctcctgttctccccagtctctggtaaccactatcaagttttttagatttcacatatgagtgagatcattcagtatttttctttctgttctcagcttatttcacttaatataatgttctccaggctcatccatgttgtcacaaatgacaggatttaattttttttatggctgtgcagtattctattgtgtatatatgccacattttccttgttaattcatttgttgatgggcatttaagttgattccatattttcgcaattgtgaatagtgctccaataaacatgggagtgcagatgtctcttcaacctactgatttcatttcctttggctatatacccagtagtgagggtgaagattgctggatcatatgatagatttatttttaattttttgaggaacttctgtactgttttccataatggctgtactgatttgcattcctaccaacagtgtgtgagagttcttctttcttaccatgtaatagtttcatagtttatgtggggaaataaaagtagctattgtttctagttttagatcttgaacagactataaaaaggtgcaatatattaattcacacttaaatcacacaaactcaagttattcttaggtaaaatatcgttgcttgttaattgcataaagtcatctagtttctttagtgagaagagattttatctttctaaaatattaacaatagctttatacattttctgtcctattttctgcattgtactgaacgttgtttccctttttctggtataatattaaagcaggatgaaaacttatttgttaccttcaaatgaaccaactctaatgtattcataccaaaaataaagatttttttgcaataggaatctaa

SEQ ID NO: 239361 - DNA, 294 bp, Homo sapiens
ccagcctgacaacacagagaaaccccgtctctactaaaaatacagaaaattagtctggcgtggtggcagatgcctgtaatctcagctactggggaggctgagttaggagaatcggttgaaccctggaggcagacgttgcagtgagccgagatcacaccactgcactccaacctgggcaacaagagcgaaactccgtctcaaataaataaataaataagtaaaaacccatttacccccacaggcttgtgagactggttggaagaagtgctgctaggcagggcctgtgtgtttgga

SEQ ID NO: 239362 - DNA, 2698 bp, Homo sapiens
  misc_feature (1685)..(1685): n is a, c, g, or t
agacatttatttctcacagttctggaagaaagtttaaaatcaaggtcttggcaaatttggtttctggtgagggctgtctttctagcttgtagatgcctgtctgccttgtcttcacatgatctttcctaagggtgtgtgtgtgtgtgggtgtatctgtgtgtgtgtttgtgcgcacacacacgcgtgtgcacagggctggtagagagtgagctctctggtgtctcttattgtttctttttcttttttcttaccttgttattttctaatctagtcttcagagagatggtgtctcttcttataaaggcactcatcctaacagatcagtgctgtacccttgtgacctaatttaaccttaaatacttccttagaggccccatctccaaatgcaactacactgctgtttagggctataacatgaattttggggtatacaagaattcagttaataatacttgattaccctttatctgcccctgagagggtggttcatcttacccttttttagtcaaatcacatttggtaacatgaattgaggtgggtcagctatggtggcagactcactaagagtgtcatcctcaactatcctgtattgcttgtggcatacctagacattctatggccgaaagagcttgcatgtttaaatatttctatagttttagtccttggcacatggacttgagtccatttctctgtcaaatggcgatagttgttcctcagagttgttactggtcataatttaagggaaaatatattttgaaccataagatgcaaagattgttttttataaaaatgtacaatgttcctttttctattatttgtagagcttaaggacttgaatccagatcttctaattacaagtataagactctaagtagccagacatacccatttttttcaggataattggaattctccatagacaagcactctaggggaagttctggcaagttttatttgcaccatgtaatgcattgaaataaattgtaccatctaataaattgaaatgctgtgcgtttagccctcaagctctgttaagggacagactgcctcctcaagtgggtccccggcccccgtgcctcctgatggggtgacacctcccagcaggggttgacaggcatctcatacaggagagctccagctgacatctggcgggtgctcctctgagacgaaacttccagaggaaggaacaggcagcaatctttgctgttttgcagcctcctctggtgatacccaggcaaacagggtctggagtggacctccagcaaactccagcagacttgcagcagaggggcctgactgttagaaagaaaactaacaaacagagaaaggaatagaatcaacatcaacaaaacggacatccacacaaaaaccccatccgaaggtcaccaacatcaaagaccaaaggtagataaatccatgaagatgaggaaaaaaaccaatgcagaaaggctgaaaattccctaaaccagaatgcccattctcctccaaaggatcacagttcctcaccagcaagggaacataactggttggagaatgagtttgacgaattgacagaagtgggcttcagaaaatgggttataacaaacttctccgagctaaaggagcatgttctaatccaatgcagggaagctaagaaccttgaaaaaaggttgcaggaattgctaattaaaataaccagtttaganaagaacataaatgagctgatggagctgaaaaacacagcacaagaacttcatgcagcctacacaagtgtcaatagctgaatcaagcagaagtaaggatatcagattgaatatcaacttaatgaagtaaagcatgaaggcaagaatagagaaaaaagaatgaaaaggaatgaacaaagcctccaggaaatatgggactatgtgaaaagaccaaacctgtgtttgattggtgtacctgaaagtgatggggagaatggaaccaagttggaaaacactcttcaggatgttatccagaaggacttccccaacctagcaagacaggacaacattcaaattcaggaaatacagagaacaccacaaagatactcctcgagaagagcaaccccaagacacataatcatcagattcaccaaggtggacatgacggaaaaaatgttaagggcagccagagagacaggtcagggaagcccatcagactaacagcggatctctcggcagaaaccctacaagccagaagagagtgggggccaatattcaacactcttaaagaaaagaattttcaacccagaatttcctatccaacctagctaaattccataagtgaaggagaaataaaatcctttacagacaaccagatactaagggattttgttaccaccagggctgccttacaagagctcctgaaggaaacactaaatatggaaaggaaaaactggtaccagccactgcaaaaacatacaaaattgtaaagaccatcgacactatgaagaaactgcatcaactaacaggcaaaataaccagctactgtcataataacaggatcaaattcacatgaaacaataattaaacttaaatgtaaatggactaaatgccccaattaaaagacacacactggtaaattggatagagtcaagacccattggtgtgctgtattcaggagacccatctcgtgtgcaaagacacacataggctcaaaacaaatggatggaggaatatttacaaagaaaatggaaagc

SEQ ID NO: 239363 - DNA, 539 bp, Homo sapiens
atacatgctgcaatttctatttggcatgttatttataccctcaacactcccttttccccagaagaaataccttttagtgaatagaatatattcgataaatacttattgaatgactgtcctttgaatatcattcttggaataagaaaatgttgtaaaggaatcataatggtaacatatagcttttatcttcctggagtcctctatttttttctctctggttcattttgggattacattctgtgatttgctacttattttttttaggcccctgatctttatcatgggagcctaaaatcatgttagaagtatgcattaactagtcagcaaacatttcccaagcacagaatgtcagggactggactgttggtcctgctgatacaaatgactctcaggcacacagactgatttcagctgcaggctaggagaatgttttttgttaactacatgcactttttttttgagacttgcactaaatctttttaaaaaggttatataacatttttaatgggaaatgttcctagtatttattgctatgtaaa

SEQ ID NO: 239364 - DNA, 484 bp, Homo sapiens
tcttcccaccactacaaatcattattactactactttggcaaatttccttccagattttaatgcattcaaaaaatacataattatgctaagtctttgtcttgatactgctaatccatgtatactttatataataatacatagaaaatattctatataaaacatatattgacaaggactatatactactatagagattgtatacaaaatacaactagcatgcattttatatttctacccttttcattcatcataagtaaatactctatgcacataaatgttgcatagtgttccctacagtcgattttccatcatgtagttaacaatttttttttttttagtgtagtagttaagtacgtggactctggacggttgggttcaaatgtcaacacactgattgtgtgaatgtgggcaagatgtttaatctctgtttgtctcagtctgttaatctttaaaataggtctaagagttatatgtagcctgtta

SEQ ID NO: 239365 - DNA, 2044 bp, Homo sapiens
caaacttgcaaatattaaaacctattcatgtctaatacttttctacttggtctatttccatgtcctgtcaatgacctatcaattaccctattcaattacccatgtcacttgagatttctcccaccagaatttaggttgcatattttcacagggcaatttattttaaaatcagaatggtccataaaactaatagctttgtgtgcacagacctaaaagatttgtagtagctctgcagctgcatttttgaacatcaatagttaaacgatcaacataaatgttaaagaagtaaattaactttcagaatttcacgtgtgctctagcattcaccattgaccatgctggaagaagactttgaggtcatttcatccaaccctctcattttacagatgaggaaaacaggactaattgatagctagcaatactaaattatagctcttctaaaactagacagcagcgtcagtaggcttcttcatgtgctcaattactgtatggattccacgagttgatgagcgtgctgtgaccttgagcatttacattctgtggttttcaaatgtttatgtttctaatgtggtatttgtaaacctgggccccagtaacctttaccactgaggctttgccaatcccaactctgggcagcccacctcttccatatgcagcagtgcttgcaggctgttccgcctgggcaaagtcatgttaggtgtaagcaaagacgtgaactagtgttcatgcttgaaaacctcacagagacctgcctgctggctgaatcctttcttcatctcttgttgcctctcctacatgtgactcaaaagctagccaagtttgttccacatccttcagtttgttcctcttacaccaaagtgccataccatcatcccctttagtaagatcacacttctccaatttctgtcctcctctactcctcaataaacaggaagatgctgtctgtggaaatgcacgtggagctcttgcacacgttttctataacttgtcttcattccacttccccacaactagaatataagcctcatgagagcaaatgccttgtctggactgttatctcccctgtgtctagtatagtcaaaaatagtaggtgatgggtaaatacatgtgcaataaatatatcctttcatctttccttcctatcttagggaaacaaatgtccctttcttttctgtcttacctccctaataacatcagtacttctttgtccctcctccaatattgacctctgaatcatgtcctccttcttgaaatcttgccttcttaattgtctgcttttattaatttacataggtgtccagccatctggctggcctttctccagttcttttgctggaaaatcctctcctcttctctttaatacaggcagcctctaagattgccccttcagttgctttcttcccttggtatttttcttttttttgcagttctcattgactcatatctggtcaacttttacctctaggtacaatgattcttcaatttccacctccagccccaaatttaattcctagatatggacatgcttggagccaaccccaccatgtcacctcaatacactctgcttttcatccaaatcttcctttccatccaggcagcaaactccagagtcctttccactcctgttcaacctttctacttcacatatgacaggtgtgtgaattttacctggtggcaaaccaacgtggtgattctcttgaattcatgtattacttagacaaattcaacagcctcctaaatgatctccttctagctgctctcctccctctccatctgtcttgctagatgagcctggcttcttttttcctgcagaaagatcaaacttttcagtttaacccgcatcaccttttaaaattcattgccagtgtagttcccaatatggcctcatactgacttcagataccccagtgtatctgaagaaagtaatcccagctacttgggaggctgaggcatgagaattgcttgaaccggggaggcagaggttgcggtgagccaagatcacgccactgcactccagcctgggcgacagaccaaaactaccgtc

SEQ ID NO: 239366 - DNA, 465 bp, Homo sapiens
gcacttacatggagctaagctagcctggtggcattacatggaggaatatagtcctagagccacaccttttacctccaaccagcaacctctgtctcccataaactcacttccatcatctggaaaatagaaataataatcatattgactgtatcatgttttcatgatggtgaaaggatactgtgtaaagaatatgcttacctcagtgcctggcacataaaaatcattagctgtcactaccactgttgctattcccattactgctactgttatttgaagaaagcagaatagtgactgtgccttttgcccaaatcttccataggagatagccagggcacggggcaagctgagctcatgggacctgggcacagggatgcaacagggctgccttcccaggtgcagaacatggagtcggggctcatacaaaaggagatcaaggaataaaaccagaatgacaagccaagcatg

SEQ ID NO: 239367 - DNA, 1078 bp, Homo sapiens
agaatctccctccgtcacccaggctggagtggagtggcgcaatctcgtctcactgcaacctccacctccaggttcaagcaattctcctgcctcagcctcccaaatagctgggattacaggtacgtgaccaggcccagctaatttttgtatttttagtagagacagggtttcaccatgttggccaggctggtcttgaactcctgacctcagatgatccgcccaccttggcctcccaaagtgctgggattacaggtgtgagccaccaacgcctagcctcagagacttctagtaacatcatatagttagtaaaggggacagctggttttcaagtaaaggtctgtttgattttttctattatagaaatcctttcccctttcttaatgtctctttggtattcttgaaaaaaacaaaagagagccaacaaataaaagtaattcctcagaatttatgctaattttgtagcaatataacttgcgcatttgactgctgcttgatttttaaaatcaaatattttcctacattgctttttaagggcaaggtgtgtcctgtgagtgtttctcactgttagactagggcagaagctcaacaataacaaaaaaggctggtgactaggaatcctaatttccttccaaccagggcatgtgataacaaagacacttttcctataatcctttgctagtcaggatgtgaactgctatgcaatctcctgttcccaaccttaactatacacatgcattaacacacacaccagatagatacacaaacatgatagtctatttcagctaagttatattcttactaacaccttaaaagctgttaaaaaagaaataatacaaatggaaatctggtaccaagatttctttatactattcatatttgactaaatatccctaatttttggtgaatactagaagaaaatattttaaataaacagtataatttatctttcagataactggaattttattatcctgaggtatataggtggtaacttatgaggtataatctaatctagagacaaaagaataaactaaatccataatttaaaaaatggcaattcacagccaggcatggtggc

SEQ ID NO: 239368 - DNA, 1024 bp, Homo sapiens
agaatctccctccgtcacccaggctggagtggagtggcgcaatctcgtctcactgcaacctccacctccaggttcaagcaattctcctgcctcagcctcccaaatagctgggattacaggtacgtgaccaggcccagctaatttttgtatttttagtagagacagggtttcaccatgttggccaggctggtcttgaactcctgacctcagatgatccgcccaccttggcctcccaaagtgctgggattacaggtgtgagccaccaacgcctagcctcagagacttctagtaacatcatatagttagtaaaggggacagctggttttcaagtaaaggtctgtttgattttttctattatagaaatcctttcccctttcttaatgtctctttggtattcttgaaaaaaacaaaagagagccaacaaataaaagtaattcctcagaatttatgctaattttgtagcaatataacttgcgcatttgactgctgcttgatttttaaaatcaaatattttcctacattgctttttaagggcaaggtgtgtcctgtgagtgtttctcactgttagactagggcagaagctcaacaataacaaaaaaggctggtgactaggaatcctaatttccttccaaccagggcatgtgataacaaagacacttttcctataatcctttgctagtcaggatgtgaactgctatgcaatctcctgttcccaaccttaactatacacatgcattaacacacacaccagatagatacacaaacatgatagtctatttcagctaagttatattcttactaacaccttaaaagctgttaaaaaagaaataatacaaatggaaattggtgaatactagaagaaaatattttaaataaacagtataatttatctttcagataactggaattttattatcctgaggtatataggtggtaacttatgaggtataatctaatctagagacaaaagaataaactaaatccataatttaaaaaatggcaattcacagccaggcatggtggc

SEQ ID NO: 239369 - DNA, 434 bp, Homo sapiens
ctaatgaattttagactgagaatctcattctcctggaactatctatcacttgagaatcagagtaattatttcctattgccctttgtggaatacagttataattgcattactgttaacggtgttcgcattaacacttaattgttaatgtcctcctaatttggaggaaatcatcacctcttcatatttcattgctagaaagagttgttaaagagaataatttgaagcttccaaatggagaaacaagaaatgatgctagaattcagaggtggaatttgtgggatgacttctctttctggtatttgtgtgtgcatgtttgttttcttttaaggtattatacgtctacttccttttgagattaagccacaatgcacagtcattcactggaaagtaacagggattcttgtgatgtggaaacagctcttgggtgcgtggta

SEQ ID NO: 239370 - DNA, 449 bp, Homo sapiens
aaatatattagttattatttattatgattcttatagctcatttatactgtacaaaattcttctgtcattttatgaagatgttacacatatacataacaaaacttagctaattagatacaaagactatagaaccaaataactcttttctaaatattttccctttaaggaggttttgcaatccagctttgctgtggttagacactgttgatgagaaaactttttttttctttcttttttttttttagacagggaatcattctgttgcccaggctgtaatgcagtggcacaatcatggttcattgcagcctcaacctcttgggctatagtcgtcctcctgcctcagtcttctgagtagctgggactatttgatgtgcactcccatgtgcggctaatttttgtatttttttttttttgtagagatgggttttcaacatgttgcctaggctggt

SEQ ID NO: 239371 - DNA, 446 bp, Homo sapiens
cagtatggttctgcaagttaaatctggagcaataaattttagctttaactattttttgccagtggtttagaagcagcaacagcactggcaccattttgccatgcatctttccatagagacttgatgccaagttttacaagactaaaagattatgatgcatccaccaattaccttcagttttattgttataagaggggaagatgttatgaaagtttcaattaatcttttgagcactatattagagtagtggttatgcacttgcattgcttacaaacgagctgtacagaagggtatacctcccaaatacttagtgtagttgacttgtcttgggttgcactgtaaggcagagtactcagagtagttggaaaatgcagaatcagttgtataatttttttttataaaaacggtgttttttaggctaaagaataaagtatcatatcttagga

SEQ ID NO: 239372 - DNA, 335 bp, Homo sapiens
tgtgtctttatttctacgatcccttgtctcctcacatgaggagaaaaacccacaggcccagtaggactggaccctacactttctctggtaactccttgagtagcttaataatcaaccttctgaattctttatctggcaattcagaggtttcctcttggtttggttccattgctagagagctagtgtgatcttttaggggtgtcaaagaaccttgttttttcatattaccagaatcacttttcttgttccttctcatttgggaggattatttcaggtgaaaaatctggaactcaagggctgctgttcaggttcttttgttccaccaggtgatccct

SEQ ID NO: 239373 - DNA, 433 bp, Homo sapiens
ctgttataattttcattttacagaagaggaaactcaggcacagagaggtcaagaaaaatgcccaaggacacacagctagtaagtgaagagaaagagtttgaacccaaagcagtctagagcagggcctgtgctctgggccagcacatggggtcaggtcccgttagcgcccttattggctgccagaccattctttcacctgacactttcttcactggaatgtgattgctgctctatgtctctgcctccctgagtgccttgagggctggaactggttttatttatctccgaatccctagaacctaactcagtgctgagcccagaaaaggttccaaataaatgtttctcagtgaatgtgtttctaacccataagtgcctcatacatacattgctagtctaaagagcttttcttttctgatggaattttactgcatga

SEQ ID NO: 239374 - DNA, 428 bp, Homo sapiens
gaaaccagagcacaggaatgctgagtcacacttgcacggtttctcagccagcaggtggtagagtgagcccaatgcctggaccctcagcacctaccagcaggtgcctggcagagaagaggtattcactaagcatttgctaatgaacaagaggaagcagactcttagggaaggaatgaggggtgtgttctgtactgagtttactacttcctgaatgctggggaccaccacttgctacccaatcccaaggtgacaccagacacacccaagggtcttatgagggttgctaggatctactgcatgtctgtaatgtttaactgttttatgaacatggcattgttcttgtaattagaaaagggaaagacatttgttttatgtcaagggatttctcagataaaataggagaaggacattccaataagcaggaacaa

SEQ ID NO: 239375 - DNA, 419 bp, Homo sapiens
ggtttgaaggggaccttttttctgatctgctgttgtaaaaccacagcagctgtggggacaagggtaactctatttcagatgctaatccaccatgtgactcctgactaacctcgagtctgggaatgcctccaagatgtctagttgatgtattattctttatgtagaaatctctgtttactgtaagttttgccttccctcctaatcaacccttgatgttgttgcacacatcataggccatgacaccctcagcattctttcagctatctacacattccttccggagcatgtagacttccctcccgatacataagccatgggtctcaggggttgcagtacacagatctgcctgtctcgtggccatagaagactacacttctgtgtgtaagttccctaataaatcaccctttactgacaaactg

SEQ ID NO: 239376 - DNA, 363 bp, Homo sapiens
cagacatttaggaatgtccaaaagcatcacagacatccaggaaaatatggcctcaccaaatgtactaaatgaggcaccagtgatcaatcctagagtgacagagatatgtgaccttccagactgagaattcaatatacatatatttttttggaaactcagtaaactacaataaaacagaaggaaataaggattctttcagagaactgtaaaaaagtttgaaataattatcaaaaactaaacaaatcttggagctaaaaattcagttgaccatcagaaaaatgcctctatgtctcaacagcagaattgatcaaacagaagagaaaattaatgagctcaggctatttaaaaatacacagaggagag

SEQ ID NO: 239377 - DNA, 220 bp, Homo sapiens
gagatcacaccattgcactccagcctgggcgacagagtgagactcgatctaaaaaaaaaaaaaaaaaattgggaaaaaagtttgatcttaccagtttcaaaatacaaaacgcaaaaccttagggtatatcgaggttaggggtcccaatgatcccaacaggatgtaagcatagtactcaacaggtgctttttcaacccatgcccctctgtccgtctccccc

SEQ ID NO: 239378 - DNA, 179 bp, Homo sapiens
acttgcctccagtatgaggcttctaacacttgggttaccttggcctgtctctgtgtctatgtctgcctggaaaatgacctgcaggcccccagggactgtgttgtttgtttaaggctataaccctgggggcctggccaaaaaacgtacgcattaataaacaaaatgaataaatggataaa

SEQ ID NO: 239379 - DNA, 891 bp, Homo sapiens
tgctgacagttaatcttattcaggccgtattctcatgaggtcatagatctatattaagtttttttacaaagaacaaagatcctggcacactgtaggccaaacaaacgttttctaaatgaagtgttgccttattaacaacctagcttgtaggttgggaagtttttagattcaagggacaaagtagcaaaaatgtgccctctccctcaccctcaccttctccctctccctctctctctcccgtctccgtcgtctctgtctcctgctttccacggtctccccctctccctcgtctccgtctcccgctttccacggtctccctctgttgccgagatcgcactgtgtacccagcctgggccacagtgcaagactccatctcaaaaaaaaaagaaaagaaaaagcctgtttaatgccaacaggtgtgagtggattgcttatggctatgagataggttgatctcgcccttaccccggggtctggtgtatgctgtgctattcctcagcagtatggctctgacatctcttagatgtcccaacttcagctgttgggagatggtgatattttcaaccctatttcctaaacatctgtctggggttcctttatcttgaatgtcttatgctccaacatattcgcgttgttgaagcctcttctaccataagaagctacctccaatgtattggattaccacttgaacacagtcgtgttgggtgggctggatggcgactgacgattgcatcgtccatgcccatataacactttctacctttaacagttctctcgtccgacattatgtgttatggttcgcaaggcgggttggacagccaatactgtccagttttgcacttgctggccccatttggctacatcgattcaatcaaaacaggagtacattcc

SEQ ID NO: 239380 - DNA, 464 bp, Homo sapiens
caggtttataatatgtagaattagagagttagaccatcaagattccttccaggttttagtgtctctgtcagtatgatcttagagataggcctaattgtcatattttggaacttggccccagtgcattagtgagagcctgcaaagtggggtataggtaatgacatatagtagtagggtaatagaatgtcttaagagtaaatagttggccaggcacagtggctcacacctgtaatcctagcactttgggaggccaaggtgggtggatcacgaggtcaggagttcaagaccagccaagccaagatggtgaaaccccatccctactaaaaatacaaaaattagccaggcatggtgttgcgcctataatcccagctactcaggtggctgaggcagagaactgcttgaactgaggaggcagtcacaccactgcactccagcctgagcgacagaacgagactctgtctcaa

SEQ ID NO: 239381 - DNA, 1603 bp, Homo sapiens
  misc_feature (91)..(91): n is a, c, g, or t
  misc_feature (317)..(317): n is a, c, g, or t
  misc_feature (329)..(329): n is a, c, g, or t
  misc_feature (407)..(407): n is a, c, g, or t
  misc_feature (763)..(763): n is a, c, g, or t
  misc_feature (1078)..(1078): n is a, c, g, or t
  misc_feature (1101)..(1101): n is a, c, g, or t
aggatttaaaatgaatgaaagaaggtagaatcattactttttagtggataatttactgacaggtctcatgtgcaagcaccaacagtaccantgatgtattccatttatgctggcacagctgaagccctctgattgcttttctcacctagacatggctctcattaatcaagggaagttgcatagactagaacaagaagacagttttgtcgacacacttccagcactgttctctagcagcatttcgttcctgttccggtatcattgctctcagaagcagaagccctttcatttagttagaaattagcagtagatacctnctctctgaaccntctctgattttgagtgttgagttccagaaattcattttgaattcagttgtttggcatttctggtacagattttcctgnaggaacaatttaaagaaagtgcattaagtcctcctgctagcctatccaaagtctgtttgacttatatgacattgaactatctatgattgaactatccatgataacacagtgtactatccatgataacacagtgtactatccatgatttctagaatattacattcttttaaaaagaagagatgtgttcagtgtacactgattgagccaggcatggtggtggaatgagaaatacaatctatttagtgaaatggaaaattgcaggacaagagagaaatgtaagtcccagatgtgcacagagcactttgctatggaaaccacagagaaggggcatccacctcagcctggctccaggttcnaaatggagagactatgagcattttcagctgcactctcatagaagagaggaacaatccttcagaccaggggaagacagaaaaggagactggccagaagaacacctgggagggagcacagagctcttcattcccaggggttctttatagcatggacatttacagtgtaggtactgcccaaatgcccatccacaccagtgttagggactgaattttgtttatttcatttatcaagatataatagttttgagtcatcagttgtatttctatagcctataaaaagagcaccaggcaaggcagggcccaccaccgctgcanccacacccagagtcttccccatnctgtactgtggactccacatcagacctgggaggcaggactcagtggatgaggctgtgttttgcatttctgagtacagtccacaaaatggtttgcttctgaaaaagcagtagtagtcttacatccaagattattcctaaaataaagtttcgacccacatatataatgaaattgaaactgcctacattggcaaagccagaaagagagtaaaaaagatggggtaggccagttgcggtggctcatgcctgtaatcccagtactttgggaggctgaggcgggtggatgacttgaggtcaggagttcaagaccagcctggccaacatagtgaaaccctgtctctaccaaaaatacaaaaattagctgggcatggtggcgtatgcctgtagtcccaactgcttgggaggctggggcaggaaaatcacttgaacccagaaggcagaggttgcagtgagcctagatcgcaccactgcactccagcctgggtgacagagcgagactgtcttt

SEQ ID NO: 239382 - DNA, 431 bp, Homo sapiens
attgggtcttggtttatttttgtcaaaatccaattttcactcacttttgcctttcactcacttcctcttctagctaggttcagttactttttcatgtgaggccgcatggagtaggccagtggttctcagactttaataggcattagcatcacctgaagtgcctgttaaaacacagatttttctgattccatagttctgggattaggcccaagaatttgcatttctaacaagtcccaggtgatgctgaagctggtcccagggattacactgcaaaccactggtatagaccaatgcttctcaaactctgattatttaataaactcttattaaataatcttatctgattaatatctgattaataacttatctgattaattttagctgattaataactcttatctgattaaaataaactcattcttatcaaacgt

SEQ ID NO: 239383 - DNA, 371 bp, Homo sapiens
cttagggaatgaatctgcagtccttaacctgggattgttcctgagaatttctgttcagtatggaaattttgacctgctccgtttccgacctgagttggttcacccctccttagaaaaccgagtggtccccgctccaggaaggtcaccatattgatgccaaacttagtgttgccacccgatcagcataatacactacagcctagaactcctggggtcaagaaatcctcctgcctcagtctcctgagtagctgggactacaggcatgtgccaccccgcctggatgttctgcagtatttccaaccagcgctgagaaatctctcattcctaccgaggccacagcggacccctgggcccctctaggaaccgtgctt

SEQ ID NO: 239384 - DNA, 352 bp, Homo sapiens
aaactatggagactataaaaagatcagtggttgtcaggggttgaggggagggagggataattagggagaacacaggatttttagggcagtgaaaccactctgtgatactataatagtggatacatgtcattgcacattcatcaaaacccttgaaagtacaacaccaagagtgaggtctaatgtaacatatggactttgagtgataatgatgtgccagtgtaggttcgtctgtacctttttagtgtggcatgatgataatggaggttacgcatgtgtgggagcaaagagtatatggaaatctctttccttgcaattttgctatgaccctaaaactgttctaaataaagtcaag

SEQ ID NO: 239385 - DNA, 448 bp, Homo sapiens
gatccagtgatagaatttaggagacttagaggtgtgaatggactatgtacctctcagattatccttcagaataacaatagctcagaacgtggagatgaggcagcaggtgtgcccacggtgctgtgttggccattgggtgttacagtaagaagcagacccgcgtcttcgacagtcgtcttgggaaggatgagctcaccaagtctggggtgacagtcagggaacctggccctgtggcccctctcctacactgcggtgggccaagggacagctctcagacaccccaggcttccttggggcactgtttgggatcccctgacatatgggctgttaggagaccaaggctgcagcattccctgccagagagcgaggctggaggaatcttagcctggaaaagttttaaaggagttgtctgtggtgggctttaaaaaagcaaatgaaaaacaatagc

SEQ ID NO: 239386 - DNA, 535 bp, Homo sapiens
tcatgggttggaagactcaatattgctaagaagtcagttctctgcaaaatctatagattcatcagaatcacaaaagtgggcttttttgtagacatgggcaagctgatttcaaaatttatatggaaatgtaaaggaccttagcatagccaaaacaatggaaaaagtacaactttagagggcccatacttaatttttatctaattcaagacttaacaaagctttatgctatagtttggatatagtttgtttgaccccttccaaatctgatgttgaaatttggtttccagtgttggagatgggtcctaatgggaggtgtttgggtcatgaaggtagatcctatgtgaatagattaatccccctctctcttgctttcttgcttgccatgtgatctctgtacagctggctcccctttgccttctgccatgagtggaagcagcctgaagctctcaccagaagcaaatactgacaccatgcttcttgtatagcctgcagaatcatgagccaaataaacctttttataaaaaataaattacca

SEQ ID NO: 239387 - DNA, 302 bp, Homo sapiens
tctaatcagctccttggctggctcgggctgacaaaacattattgttctcttaacctttgccaagctgaggaactttacaagcattttttcagtaacagccagagtgatttatgggtttttctccctctagctctccgtggttagaaaaacaaattttatttctcagtctcattccttcctccccattattcccagttctctactgtctttagccataatccttctttatttaatgcaaatattactttattttgcatagtttttaagtatgtctgtgtctaatgttctttaattatggagac

SEQ ID NO: 239388 - DNA, 201 bp, Homo sapiens
ggagagagaggatctggctgttacccagtctggtctccaactcctggcccaggggatcctcccaccccagcctctcaaaatacttaggattacaggcatgagccaccgcacccagccccatatcttaagtgttagtgttactagggtaccgtctcgggcccccacctcctatcatctcatctccctccaggaagtcaaacc

SEQ ID NO: 239389 - DNA, 499 bp, Homo sapiens
tgcttctcttacgcacagcacagcagatccacagcacttacatgaagacggggaccttgcgtattacagaattgtggggtcccctctcccctgaatcaagactagttactagctctcatcttttattgttattcctgtcagatacacttggaggttctgaatcttaattctagtctagaacttaactcatttctaacaaacctggatgaaccctgtttcccctaggacttttaaaattgtaacagtatcttcacctttgtttaccaaacaagatgagacctttcctttgggaaagctttcttttttcttttttctccaaaagcagatacttaatgggaaagcttttattccccttgcctgcctctgggttttgttgaaataatatggaagtttaatttctggatgattaattttgttttactttttgtgccttccattttataaatcctttcttaataattcacaaccatattatcagtaataaacaaattttaccagc

SEQ ID NO: 239390 - DNA, 440 bp, Homo sapiens
atttataaatataagtaatgtaaacatgaaatcccattttagaggcttgggttaaaagctactgcttgatatatattgattattaaaggaaataaaactaatttgtaaatttaggaatataaaaagcattggaccaggattatataaaagccaggtttgaactgggttctatataggtttccatctgccatatctagcagtttgacctgaagcaagctctttaatctctggatatcagtttcctcaaccataaaatatgaatacattggactagatgatctctaagatctcttccaacctttatgttctttgactatactctatcctttaatatcttgctttttcataatttttccaaaaacacatatttgtctttcagtaataattcattttgattctagccagctttgtcctgggctaggtttaaaaaaaaagaaatt

SEQ ID NO: 239391 - DNA, 2213 bp, Homo sapiens
  misc_feature (1)..(1): n is a, c, g, or t
  misc_feature (4)..(4): n is a, c, g, or t
  misc_feature (39)..(39): n is a, c, g, or t
  misc_feature (414)..(414): n is a, c, g, or t
  misc_feature (1958)..(1958): n is a, c, g, or t
  misc_feature (2091)..(2091): n is a, c, g, or t
  misc_feature (2097)..(2097): n is a, c, g, or t
ntgntttctaatatccagggaaggagagtatgatattantcccaatatcacagggggtgtacacctttttgtgacattgagtctaatatccagggaaacagaggatgatattactcccaatgtcgcagagggtagacacccccctgggatattgttcctaatatcccaatggagagaggatgatattactcccaatatcaaaggaaatgtacaccacccctgcgatattgttcctaatatccagagaagaaaagaatgatattactcccaacagcgtaggaaatgtatacccgtgctgtgatatttttcccaatatctggggtgggggggaagaggatcatattacttccaatatcgcagggtgtgtacaccccctctgtgatcttgttgctaacatccaggtttagggaggangacattactcccaatatcgcagggggagtacaccccccgtgacctagttagtaatttcctgggtggagaggatgatattactcccaatatcgcagggggtgtacacagccctgtgatattgctcctaatatccagagccaaagaggatgatatgactcttagtatcgcagagggtgtacacccctcctgtaatattgttcttaataccctgggagggagaggataagattacattgaatatcgcagggaatgtacaccctccccctctgagacccttcctaatatccaggggaagagaggataattttgctcccaatagcccagaggcagtacacctcccctgtgatattgttcctaatatccaacgggggagaggatgatacttctcccaatatcgcaggggtgttcacatccccagttacatttttcctaatatctaggggagagacaattatatgacagcaaatgtctcagggtctgtacatcccttcctgatattgttcctcatatccaggggggaagaggatgatgtcaaatatcaaagggggtgtacaccccccaccacgatattgttcttaatattcatgaggggaacgatgatgttactctgaatgtcgcaggggtttttcacaccccctgtgatattgttgctgatatccacagtgggagaaaataatattacttccaatattgcaggtggtgtataccccacctgaaatattgcactgaaaatccaaagagggagaggataacattccctcaaatttggcaggtggtttgacgccccttgtggaattgtttttaatatccagcggggaagacagtaataccattttggatagtccgatttatccgccccacctttccggaactctgagaccaggaggcggcatgcggtttccatgtgatccccgatacctttgccatcttctgtactgtcagccacaaacgcaggcccgttatctgagctgatccgtaagggcagtcccaatctaggaatcagatctcgaagaagcagacgggttacttcaggagctttctcagttcgtgttggataagcctccacccacccagagtaggtacgcccaagaactagtaaatacttgttacctccacactttggcatctctgtgaagtctacctggagatcttcaaagggggctgctccataagcttgtatgccgggcggaacggctggcacttgcctcgcattacgctgtcggcagataacacaccgctgcgtcaccgttttggcaagtgctgacaaatgcgagacgtagaaataccggcctaacaacttttccagttgactcctgacctacatggcattcgaaacatgagtatacagaagtctttggtaattcaggatcactgatgagtaaaacaagataggagttgaagcttatctttgtttaaaaaatcctttggtcttgggataacaagataatgtaaatatggcttaaaggagaatcatttcaaaaacaaagcaaaacaaggaaatgaaaaataaaatttatggcctggcacagcggctcacgcctgtngtcccagcactttgggaggccaaggcgggcagatcacgaggttaggagatcgagaccagcctgaccaacatggtgaaaccccgtctctactaaaaatacaaaaattagccaggtgtggtggcaagggcctatnatcccngctacttgggagcctgaggcaggagaattgcttgaacccgggaggcagaggttgcagtgagctgggatcgccccactgcacactccagcctgggcagcggagtgagactccgcctg

SEQ ID NO: 239392 - DNA, 2352 bp, Homo sapiens
  misc_feature (199)..(199): n is a, c, g, or t
  misc_feature (2346)..(2346): n is a, c, g, or t
atttttcacattagggtcactaaggtaagcaagtagaactaacatattctttgaagcttccacaagttcgtcattgatcttctgctggaagcaacacagtgtaagtctaagctttctttgaaatgatagactttcaaatctttcaggtgagttatatttctgtagtagctaggctctttttcaggcccctcttctctanttctgcccacatttacccccaggtttctcaaatattacttaaaactatagttattttattcttacattatttaacacaagcaactatattccatctgatctgtggctttgaagataaaaaggtctaagagagacaatcttcagtgcttcgttatctatgctgcatatggacagagttccaagtcctttgccatttcagttgtgttctcagtggcctctggattgtcaatgatgttcttaaaatgtgttatccaggactgagaaaacagtacatgagacctgaccttgtgctcaacttatatttctattaaaatagtggttgagcctgtaggccatgaaatcagatgactggtttcaaattcaggctcagttattttccagctatctgatcttaagcaagttacttgttactgcctcagtttcttcattttagaaggaatgaaatgtgactgtctatcttaagaaatcattgtgatgattatatgttaccaccacatggacccatctgttccagtttgtacttggagcctttccttctctgccattatgaagaatgaatggtccaaggctaagcttccatttttggctccttttgttaattctgccttttcttcctaactctaaatgttgaaatacttctcctttttcttgacattggacctcatctccattttatctatgctctcttccttggtgaaataatacagtcaccaaggccattatatactaattactccaaatctaggtctccctcttagacctcaaacttctgcaactgccaatcaacctctccacttacacgtctacaggcatttcaaaaataacatttccaaaacagagatctttagtttatctccagaagtattttgtctacagttttcctcaagtctgttctttcagttccttgggtcaaaaaccttataaacatactgactactctatttttttcacaacccacatctaaactatgagcaaatcaatcagtgcactaatttctacctctctcaataactgtgtccttctataatgtgttaattatctttgttttaataaattctaaatcatgcttgccttaaccattctagatgaaatgcaattttcattacctatcatatagaagttgaatagttctgttttctgactctgctcgttcataatacaccacctgaactaagtaatgggtataatatacccaaatacatttggactcttcaatatggtcctattgaagaggcacaaaagaattcatttgtgtgctccctttgctaatggtattttcaacgttcatttagaaatgcatttatagttattttatgaacaatataagaaaaattagttgtgtacaagttatgcacctaatttttgactaaaaatgttatccattaatttatttttctactcttacttatttccaataatcaccttcagtgtaacaatttgctaccaccttgaatatttaaacaagtggccaagagttcaaagggaatttctacagcagggttgtgaacatattttaagtgcagcagtactgacagactaagcatatagctttctgagggaaatattgtgaagagacaacattcatgtgtgtatctgtaggttggcccacagtgaaaaagtattatccataatactgcacacatatttctcatatctcaatgcactttatactcttaggaggaaatcccctactcatgggctgttgaagaaccttaatcattagaattaataattttcgtgcaagtagttttattttcatataaggttccagtttcatataaggggttaactttctccttaaaatctagtaaacctgactacataaaagccaaagccatcagggagatagtgttaagagtagacactttctaagttgagatttaaaaataagtaaataaccacttaccatttgcttaatatgtgctaactatagtgtgcattgtaggaaaaagaaatacaaggaacagactcttttaaaaaagattacagggctgggggtgatgattcatgcttgtaatcccagcatctggggaggccaaggcagaggattgcttgaggccaggagtttgagacaagcctgagcaacataggaagacctcatttctattagaaagaagaaagagaagaaagagagaaagaaagaaaganagagag

SEQ ID NO: 239393 - DNA, 393 bp, Homo sapiens
ctgcttggcttcctcccagctgtaaagtggcttatatgccagatctcgctgagccttcttgtaagagaaggtgaacatgctatttgacaatgtcactgtgtggcagtcgaagggcggttgataggtgcaaactggcctgagcaggaggctcactattcccagcaggaagccaatccagtacatcaggaataaaagaaggcttcatctggaatcaaggcaggggccgaactctttgctcaggatgtaattaaggttatcataactttggtgaggcgtgtcatctgagatatagtagaactgtcctaggacacttggggccttcttggggtcccgcaaggccctcaaggccagaatgtgggcccaggccacgttgccaacatagactgggttggc

SEQ ID NO: 239394 - DNA, 511 bp, Homo sapiens
caactcaggtcacttctggtacatgcccatgttagacaaaaagaaaatataacctcagcccatcataagaggccagttaacttatagttctgtaactagaaattttctgacaaagtaaaccaaaaaggacaattgtataattgcgaccaatcatatagtttattcatcttgcttctatatccaccccatatatacttgcctctgacactgtcgttggaacactaaatttagtttgctgtttctcagttcatgaatggctgcttactcaaataaactctttaaaatttgttcctcagatgtttcttttacagtatattaagatgttattactacaccatacacgtgcttgcatcctatgaagatcctccaggtagaggcttaaaaatatttaaggctttgttgaacactctcaagcatttcataaattattgataacccactataccaaccaccaagtcattatttgtaaagacaaataaaataatatgtgtggcaaaattgcacaatatag

SEQ ID NO: 239395 - DNA, 398 bp, Homo sapiens
cattgagaagaaaaccctatcgtgatattcatgttgtctgaatgaataaatcagtcagcaaaggcagcctctcacctccactcaatagaatagtgccagtaggacttactaaatcatccaatgagagaaaaagagcaagggtcttagtgccaaatatccaagaaaattaggaattgtaggaaacttaaatagcacttaaagaatcagaatttatagtttacttagaagcacacagatagaagcgtgcaaaacaagtttcgcaataagattccattgccagaatcccaaaataaagtccccaatggaaggaaactaagaaatccaaacttcttgtctcacaattgttacctaggctgggcctcagcgtaatccaactgaacttaatttttacgtcatca

SEQ ID NO: 239396 - DNA, 425 bp, Homo sapiens
ccgggctgggcaggcaagggggcttctgcttgtaatcctgtcacttttggaggccaaaagtgaaggatcacttgagcccaggagtttttgcctgaagaacatgtttctagaaaaaaaatagaaaattagctgggtgtggtggagcagcagtgttgtgggagagtgatctgtcaagacactgtcgatgttttttttttttttgagacagtgtctcactctcgtccaggctggagtacagtggcatgatctcggctcactgccatctctgccttcccggttcaagcaattttcccaccgcagctacttgggaggctgaggcaggagaatcactggaacccaggaggcggaggtttcaatgagccgacattgtgccactgcactccagcctggacaaccgagcgcgactccgtctcaaaaaaaaaaaa

SEQ ID NO: 239397 - DNA, 449 bp, Homo sapiens
cacttacctccaatttgttgtcagagggtttaacttaaattcacagtcactttgtaaagttgtaacatttttctatggctgataaaagagaagcctttgagttgtggttattattattttcctttatgtagcttacaagctatgacaaattggtaaagactgtctggattgctgagacatgaagaattcagaggacatttccaatctgggagaaataattccaggaaagactgtgatgtctattgttggctcaaagggagaactttgagtatacatgccacatatttaccatttttaccttaaatttctcacaaatatttagttttaaatgttttattcaataatacaatattattacaagaatctagatgagaagtgagcaaactataacctgtgggccaattccagacactctatgtttttgtaaataaaattttattgaatgtagt

SEQ ID NO: 239398 - DNA, 382 bp, Homo sapiens
ctgtctcctcagggctgtggctcccaaagcggcatgggtgctgctggcctaggtcctagggaatacaaagggctgcgctttcccttctccggcagtgactggggaagcagggccagagccaggcccaccgtatccagccgagagctgtggtggggctcccctcttttcaaaagatgctggaaaagggccgttgcctgggaggaattgtagtgcatgtgaactcatggccaggcagccagacagagtggatgcagccctgcagccagagctaacccaagcagcctcccagtgcagtgacgcagactgcaaccttgcagtcttccatgaggcagcagctccagactgtcccgacttgaccactcagtggggagggggaggcagg

SEQ ID NO: 239399 - DNA, 1630 bp, Homo sapiens
  misc_feature (942)..(942): n is a, c, g, or t
ttgaacattcctttagtttccagcttcataatttggttcttattaaaataattctagaattttcatgttttttttaaccagctctctaaattgtgttacatgcacataaaatatgccattttaaccattttcaggtgtgtggttcagtggccttgggtacagacccagtgttacacagccaccaccaccaccatcatctccagagcctttttatcttcccaaactgaagctctgcccccattaaacactcactccccaccccgctcccccagcagggttagatcgcagaggggcctgccgggggctctgaggtgatggaaaccatctgagactgccatggcgatgatcgagaaagtctgtgaatttacggaaaattattgcattatatacataaaagaggtgtgtgtaaactgtgccataataaagcctaaaaattagaagcatgcttgtaacttagtgtatttaaataggtaattcgttcagtcctgaggttagtattattgaaaaggtttaattttgttctcatctctgccgctgtctgtagtgacctatagagaaccactgtgatcacctcctgtatgtatgcaaatctgagcaaacgtaaacatattttcttcttgttttccttccacaatcccccccactcccacccccgcccatgtgtgtctgcgttttcccgcaggtgcatgcaggcccgcgttcatctgtgcagcccttcctgctgccctgcgggccccatgcactgcagaccccgctgcctcagacctgtgcctgcgtggctggcacacctgttccctgagtcggagacggcggctgcctgttgagggcagggtgcgtccgctgcttatagagacgtgaagcccaccatggccattctgttggcgtgcgtttgtcaccagctgtgttcccgtatagaaacgtttctcgtctttggggggcttnttcccattaagctcttttcttaaagccctgaatactaatctagctatgccagctttctgttggtgaatacttgtgtgatatttctgttcttaaaatgtcttaaatgtgacactgtttacaacgtagagctaggttttttaaaaaaatcaaacttttttagctggcacgttaccttacacattccacgattttccatggaggatgtgagttggttcctgctttatttttttattttgctcttttcgtcagttttttcctaatgcttccttcctccctgttgtctagtgaattagtaactttctttaatctctttctttcttcctctggtttgcaaggtataagctctacttctgttatactagtggttacaaaatgtataaactatttacatttttagaaatccaaagttggcccggcgcggtggctcacgcctgtaatcctagcactttgggaagccgaggtgggcagatcacgaggtcaggagatcaagaccattctggccaacttggtgaaaccccgtctctactaaaatacaaaaaaattagccgggcatgatggtgcgcgcctgtagtcccagctactcgggaggctgaggcagcggaatcgcttgaacccaggaggcggaggttgcagtgagccgagatcgtgccacggcatccagcctggctacagagggagactctgtctc

SEQ ID NO: 239400 - DNA, 264 bp, Homo sapiens
tatatgaaaacagtactatggcgtgtgaaccaatttactaaacaaatagcagctgtagtaaaacatctgtttgggaaagaggaaatataaactcataaaatcaaatgaaggcaatgtgatctgtactttcacaatatgagaaaactagacatatggagcagtttgcaaaagattatcaatcattctattaaaaaaaaacaaagtgtgaaacaggtaacattatgatcttcacacaacacattagccagtatctgagtaagattt

SEQ ID NO: 239401 - DNA, 510 bp, Homo sapiens
aggagcgctaagtgaacaaggatgctacatgcaggatccacttgtgtccattgatctctcagagtggctgaggatcataggtttcttcttgaagggctcaaggaatgaagcatcccacaaaatgatcctgctgaataattgccagatgctgctggccctgtacgaatccctggccgtgagcattcctgagtccctgaaggtcttcaagaaagtttaggtgaggggataagagcagctgcattttcaaagtcagtgaaggtagagcattcaagagcattcctctgtattatggaagatatcctgaagctcaatgcctgcaataaaagcaagcttggaagtagggatgagataggccacccagatgatgaatttgagaggtacaaaaacaggtgcttatcatttataattgctattccttgtacttttttgtaattcacattaatcagttttggaataaagagaggatgaattcctttcttgtgatgaataaaggttgtcaatggtcaaaat

SEQ ID NO: 239402 - DNA, 1517 bp, Homo sapiens
tgtctgcagaagtgtggcacattttgcctagaatgacagaaggctgctatcaaagagcatgagagaaagagaaagagatcatctaacattctaagaagtgattattacatttgagttttaaaaatgttactattcgaagcagtgtttttatcataattttctattttatcaaatcagacttgagttttttttctgattctgttatttaaccatacacaattttccctgtgtaattaagtaatggaacacttggaggcatatgaagtcccgctaagtagggagcatttgagtcagaaaagtgggtactctcttcctttatgtgatgtccatctgccattgtatttggtaaggaatagtgaggtgttaccatactgtgtacagatttccctcacttttccacctctcactttcctaaacttgggaactaaacattggattaatacagtgtctttgctgttcagattcacttgccagattttatcaaatgtagacttaaataggttttattgtgatagatatttacttgctccctaaaactgctctcttaaccagccttacaataaagtcaaaagtcaaagtggtaggcttcaagatgaaacataagatctgttgactccttcctctatttagtatatattttcataatattcagccttttcttgccccagatatcatatctattttacctacccaatatttaagtagtttccatgttgtgattaagaaaacaaaattaccataattacctagattattgctaattgtgacatatgtaaagtctattaatgtaataaatctcctttcttaagtcaaaaaataattttgtgtaattccaaacaggaaactgaaaaggcataggtattctcagcagtctctaaagtcccaaaatctaatggcaattttaccagagcagatctttagaagtattgctataaatttggatatcccattctaattttaagccaaatgctttttgagaaataagccagctgtttggaaatgcttgtattataatcggtttgataagcagttatgtcttatgcagatgaattaggggctacctgtttttatgcactggtctttggggtgcttttgaacagtagtgtctgatgttttaattgtcaaagcaaaaagaaatgagagggagggcaacttttcttcctcttctgaagtccaggaaactggttattttctcatgcatattattttaaaatatattccagccaggtgcagtggctcacgcctgtaatcccagcgctttgggaggccaaggcgggtggatcacaaggtcaggagttcaggaccagcctgaccaatatgatggaaccccatctctactaaaaatacaagaattagccgggcgtggtggtgtgcgcctgtagtcccagctgctcgggaggctgagtcaggagaattgcttgagcctgggaggcagaggttgcagtgagccaagatcgcgctcttggctgcgatccagactgcactccagcctgggtgacagagcaagactctgtctc

SEQ ID NO: 239403 - DNA, 469 bp, Homo sapiens
aaaacaaaatgtcagttcctcaaaaatgatatacttggtctatcttccactttctcttctcttaaaaccaaaggtctcttagcacaggtgctgcccctggaattcccagaacatcaacatcagctcccgtcctcatcaaagggtggaaaaaaggaaagcttgaaccagcttgggaaggaccttatctagtgctcctggccactgaaactgcatccgaacagcaaaaaaaggatgaactcatcatactcgagtgaaaaaacatcaccacctccggagtcacgggctactgttccaggggaaagtgctacctaactaaagctaagaaaaacccaaccctcctcatgaagaggagaccctgaaggatctccaaaaccaaagaaagttagcctctatcaataagtacctttgcccctccaaaataaacaaaactgcctataataataaaacttgtaccagatgtgcacaaagc

SEQ ID NO: 239404 - DNA, 161 bp, Homo sapiens
gcatgtgaatgtcctattgctctagcaacatatcttgaaaagactatctttccaccagtattccctttgtctttttgtcaaacatcagttgactgtgcgggtctatttcagggctctctattctgttccactgatctatttgtcccttctgtcgtcttctc

SEQ ID NO: 239405 - DNA, 464 bp, Homo sapiens
ttttttttttttttgagacggagtctcgctctgtcgcccaggctggagtgcagtggcacatctcggctcactgcaagctccacctcctgggttcacgccattctcatgcctcagcctcccgaacagctgggactacaggtgcccgccatcacgcctgggtaatttttttgtatttttagtagagacggggtttcactgcgttagccacgatggtctcgatctcctgacctcgtgatctgtccgcctcagcctcccaaagtgctgggattacaagggtgagtcactgcaccgggcccaaaattatctagatttataactcaattcaataatttaaaatttaaaaatacataaatatctattttgaatgagtagaatttgtgtggagcaggagttgttttttgttactaaatcacttcaaataacttgtttgggttttttactttctggaagatttcagttagcca

SEQ ID NO: 239406 - DNA, 376 bp, Homo sapiens
tgcaagaagtgtgtacactagacattaacagtagtcagaagtttttaaaaaatagtaggacaaaagaagaaaagggtgaggccaggcatggtggctcatgcctgtaatcccagcaatttgggaggccgaggcaggctgatcacctgaagtcaggagtttgagactcgcccggccaatatcgtgaaacctcgtctcctcaaaaattacaaaaaaaattagccgggcatggtggcacatgcctgtaatcccagctacttaggaggctgaggcaggagaatcgcttgaacccgggaaatggaggttgcaatgagccgagatcacaccactgcactacagcctaggtgacagagtgagactgtgtctcaaaaaaaaagaa

SEQ ID NO: 239407 - DNA, 195 bp, Homo sapiens
tgcactgcagcctggcagccccctggcaaatgcaggagaacagctcctcacctgactcaataaaggcagcactgggcagggtcaattcaccaggaagttgaaaggtgatcaaaccacactgagatgacaggaaacctttggcctgcttgctaactttctaatatcatcaaagataaatctaattttgtcgcagga

SEQ ID NO: 239408 - DNA, 598 bp, Homo sapiens
gttttcagagtagatgaaagcagggtgtcttagtaatcttcatcatggcaaacaaaggtgagaagctgatatgatagagaaaatctatggtaacttgatattttaaggtaatttgagtgtgctgaccccactatgcttaattcctttcccacaatctattttaaactacactttgattctcttgagacttacagcatgcatgtgtgggtatgagcagacaagcagacttacctttggagggtgaagacccagacaaactgaagaaacggattcctgaggatgatcaaatacaaatcatttttccagaatcactcaatattgccacatcccaaactaattctagactaatctttagaaagaagtaagctccttaagaaatcctactatgaatgttttttcttcttatggaataacacaagaagaggtacaatgcagactcttaattttgctgtaataattcacttttgtatttaataattgtacttctgtgtgagtgtgtcactgagctatttgtaccaattttcaattgatcattctgagaggggccttgagaatttctgtgtatgtgtatgtatatctgtatttatgtgtagtcaga

SEQ ID NO: 239409 - DNA, 365 bp, Homo sapiens
tcttctttaattaaattcaaggtttgcatttgttcaagaatactacaaaagtaatgtggtgtacttctcagtgtatcacattaggagggatttgacgttggtctgtcccattactgtcccattactttaatcacgtggttaaagtagtacctctcaagtttctcctctgcaaatttgctatttttcctttgtaataaataagtatcttgtgggggcaatactttaatattatataattatcctctttgtcatcacactttgacccactaagcttagcatccattgatgattcttgactaaagtaaattactgctgtgatatttgccagatggtaattgtctatttccatcattttatgttattta

SEQ ID NO: 239410 - DNA, 281 bp, Homo sapiens
tagctgcttgggaggctgaggtggaaggattgcttgagcccagaacttcaaggctgcagtgaaacatgattatgccattgtactccatcctgtttctaccaaaaaaaaaaagtttattgtacaacttggattataatatgaatttaattactaagaaaactatttgggggccaggcgtggtgtctcatgcctgtaatcccaacactttgggaggccgttgagcccgttgagccccagagttcaagaccagcctgggtgacatggcaaaaccgtgtctctac

SEQ ID NO: 239411 - DNA, 747 bp, Homo sapiens
aacatgttccattggatgagaaaacacagaaataactttatatttataaattctaatttaatagtacaagcactgtcaagtgtgtcacagaatgtttctaataatgttaagaaactaaaattttcagtgtcagaaaattaatttgcatcttcaaatcactctaacataatagattgagaatagattattttattgcttattatgctagcatttctataatgtggttccaatttttattgtcttttagtctttaatattctgtaataaaactataattctgaagatctaacaactactaagatctcacaacttctgcactatgataatgtatgtttgagtagcatctttgaagcaataacagaagatattttttcagtacagaatgccgcatttttaaataaaatatttaaataatctgttttgcataaaatatacaaaaggaaagttatacagcaaagacttgactatgtggactccacccaggacagttcctattaaaaaagtgaaaatctgtcaataaatgacaacgaatccatttctacaatctatttctgcaataaactaccaactgtttaacaagaataaaacatatttccaaatgctgaagaaaaaagaaatcacaattgttttaaatcattgagttcaaatttcctcaaagaaagcatacactctatttttccaatacgaaagaaaaactttttctcatcatacattagttcaaaatgtggttattttaaaggaagctgc

SEQ ID NO: 239412 - DNA, 605 bp, Homo sapiens
caagtgattctcctgcctcagcctcccaagtagctgggattacaggctcccgccactacacccagctaatgtttttgtatttctagtagagacggggtttcaccatgttggtcaggctggtctcaaactcctgacctcaggtgatccaccagccacggcctcccaaagtgctgggattacaggcgtgagccaccacgcccggccgagaatcaaccactttctaacaatattgcagccaatttgtgaaacagcacagcttccctgctggagttgaaccttccagaaggccagtgtctgtccatccatcctgatgttcccgcagcacccaacataggatctcacactgttttaagtcatcgtttcatacctgctaaaatatcaccttcttagaggcttttccttgctgcctccaccctcaccccccataccctttcttgaaaggccccttgttatacttctttgcttgaagcatcacccatctttataatgccccttcttaacctcgcatctcctttgctggttccctatttatctgtttccctgtacacctggacttcttgaaagaggtgtctccatccatgtggaatttctgcaggcttacctca

SEQ ID NO: 239413 - DNA, 335 bp, Homo sapiens
ggcctgtcaaaatccaagtaaactaaaaggcaattcctccttgccactgatgcacttttgacacttggaaaaggggagagaaaagtctcttccacttcgcatccaacctataccctcctttcctctgtcgtctccctgcactcataacagagagggacggagagtcctacaagctgttgggtgaccgtggccctagggcgaaatgaaatcgctggccgcattattagggaaacatggtcttgacaattctggatgatcaaaatagcaataaagtctttgatgggaaagacaaaaagcaccctacttctctcccgggtagcagagtgtccaaataa

SEQ ID NO: 239414 - DNA, 474 bp, Homo sapiens
catccttcctgaccagtccaggtggctgtgctcctgcagtctcctccctggtctcgcacactttgacttccttactcaggaggcattgtgaagtctccccgcgatgccactccacctcctctgggattctctgccactcaagtgctgggacgggaaggaggcaccctgagtttattgtgtgagttgaagtggaaggtgatgaatggcggcttcccttggacaacagatctggccttggagtgaaaggaggaagaggctgagtgcagaatgagagatccatgtagccaccactgagaacttcagaccagaagagacaagcagagatactgcaacgcactcatccagagcagaggaaccctattttgagtttacctataggaccttataacaggcaaacatatgatgtcttcatagtattagaaataatgaaatgaaggactatatcagtgacctcctgaaaggttaactggaaat

SEQ ID NO: 239415 - DNA, 525 bp, Homo sapiens
ttacttcctactgcttgaaatctaaatccagagagatttgtggctcaaggatatcttcaaataaaagttttattgctaaaatgtcagttaaaattatgcctaggtaggtgctgaagtaggagaggctttgacgtagcagagtgactggcagtgaattttgtgggtaccttgtgatgagtcttattatcagttacaaatggtcaaaacatgcctaagccttcagctttactaaaagtttaacagaacttggcctggcgcggtggctcacacctgtaatcccagccctttgggaggtggaggcgggtggatcacctgaggtcaggagtttgagaccaacctggccaacatggtgaagccccttctctactaaaaatacaaaattagccgggtgtggagttgcgtgcctgtaatcccagctactcgggaggctgaggcaggagaatcgcttgaacccaggaggcagagtttgccatgagcctctcaccgttgcactccagcctgggtgacagagtaagactctgtctc

SEQ ID NO: 239416 - DNA, 91 bp, Homo sapiens
accacgcctatattcctagctccaccagaggttgaggtgggaggatcacttgagtctaggagttcgagtccaacctgggaaacctggcaaa

SEQ ID NO: 239417 - DNA, 410 bp, Homo sapiens
ctactacaatatttaaattggcctgtcagaggaatgctacctttgctacagtcagaaggttggcattaggaggccaacatgaaatgctgagtttgagaatgcgccatctcaataccaaaaaaacccagtaaaaacataggcaaaagacttgagtaggtgtttctccaagcaaaatatacaaaggtctagtaagcatatgaaaagatgttccacatggctaatcattactgaaatcaaatcaaaatcacaatgaaatactactttatgtcataaaatggctactattaagaaaaagaacagaaaattacaagtattagcaggaatatagagaaattagaacactttgtgcatatttctagtaggaatgtaaaatggttcagctgctgtggaaaatgatatggtgactcctc

SEQ ID NO: 239418 - DNA, 308 bp, Homo sapiens
tcatttctttatctatctgttcatcagatagccactcagttcctacagtttgcccatgtgcaacgcacgcactggaggcctcacagacgcactgtctcctcaaggcgcttgtcatctagtgggtgagaaagcaagtgacaaggcgttggaataagtaggacaggcactgtggtaggaagagtgcatgttctagaagcaccgagagggcacgtcacccccaccttggggtagtggggggaattcatggagacttactgggagatattatatatatctatgtatatgtacataataaatataaaaatgta

SEQ ID NO: 239419 - DNA, 388 bp, Homo sapiens
acccaaaagccactgcctttctgagcttcctctagtgagggagatagaccataaataaacctataatacattgtcaggtggtggtaaatttgataaagaaaaatcacaggccaggcgtggtggctcacacctgtaatcccagcattttgggaggccaaggagggcagattacgaggtcaagagattgagaccatcctggccaacatggtgaaaccctgtctctactaaaaatgcaaaaattagctgggcatggtggcatgcacctgtagtcccagctactcaggaagctgaggcaggagaatcgcttgaatccgggaggtggaggttgcagtgagccgagatcgagctactgcactccagcctggcaacagagcaagactccatctca

SEQ ID NO: 239420 - DNA, 492 bp, Homo sapiens
ataattggaaggttttatattagtaggttaaacctgaactttaacggtctctacttggtgactttggtagggactggtcagaagtttacttttgctttggtaagccccctcttcttagacagtcataaaatgagactcacagttaattaactcatagttccaatcatgttgttttctactcaaaatgtaaaaacttcatgtatcttacaggttagatggcttcagggttttgacctcagactctaattgctatttgtacatggtttatataagaaaatatattctgatgttcaaacaattgattttacatgtgcaagaagcagggatgaagaggaagagtgacaaaatattgataatgttagaatctggctgatggatatgtggaggtttgtcatactgttctttcttcctttaggtatatgttgaaatttttcataatttttcttttaagtaacatctaaaataaactgtatctataagacttacaagaaa

SEQ ID NO: 239421 - DNA, 444 bp, Homo sapiens
cactttactagaaacatgggagatagaagaacatattaaatgataccacacatacttaatcaaacaaacctgaaatgtaggataatctctagggcactggcctggtttcttttaaaaagtcagtgttataaaaaattttaaataaaaatgttctagattaaaagatactgaaaatcataatgactaattaagcttgtaaactttgattaagttccggtttggaaaaaagttgtatgtaattgattattggaaaaattgaatatggattgtgttttagatgatattaaggaatttttgttatttctgttctaagatgtaataatgtgattatgtaggaatgtatccttaatttaaggagatgagtatgttaaatatgatgttgcaacttcctttcaaatgatttcatgaaataaaaaataaatacatacaaatgcatgtaagtag

SEQ ID NO: 239422 - DNA, 472 bp, Homo sapiens
ggcgaggctaggacagcagtcctcggagaccctccgcgccctccccagcggcggcagggcggcaggagccagcagagcttttccaccaaaaccatccttctcagcaccgtgctcctcgcccgctttggctgatcctccagtgggagtgggggcctgggctgcctagggccttggactgcactgtgtcccttgaaacacacccaggaagggacgtgctcgttagcgagtctgctaattatcctgactgtgacatgcgtttgtcttagcctcctcacggcttcttcagcgggtggctggttggttgagataccaagagaggagcaaggccggcatgcgtcgagccctatcgcttccactgggctcagcctcgtgtctgggagggcctctaaaccatgagccgcggcgcagttaaaaataagacaggagaaaggaaaaagaaacaaggcaatacaagagaacttaaaaaaaaaaa

SEQ ID NO: 239423 - DNA, 204 bp, Homo sapiens
ttactccgtgtcacggcatggatgagcctccaaaacaccgcatccagggaagaaaccagatgcagagtgtacagctcatgtgggaaaggcggagggcagtgctggctgtacaacacgcatttcctgtcaccgacttgcacacttaacagtgagagaattttatgctctataaattataaatcaataaaactgttttagaaacaa

SEQ ID NO: 239424 - DNA, 331 bp, Homo sapiens
ccggagatgattatgtctaagggtaatcaggtcacggaagtgtgaaggtaagataaataaggtaaatacaaaaatgaaaaaaggcttaaaagaagcaaaagggagttggtggcaaagaggctacataatagaagggagatctaatgtttggaatatcattaagcagtaagccacgagagacagtctattgcagctgtgtgattgcagtatgtctcggttggtgtcccaagccatgggggcaaaagctgagtgactttaacttctcaggaagtgcaataatcctttcagaatacagtgcctgcaggcctactgccatcaggctatgaaattt

SEQ ID NO: 239425 - DNA, 788 bp, Homo sapiens
gctcttctaaaaaactgctcaacatcaggatagctgtgcttgtacaacatatagtatgtagaacatactatataactacagtatgtaggacataccacataactatagtattagaacataccatataattatagtatgtacactatagttcatgtgtcattttagtaaaattctttttaactgtaaggtaaatttacttgaatccaatggaacaaatttatttaaaagtactaggagttacaatgtatatcatgacaagggaatatactatttctgaaaatcagttaaggaatgctatattaatcattgcagtttgcatttagggaattctgcagtgaagccacagggcaaggattttattatgctgctgttctgtacatctattccttggagtatatgttaactgtgagctgtaaattgcttgcctttgaagatagcttttgtaactctaaagataaaatgcaaagtcagcactatgactttgtttttttggataaaaaaatagaatgattactcttcaaagcataattgattttcccctttcaaagtatttatttttacatataaacatttattttaatgtgtatgtataccttataaagttttttatatacaaacaacagaaagttgaaatgtgattgtactaattcagtaatactacacatattggtaacatagttgttctgtagttctgcaatatgtatcatttggtgggagcccttcttcctgttccccataggcatgtctgtttattgaagagaaggatagcgggaaaaaaggaaagggtc

SEQ ID NO: 239426 - DNA, 1602 bp, Homo sapiens
  misc_feature (1090)..(1090): n is a, c, g, or t
ttttccttcacttaggatcatcattatatcaggcaaggtccttgaagattttctagccttagccatgcattttgctgatgaggaaacaggccagaaaagggtactgtgacttggccaagctctcagagtggcagaactaagataggaacccagctcccttggctgttagcctagtcccctttccaccacacttcaaacactgtcactgcccatgtcacagggacatggcatgttagaatcacccctgtcaagggaaaagtggatggtctcagtaaaatggagattagtacacagctttgagcctttcagagtttccagttgcccgcacctgatgtcccagaactattttttccatcttcccctagaactggcgccagcactatggtggtgtggatgtgagatgagggcctgtttagaaaaagctggacagcaaattcaaacaattgttaatgagtagtaataaaggcctcctggggtgtaaaatttttgtaagacactctgaaacattttcatattttaggtaagggtctagaattaacttggaaattttgggctagagcaaatggctcgataatttgaagaccagtgattgtgtctttgcttttgctacctgtttcagggccatctacacacacccatagtatccactgctggtattctttaaggctggttatgtgtaagcatttctgccatggccagggagaaacgggattcaaatcaattcatccatttttgctaattgctaatcgtttagaaagaaaagtaagcagaaggccgggcacagtggctcacgcctgtaatcccagcactttgggaggccaaggtgggtggatcacgaggtcaggagttagagaccaacttggccaacatagtgaaaccccgtctctactaaaaatacaaaaattaaccggacatggtggcacatgcatgtagtcttgggaggctgaggcaggagaatcacttgaacccaggagacagaggttgtggtgagctgagatcacaccactgcactccaccctgggcaacagagagagactctgtctcaaaaaaaaaaaaaagaaagaaaaaaagtaagcagaaagataaaggnatccaattaaattgggtttgacttttatctttgtttttactgttctcaaatgaagaattgatttgcatgtctttcttgcctgtagaagcatttgatttccttctgtgaactaatctgtagtcttcatttctcttgaaatatatgcccactggtataaaaaaggctaatgtaaacatgttggccatttaaaaaattttctgctaaaaaacctatcagtgtagtttgcagatgcagttagaaagagcagaagtaggctgggcacggtagctcatgcatgtaatcccagcactttgggaggccgaggcagatggatcgcctgagtccaggagttcaagaccagcctgggcaacatggtgaaaccctgtctctacaaaaatacaaaaattagccaggcacatgcctagggtcccagctactccaactgaggtgagaggattgcttgagccagggatgtcaaggctgcagtgagccacattcatgccattgcactccagcctgcaagaccctatgtc

SEQ ID NO: 239427 - DNA, 1628 bp, Homo sapiens
  misc_feature (1573)..(1573): n is a, c, g, or t
tttttaattttacttttctttggtcactctggtgacctacacatggcataaccttaggtagaccccatcataggcagttcctgtgatagaattatgtgccttcctagctccacatggtttgtcttttccaaatctttattggaagggatgagtgtttgaatctcctttcatctggcctttgggactagtaggaccacagtcacagaataaggagttctggttacaacccaagcagaaaatgattcctgaatgttgagttcatagtagctgtattccccacacagttcaaatggtgacattcttaaggcagaggaagaagaacagtcaatccttttatttaattttggcaagactgtggtttatggtgctctggggaaatgcagccacagatgtgtcaacctttaaaaaaattcttggcagtctaacctttaagtcataaacctaaacacagacagtgcatccctgaaaaaagctcgtgttggctgcattgcacacctctatcccaccttccaagacacccatcattccgtctttgcttgtgaaatgcaagttctgtttattttaatcagtatttatttcctagatgatctgggtgcgttgtgattttcaacatgtttgacagttttatggttagctcagcaatcactctatattattcactcccaagatatggataagcacaagggagttactcctttccaattctgcatcgatgttggacctctgtcaagaagcatcataggaaggtggttaagcacatggacactggagccctactgcatgggctctagccctagtttagcattgtatctactgtgtgactttggggaaagttacttaatcttactgtgccttgtcttcaggaacaagaacagtacctacttcctagagcagttgtgaaaaccaaaggagttaatttgtatatagactttagggaagtgcctggcacaatataagtgcttataaatattatctgtcaatattgctaaaggacaaacactatgttttcatatattttacttacatgataatcaaaatgagaaactagttattgttatttaattcattaagtcttctatcttcccctgtgcttttaaaggacttaattaactagagttattataactccttttggggaaaatttctatttttacacatacacagataggaacatgtatgaaagtatatcaaaatgttaacagcatcatctctgggaggtttgattatgaatgatcttaattcattttcattttttcctcatttggatttaataagtctctatacacattacttatagaactttaacagagcaaagaactcaactaacatttctagcactttcagagaatattattcatattatatttgcatgtgttttgtgtgaaacttcacatcaagtattttatgccttaactttttgtgattctttcctcctgtgttttctctgttcaagtgaacacatcagtaggatcagtgatttgtcatgcacagacacagcacataactccacatttcaggtaacagctctttttgtgtgtgtgtgatagatttttactcttgttgcccaggctgnagtgagctgagattgcaccactgcactccagccagggcaattgagcgagactctc

SEQ ID NO: 239428 - DNA, 193 bp, Homo sapiens
ataggtccaagaagaggcacattttactgagttttactttcacattggggcaataagaccttatctatcattcaccagctgtgtgatcttgctgggcttcagtcttctcatccattaaataagaatcacagttcttacctagtagtgatattgtgacatttagacatttagtgacattagacacaatctagaa

SEQ ID NO: 239429 - DNA, 522 bp, Homo sapiens
agaatggggggagaggaggcagctctgacagatcaaggttacaggagctcaggatgggcaggagactgagaggctgaccggatataaggcccagagcacagaagtgctaccttatgaggcttctctgaaggatcagcaaagagtaagtcaggtgcctgggcggagtgcaagactcagatgctgagcaaagggtctgcaaagggagcaaacacaggatcccagagagaggccccaagacgacggtgcacagggaaaggaagcctctaccgtgatgtgtagagtaactactgactgacctgtggcagggaaagcaggagccgtaaagagctatgagctggtgcccacatgggaaacattcatattgcaaggcaaagattcttgggttggataaaatttaaaagaatgctgctaaacagaagaacaacaaaatattaaaaataaaaggttgggacaaaagaatagcatgagaacacatggaagtaaaaagcagggatcacaatattgcttttctgttaaaaaaaa

SEQ ID NO: 239430 - DNA, 350 bp, Homo sapiens
tcccatgcacccctcccccttcccacagcagcccactgagctcggcccttgttgaccccactttctgggatactcttccctactctctgcatctagcagactcttattctcccttcaaactcaaactcacactttccctaaggcccatatacagaacaatctgttctcttcccacccactccacagcactctgtacttccctctagaagtctagaaatttgaaatagtaccatgagttccctgaaggcactaactgtgtcttgttcttctttacttctccagcctgatgacagagcaagactcagtctcaaaaataaataaaaataataaaacctccataagtaatcctg

SEQ ID NO: 239431 - DNA, 506 bp, Homo sapiens
gattttcctggctcaaaatgaagtttgacaagtcttgttttatactcttgtcatcactgggatttcttctgactttacaagaccaacaggaattggagtcagactcacaggggagcctgagagcctctctatcccacaccgctgtgggagccacgcccaggtggggccagggctgcagagggggaagctgggaatggctgggcaaggatagaggcagctcagcttcccctaagcctggggtggcctgaggggccccctgcactatgctggaacgtaccttcctttccaaggaaggaaaacagcagcttctgactcatgactgtgtcctcctgcagacaagtacacagctcatcccctcagagtgtctgagtgctgagctcacatctcatggtggggtgttgcggccatgtcgctgccccatcccacgggcatggtgaggattctgttactgcacactctttagggtcctttatagttaataaaatattgaaccacttccatactgg

SEQ ID NO: 239432 - DNA, 459 bp, Homo sapiens
tcagagcgctcatgagagatgggctagcacagccgagcatgtatgaagggccctggcacaggtcctggcaaccagctgctcagtagatgggtttccagtgaaactggtgaccgtgagaggttgactctctaaatggcaggggtggctttgtgtctgtgtgaccatgcatcccatcaggaaatgatattttagtgcatgcccccattgtgtgcaaatttattgataaattatgggcaagggcggcaatgtagcctagtggttaagggaacagcctctggacacagctccctttggaaccagtgggcacttaaccttcctggctgttcactgtgttctcaagtgcagcccacagcccccgtgtggccccgtgtggtatgcctccccgcctttcccccaccccccagggctgtgagtacatgtgattaataagctgctgtcaagctattaaaaacaaaaaac

SEQ ID NO: 239433 - DNA, 3024 bp, Homo sapiens
  misc_feature (910)..(910): n is a, c, g, or t
  misc_feature (1661)..(1661): n is a, c, g, or t
  misc_feature (1798)..(1798): n is a, c, g, or t
  misc_feature (1968)..(1968): n is a, c, g, or t
  misc_feature (2014)..(2014): n is a, c, g, or t
  misc_feature (2103)..(2103): n is a, c, g, or t
  misc_feature (2227)..(2227): n is a, c, g, or t
  misc_feature (2313)..(2313): n is a, c, g, or t
aattaaaggtggaaaagggggaaacgtccctgcaaagttctgagacacatcctcctgaagtggctcttcctcctgtgggggagccgcctgccctggaaaattccactgctctccttgagggagttaatacagttgtggtgacaacttctgccccagaggctttgctggcctcctgggcgagaatttcagccagggcgaggacaccagaggcagtggaatctccacaagaggcctctggtaagcgcaacatgaagagcttattctggtccaatggggaaataagcttagtagatattaatcactggtacattttagggtatatcaaaatccctttgagggccggtgattcctggaccctgcccacagagtttctggtgcaggtctagggcaggacctgagcatttatttgcatttctttttttttttcctttttttttttttgagacagtttctcccttgttgcccaggctagagtgcagtggcatgatctcagctcaccgcaacctccacctcccaggttcaagcaattctcctgcctcagccttcctgagtagctgggattacaggcatgtgccaccatgcccggctaatgttgtgtttttagtagagatggggtttctccatgttggtcaggctggtctcgaactcccgacctcagatgatcctcccaccttggcctcccaaagtgctgggattacaggcgtgagccaccgtacctggcaagagtttgcatctctaacagtttcccaggcagtactaaggatgctggtctggggaccacagtttgagaaccactgctctaaattattgatggcatcagaaggggatagcagtctggttttctttctttaccctttaagcaatttaaattaaaggcaaggtctaaaattaattgcctgcaactgagccncagaatggcattaataagttatttaaaatatttcccagcgttttcattgtaaaatgggtaatacctaccttatatgttggaagaattacagaaagtacaacaaaagaagacaaactgcttagcataatccaatgtgtgttaagagctgagacccctgagcttatttcatgaagccctttccagacactctgggttagtctttctaccatctgcccacctacaactatactacttccaactagatttttaagttttaacaggaactgtcttgtatgctttttgttttgttttgcttttgatatggagtctcgctctgtcacccaggctggagtgcagtggtgcaatcttggctcactgcaagcaccgcctcccgggttcacgccattctcctgcctcagcctcctgagtagctgggactacaggcccccgccaccacgcctggctaattttttgtatttttagtagaaacggggtttcactgtgttagccaggatggtctcgatctcctgacctcgtgatccacccgcctcggcctcccaaagtgctgggattacaagcgtgagccactgcgcccagcttgtatgcttttctaaaggagaacagaatagagaagaggttaagttaggatttcagggttcacatcttggagctggtcaatcaagggtgatgggccataatgcagtcttacatcagtatgtcatcctggtgtgcgggtacctgtctctttcctttgccattgccaggtgtcagntggtgtgtggtccatgggaaaagtctccctgcagacacagatggttgggttcacctgcagtttcatgctggtcaagcctgggttccagaaaagcaagaagggagagtgagtgcactcttcttgcttcctgcctccanttttccacccccgcaccttgaagacaatatgttgtgccccaaatgtgttcacaggaacaaggtcttaataaaaagcctccaatgggaatagaatatcaggaaaaaggccacatctatggtaattaatggcagaaaagctggagagttggattctgcggtgctgctgacangtgaactctggtcctctgcacctgtttatgggccatgcagactggnggggtggcagatgttagcctaagacccctagcagtgcctgttgctttgtgagtggagatagagactcttacatttaaaaatggaaaaanatttcacaaattaccataaattgtagttaatatgtagaaaaactcattcatactacttttctaaaatagacatgacttcagcagcagcttttttttgttgtattttgagacagtgtctcactgntgcccaggctggagtgcagtggtgcaatctcagttcagtgcaatctccgcctcctgggttcaaatgattctcctgcctcagcctcntgagtagctaggtacaggcacctgccaccacacccagctaattttttgtatttttagtagagatggggtttcaccatgttggccaggttggtctcaaactcctggactcaagtgatcaccctcctcagcctcccaaaatgctgggactatgggcatgagcccctgcgcctgaccttcaacagctcttttaagtgagttcttcagctaagcattgtgatggacttgagtaaaatggtagttggctcttgtgctcaattttctcttcctctgaacactgactactttaggagctgcttcattccaattgcaatttcataaaacgtaaagtattttaaggcaaagaaaggctgttaattccctccctcccccaaacacatgatttttaatattctaaacaatatttttcaaagttctcttaataacctgagatttctatggtttgactccaggatcaaaacacaagggactttgtattatttcacttataattgttttgtatatttctggagtttaaaatgtttaaggttgcttcccgctcataaatacataatatattgaatttaaaatgtgtttattaaccgattctccataaataaaaataagatgtgtatgtaaaataattcatctgttgtatttagagaaccatattcattgcatgcaaattttattgttagtgttcttaactcaagtaggagtaaaccaaaaagtgtg

SEQ ID NO: 239434 - DNA, 437 bp, Homo sapiens
acatagttttaaaataataataattataataacagcagttgaagttgcgtgtcaggagcgcgtcctctctctccagcagtaagggtatctaattataataattaagtccaagtgaccttgccttctttaggcaaacaaagtcgggaacaagttgcaactcattttcagaaaaaatcctcaagtcctctgcccacggcggaaagggcggcgggtcggccgagcctgggtggcttcccgaggggtcgcctctcgcccagctcctggcaggggcgcgtgggtcctggcccggggactgcagggccgcggcggggcgggcagggtcagctgggcacatagtttctcggaatccaccctcccggacccccgcagcccagtttctcctcccctcagcccaccttctctgcccacctcctacccggagccggggaggcggccgc

SEQ ID NO: 239435 - DNA, 441 bp, Homo sapiens
cctgggaggcagaggttgcagtgagccgagacagcgccactgcattccagcctgggagacagagctggactccatctcaaaaaaaaaaaaaggaaggagtaatggaataagaacacaaatgataaaagaaagtcatgtttgttgaatacaggaatgattgagtgaatggggttcacaaacaacagaaaatgagctttggggcaagtaattcaatttagagtaatttttagtttgattgaaacatatatttctcagaaacagcagtctttttctagttcacttttaacaagaccattgttactttggggattcccacctcgtttttaaatggtccttttttatgctttcttaatatatttaaaatgctgccaactatcaactcaacacatattattccgttatcctaattactgtcatcattaaacacttttgcagttcaca

SEQ ID NO: 239436 - DNA, 399 bp, Homo sapiens
aaggactgtgtctcatggtacagcaacctcagctaataaaacattacgtatttcttactgtcagaacccatctcaagaaacacagttatgattgtcaatctaatttctattaaacatgctttgcatgtggaatgtggaatccgagaagaattgaggcaaaggaaaaagttattttatagcctcattgaagattatagttatagaaagagatatgaattcttaattgctttcatgattattgaaattagtattttaaataaatattttctgtatatagtactttactgtagctattcagataaggagaaacagtctgaatatacttttatatctaataacaaatgcaatccaagaaaacaccagttcaaactacatttgcattaaatggcttttgaaaat

SEQ ID NO: 239437 - DNA, 526 bp, Homo sapiens
tgagattatctgagaaacttgcaaaaaggataccaatggtcagggagtacctcagaccaactcgatcagatttctggtggttggcatggggattgggattgtatggaaatgttctccaggtgactttaatagcagctggccaagtctgcatttgtggaaatctgcagtatttgaagtttggaggagatcaatttttcatcctttccttcgtgggataaagaatatttcaaccacctctggagaccaaagagttctgagaagttttgaaatagcttgggaaatacaccacgtgcttcacacttcatttttctcctctctctttcattgtttgacttaattaaaatattgtaatgcaagaaggagagatgaggcaaacgtttagagaaggaaaaggaaatgggttcatgtttaaactgactctgagcaagcatggcgatggtagtttgaaagaattctgagcatgtaggaaggtaaactcaaaatgttcttcctgcctgagaagtgattaaaatacctgtgagcacca

SEQ ID NO: 239438 - DNA, 767 bp, Homo sapiens
gtctgtgtggagacgaaagctgcccacaagggagcgagggagctgggagggggtggtaagagatgaggtgggaaggatgggttgggtgaaccttgaaataattgtagttgtactttgtggaagaaaaaaaactttatcatcaaggctttgtcctgatccaacctgaccttcccctcagttaatccgaattactgaggtttgactccatgttcagtttctctgagatttgctttgatttctcttagaagtggagctgctgtttattctcccggtggctctgtgtacacgctctgcccgtggagctgcctgggatgagccgtgagtcctctgagaactgcttcctgtttcgtctggtaactcctaagcctgcctttctttcctacagtctgcatttgtggaaatctgcagtatttgaagtttggaggagatcaatttttcatcctttccttcgtgggataaagaatatttcaaccacctctggagaccaaagagttctgagaagttttgaaatagcttgggaaatacaccacgtgcttcacacttcatttttctcctctctctttcattgtttgacttaattaaaatattgtaatgcaagaaggagagatgaggcaaacgtttagagaaggaaaaggaaatgggttcatgtttaaactgactctgagcaagcatggcgatggtagtttgaaagaattctgagcatgtaggaaggtaaactcaaaatgttcttcctgcctgagaagtgattaaaatacctgtgagcacca

SEQ ID NO: 239439 - DNA, 485 bp, Homo sapiens
taggtgataactattcttgttatcagcagtgctgcggtgaggattaaaggaaataatatgccacgcttagttcctagacctctctaaactgcgtctatgtcctagggggagaactgaatttggaaaccacattcaacccttatgaattgtgaggacaggcaatctgcctgtgtctctgagcctagccattctttacagttgatcagttttaaactcttctgtgctccctactcccagatttttctaccactgttagtctctccatgaagcccgtgtggaaccttggctccagtgtaaatacacataaataaatacccattctctttcagagcatttttttcttcctctgcctttgcataaacctgactctgactttcaaggatgctacttcctgtgtttccttgtttgctcatttttcactaaaaagttattaagcaacttttattttccatgtattatgctggattctggcaacaccaaaaaga

SEQ ID NO: 239440 - DNA, 318 bp, Homo sapiens
tgatgaagtgccagataggatgggaatggaagatatcgtggaagccaactatgagtttgcaagctttgccttcttgaggatggaggatcgctgtagaggaggaaacaaagctggagggtcacataccagctcttcaatccttggcctagaattcacacctgctattcccactcccaggccattggccagaagaactagtcacagagccatgcctgtatttaagcaacagcgaaatgttaagcatgtggggagcagtatatgcctccgccaccctggctgagagtgtgtgtcaataaaccttcttggataaactaatga

SEQ ID NO: 239441 - DNA, 130 bp, Homo sapiens
ggtcccctcctcttttccttttatatctctctcaatttctccctgtctctccctctcaatctctgtccctcacagatgtttgagagagtccagccatttggccaaattctcccccctgctgttggcagct

SEQ ID NO: 239442 - DNA, 119 bp, Homo sapiens
tcctcctttttttttttttttgtgcccaactgctcagcccagctgctaggttaatttttgatgtctctttatacaacttgtcatgactttcttcatattagctttattcctctttactc

SEQ ID NO: 239443 - DNA, 349 bp, Homo sapiens
agtctgagcagacactttaagccatgttgatctagatcaccctattgttccttctgacctgttaggatgactgcagggtgttcagttaaattttttccaggaaggaatctcctgaaatagaatcatggaaaaggcttgtggctagagtcctgggtttgaatttcagcaaccatttagttctcatgaccttgggcaacttctacttttagaaactcagtttccttatcttcagaatgaggataatagtatccactggcaggtgattgcaaaagagtagatgtgaaaatgcccatgaaaaagggctctgcagactgtaccaaaagttcagctattaaagccatttgttgtt

SEQ ID NO: 239444 - DNA, 456 bp, Homo sapiens
gcctgggcgacagagccagactgtctcaaaaataaaaaaaaataaaaataaaaaataaacaaaattttaaaattaaagaaagggggaaacttggaagaaatcttccaagaagtagattaaggaggcaaagaaacagaaaacaggagagaaaagaaaattttaaggtcaatccaggaagtgcaaactttggctaacaggaattctaggaagagaaaacatggagaaaaagacagaaaatcttcaaagaaataatatctgacttttaaaatgggcacatgttttaccttgataaaagtaattaaatcatatgggcaatcacatatctcaatgtttaggtgtttacctgcatgaagtaggtatataaacattattatatattatactatattgttctctggttgttttctatggattatgccattgtctcatttcaattataacctcttcacatccagg

SEQ ID NO: 239445 - DNA, 383 bp, Homo sapiens
ctggaatcattgacacatgctgattcagcctcacgtgcacatctttggaatgtgggggagactggaacacttggagagacccatgcagatatggggagaatgtgcagactccacacggacagttgccctggctggcaattgatttttttctcatcaacattatatgaaacagcattgagtgaaactgtgtgatttgaagacctgttgtagttccttgggaaactgactcaatgtcatgaccttactttatcaatttctaacctgcatttcctgtatccgacagctctcaaggctaaacagtacaaaaatggaaaaagagaagtggattaagttaaccagagtatcattgtatcaagtctcacttacaaattagaaaaagttta

SEQ ID NO: 239446 - DNA, 477 bp, Homo sapiens
ccatctttcctttattctagagctcctggcacacttacatgaatctcttgaaagaagagaaatgagagcattcattccatactaatacaattgtgccctatggaaaggctttttgctggcagacatagtagacggaccatttcccaacttctttttctttgccaccttccagccaaaggtgtccatatgacacagctctggacaggataattggaagtctgttgtgggatttctgagaaagcttttgattttctgacagagacatttttgcttccccttaccacttcctactggattacagatgtgatggaaagagctgcagcagccataatacaaccataaaggagaggagaagagaattgcaaaggcatcaacccacattgaattgaactgctaagttaacactagcagttacttgcctccagatatcttggtgtgtgagaacattaaatctgtatgtgtctaaatcagtatggg

SEQ ID NO: 239447 - DNA, 451 bp, Homo sapiens
ccgccaagcaggtatgtcatcttgttggtgaagacaattgataaccaaatctagcattgaaggtagagaaagaacaaaacagggacaagacataggacagtaagatgccttagctatttggtaaatgttgagagatgggaagaaatttaatattgaaagtctcaattatctactctaatattacaaattattaagcacttaataaacataatttgatgatgaaataattctctgtgaaaaagggtatacacatagataaacaaatagataatagatgatggatagatagaagatagatgtgtgtatgtatatatatgtatatatgtatgtatgtgtgtaaatatattatataatctgttatatatgataatcatataatctataacttatagattataaaatcataagtctatattttattaaaatattaaatctgttttattatattaaa

SEQ ID NO: 239448 - DNA, 399 bp, Homo sapiens
actctgccctgataggcttactcatcaagaaccacacagcatcttgcttggctaaaagcactttgtttagaaccaatggggcaagggattaaattggctcacccaccaagtctccatataccgaggggctcagagtcctcaaagcagttttctcataccttttgagacacactgcaccgccagagagaaaaatctatgtagtgctttcatgtcagtgaatgtagaaatcacagctgatgtcagaaaagaggttaagaactacttcagagtgaaacaggccagccgtgttcattcccatgacctaacataactaaaaaccagtagataaatagtggtactgccctatttattattagccttttcaaaccagctgtctcctggcttatggcaaccctaaat

SEQ ID NO: 239449 - DNA, 403 bp, Homo sapiens
ttcacctctccaaagacccagatcatcatttccaactgcttattgtacatttccacttggataacacattgactgtgcagattcatatactgtatttcatcagatctaaattttcatcaattataacataacccattattttatataccgctaagaaaaaaatgccactaatttgttgatgctatgctattcattgtgagaatcatagcaaattgagagatgttaaaaattgggatctaattaaactaaagagcttctgcacagcaaaaaaaaaaaactaccatcagagtgaacaggcaacctacagaatgggaaaaaatttttgcaatctactcatctgacaaagggctaatagaatctacaaagaactcaaacaaatttacaagaaaaaaacaaccccatc

SEQ ID NO: 239450 - DNA, 447 bp, Homo sapiens
ccccctttctctcacaacacacacccacacacagtgcatgttagtggttcaatttaatattttttaattttaatatttaatttaacattaatctaacattttccccaaacatactatttatctttctactcagtcaagacgtagtctcatgtaaaggcttcaaacaggcagatggaaagaagaagactcctttactatagagggttggcctgggccctgagccgtccccacccgacccagggggcatctccttggtggctctggtctgtggctgtttccacagtgaagcaaatatcctttctgtcaggtcccaggggacaaactctgagccagggcatgtggtgggggcctggggactccttaaatcctcccctctctcctaccccctaagggcatctggatcctctgggtaggatgcagagcaaggaccaggccacctgcctccca

SEQ ID NO: 239451 - DNA, 436 bp, Homo sapiens
tccatggatgcagtgttaccatcgaggagctcgaggccgaggtcgactctggcaccctgatgacaagtctggagattcagcagtagaaagaaagcagaatcatccagggatgcagcgttaccatccaggagctcgaagccaaggtcgactctcgcaccctgatgacataaccaagtctggagattcagcagtagaaagaaagcaggatcatccagggatgaagctttaccatccaggagctcgaagcccaggtcgattctggtggcaagatggcagcaccaatctggagattcagcagtagaaagaaagcaggtctcatgatctgagtgtgtaccctctccaggaaggaaactgcatcaatgtctgttcctgttaaatagcaacttttagtctcagcttgttttgttttgatgtcaataaatagtaacaacattca

SEQ ID NO: 239452 - DNA, 371 bp, Homo sapiens
ccaccatccacctctgcaactcttcatcttgtaaaatggaaactctgtacccgttaaatcataactccctattgccttcagctcttggcagccacaattccaccttctgtctgtatgcatttgattattctagatacctcattagtggagtcatagagtgtttgtccttttgtgactggcttatttcacttagcatagtgtcctcaagatttgtccatattgtagcgtgtgtcagccaattgatttttgtatgttgatactgtgttctgcggctgtgctgaacatgttcattagttccagtagtctttatgtatctggattcattaggactttctgtgtacaagagcctgtcatctgtgaatagagacagt

SEQ ID NO: 239453 - DNA, 463 bp, Homo sapiens
gacatagatttatgaggtactgatttattcatattatcttctaaattataaagattgacacattttgaaatttcatattcctgtttgcctgctaggatttgttataatagatttaagttgattgtatatactgatcctaaagatatcagtacaatatagatttgatcactactttgtaaatagaagaagaaatggaacaaaagcatgttttcagttatatactttttcacattactgaatttagattagagcagtccaaaattgcacacatttctttatattatcgaagatacagtttctatagtattcattttttttttttaaagttttaggccggttgctggccggatgtggtggctgatgcctataatcccagcagtttgggaggccgaggtgggtggatcacgaggttgggagttcaagaccagcctgggcaagatggtgaaaccccgtctccactaaa

SEQ ID NO: 239454 - DNA, 333 bp, Homo sapiens
aggtttttactcaaaggcaatgccagagtccttagaatgaccttcaactttaggtctccaaataccctttcctaaaccccctcccctaggcccaccctagccaggagcaggtgttgccctcgaggccttaccatctgcccttctctctgcctggaactctcttcccatcatccctgtggccttggctccagtggtgcttctcaccaaggtgagtgctgaccacctctgctaccatcactccccccgcccctgtgactccggattctcttaactcttttttttgagatgagtctcactctgtcgccaggctggagtgcagtggcacgatcttgg

SEQ ID NO: 239455 - DNA, 461 bp, Homo sapiens
caggggccactctatggggtcgctgtgctctgttgggaaggctttgctctggccggtgtctcccaagggaggcagtgattttgggtggtgcagagatggacacttttcttgtcagtattatacaatgatttccaaagcatattgggaaaaaaccagcccatcaaacctgtttagggagagcctaacgtaggcacttagctcaaaacaatgagatttgctgacttacttactatatggagtactttgtaatctcccccacccttaagaaggttctttgaaattctccccactcttgaggatgtactttgtgagatccacccctgcccgcaaaacattgctcttaacttcaccgcctatcccaaaacccataagaactaatgataatccaccaccctttgccgactctcttttcggactcagcccgcctgcacccaggtgaaataaacagccatgttgctcac

SEQ ID NO: 239456 - DNA, 475 bp, Homo sapiens
caggggccactctatggggtcgctgtgctctgttgggaaggctttgctctggccggtgtctcccaagggaggcagtgattttgggtggtgcagagatggacacttttcttgtcagtattatacaatgatttccaaagcatattgggaaaaaaccagcccatcaaacctgtttagggagagcctaacgtaggcacttagctcaaaacaatgagatttgctgacttacttactatatggagtactacatgggtagccaaggaagggtttggcaaaagctgaaggtggggagcgggcgtggtagctcacgcctgtaatttcagcactttggtaaccgaggtgggcagatcacttgaggtcaggagttcaagaccaacctaggcaacatagtgaaaccccgtttctactaaaaatacaaaaattagctgcacgtggtggtgcataccagtaatcccagttacttgggaggctgaggcag

SEQ ID NO: 239457 - DNA, 379 bp, Homo sapiens
  misc_feature (33)..(33): n is a, c, g, or t
aacgctccaggcacgatgtagagaatcgccccntccaaaagcatattgggaaaaaaccagcccatcaaacctgtttagggagagcctaacgtaggcacttagctcaaaacaatgagatttgctgacttacttactatatggagtactacatgggtagccaaggaagggtttggcaaaagctgaaggtggggagcgggcgtggtagctcacgcctgtaatttcagcactttggtaaccgaggtgggcagatcacttgaggtcaggagttcaagaccaacctaggcaacatagtgaaaccccgtttctactaaaaatacaaaaattagctgcacgtggtggtgcataccagtaatcccagttacttgggaggctgaggcag

SEQ ID NO: 239458 - DNA, 494 bp, Homo sapiens
tgaggaactttgaagctgattctaaaagggtcaagatcacgcaagacattctgggggaaaccaggttatccatgttgagtaaaaacaacaacaaaaatggaatgaattttatttctattgcaccaccatatacaatattaaaatccattcaagtgagattattgcttaaacgtgaagcaaattattgcaaaacattataatttcaggaaaaatatagagaaataaattatgacctcagcatagggaaggattccttaaacataatgtaagccatacaggaaaagatcgacattacattaaaagtatttcttagtcaaaagaaataccataaaaagaaatgaaaagacaagaagctagactgtgatgagctatctgcaacatacatgatagcaaatgattactctccagggcagaggaaaaagtactaagggtaagtaagaaaaatatacaaataattcaatacaaaaattaaccagaaacaaggcaaaaaaaaa

SEQ ID NO: 239459 - DNA, 468 bp, Homo sapiens
caccatgcccagctaatttttgtatttttagtggagacgggtttcaccatgttggccaggatgttctcgatctcttgacctcatgatcagcccttctcagcctcccaaagtgctgggattacaggtgtgagccactgtgcccggttctgtggccttttctaacattatccaagaagccctaaggttccttatgacaggtttggggattgggaaagttcaattttattgtaccgccaatgaaaaggtgctatatttttttcttgaacctcaagggcagaggctgaattaatcatattcctcagctcattccacattatcatggcaaagcctctcttttgctttatttatttattctcttttatcttcatacttaatctcattccattctctgccatgggcaaccattctaatgtgttatgtataatttttgtatatatgtattattataaaatgaggattcttgttttg

SEQ ID NO: 239460 - DNA, 386 bp, Homo sapiens
ataatctggaaatggaatcagtggatcagttgatcacccaaatgtggggagggaagtagtggaggcaaaggcagggttgagagaatagaaaaagtaaaaaatgaattcaaggttttctagctttgacgactgggtgtttgataatgggacacataatacagaagggaaaagaagtatggaagtacactacaacagaagatactatgtgcagttttgaacatgataagctcaaagtacctgtaggacatttcaggtacacatgttcaggtgttgtttggaagtactctctggaattttagagaaatatcagggctaggtttgtagatatggagtgtatcaggctagggaattgaagctatcactaaaggagaacatttagagtaagc

SEQ ID NO: 239461 - DNA, 635 bp, Homo sapiens
tcttctgctctttcttaaaatgaggacagtcccctttcactacattcctaaaattaaaagtttacgtgtgtgtagagattaaaagaatagcacaatggcttgttgtgtataaaaaatatcaaattttgtgtttttcaacataaataggagttgaacagtatagattgcattaaaatgtttgaatgttttaataatacaataaaatagataattagctattaacctattaaaataggtatgaactattagcataccttatgtaggtgaggattggtaggctatacttcaaaattggcaggaatgttttgcaattattcttctcaaggttattaatgattattaaaaattctcttggtattttttttcagaaacttgctcttctttattgtgtacaatgcctgaaggttgtcttagaagtaagctaggctagcactggctcttcccgtgccaatccagatgttccttttgcaggcaattactcctcagtttatttccccagtttatttcccgccaaggatttgtctttttccagggagccaattatgcacgtcttatactataatctgtgtcacttgaatctgaccctgggaaattgcctactttaggaggttgtgctacttaagatcttctaccag

SEQ ID NO: 239462 - DNA, 431 bp, Homo sapiens
tgagagtcactcatcacgagaacagcatgggggaaactgcccccatgatccgattacttccacctggtcttgccctttacatgtggggattattacaattcaaggtgagatctgggtggggacacagagccaaaccatataaggcacactgctcaccaacattaggtagagttcatacatttctttctctcagcaatggacaatggatacattagaatgaggatgattgctgcaatgctaaccagctaataaatagaagtggactgggatgagagtccaggcaattgcctaatgagccccgctatacatatttgcaaaaatgtagaatgatgccattcttttttgttttggcaaatagttatttttcattaaaaatgtaatgttatgttaatattggataaaaattgatttaataaaaatgttataacatg

SEQ ID NO: 239463 - DNA, 523 bp, Homo sapiens
cagagctggcatgtgaatccagctgccctggcctgcaagctaagggcctcgtgtcttacctctgctgcctcacagtcctgtgggtgtttctgtagtcgctgattactcgttgacttatttttgcttttaagacatcttagtataacgacaagctcctggcatgtactattcttaggcatttcacaggagaagttggagcctgggtgggtttggggaggcacccctagtcttggccgctgctccgcccttccaggccacagtttcctgcacatgcttgtgcagctcagtggtcattcgctgtggaaatagcagaattgctcattttcaatgtccggccccatcaaccttcaaaatattccatggcgggccctgtgcctggtccttgtgcatggccttggaagacatggccatggaattaaaaaacaaaaaagctttgactatcagttagcagccatccaacaaatcaagagaccttgttttgaactcttgaaaaagaacataaatgactgtactttttggagga

SEQ ID NO: 239464 - DNA, 220 bp, Homo sapiens
caaaaaaaccatcctgggcaacatggcgaaaccccatttcgacaaaaattaaacaaaacaaaacaaaacaaaaaaacagctgggaatggtggtatgtgcctgtagttccagctactggggaacccgaggtgggaggattgcttgaactggggaggtggaggttgcagtgagctgagatcatgccactgcactccaggttgggtcacagactgagatgcca

SEQ ID NO: 239465 - DNA, 135 bp, Homo sapiens
ctgccctgggtgtctaaaagtctggtgttttttttctttcttcctttgagtagttctgaatagcattgaagaagcttaaaacaggaagaaaacctgccttttcaatcaagtttatttatagctactcccccctcc

SEQ ID NO: 239466 - DNA, 381 bp, Homo sapiens
ctcatcacttctttgttcttggttttcacgtctcaacagggttcttcctagttggggtggtctggagtcagaaaggcccccagggtctccccagattttagaattctaaggcctaacccacaagtctgtggtttggagtgaatttgtatgggttgggggtctccttcaagtcacttaatgctttcagaaaatgtgaaaaaaattagtggggcatggtggggtacacctgtggtcccagctactctggaggttgaggcgggaggattgcttgaatccaggaggttgaggctgcggtgagctatgatagcgccactgcactgcagcctgggcaacagagcgagaccctgtcaaaacaaacaaacacacacaaaccaaccaaac

SEQ ID NO: 239467 - DNA, 187 bp, Homo sapiens
ctctttcttttccctacataggacctgctgagaaacaatatcaattaatcaattatccaagttcagcaatttcagctggtctttttggggatatttcaataaagctttattcatgaacactgaaagttttaattcatgtaattttacatggcatgaaataatataaatctcttacattttcaatcgc

SEQ ID NO: 239468 - DNA, 1012 bp, Homo sapiens
cggaggctgcactgagcgggacctgcgagcagcgcgggcggcagcccgggggaagcgtccgggaccatgtctggagaactaccaccaaacattaacatcaaggaacctcgatgggatcaaagcactttcattggacgagccaatcatttcttcactgtaactgaccccaggaacattctgttaaccaacgaacaactcgagagtgcgagaaaaatagtacatgattacaggcaaggaatgttcctcctggtcttacagaaaatgaattgtggagagcaaagtacatctatgattcagcttttcatcctgacactggtgagaagatgattttgataggaagaatgtcagcccaggttcccatgaacatgaccatcacaggttgtatgatgacgttttacaggactacgccggctgtgctgttctggcagtggattaaccagtccttcaatgccgtcgtcaattacaccaacagaagtggagatgcacccctcactgtcaatgagttgggaacagcttacgtttctgcaacaactggtgccgtagcaacagctctaggactcaatgcattgaccaagcatgtctcaccactgataggacgttttgttccctttgctgccgtagctgctgctaattgcattaatattccattaatgaggcaaagggaactcaaagttggcattcccgtcacggatgagaatgggaaccgcttgggggagtcggcgaacgctgcgaaacaagccatcacgcaagttgtcgtgtccaggattctcatggcagcccctggcatggccatccctccattcatttatgaaacactttggaaaaagaaaagcctttttgaagaggttccatggatgagtgcacccattcaagttgggttagttggttctgttggtggttgctaacacccctgttttgtgcctgtttcctcagaaaagtcctgttgtgacaagcttgaagccgagttgaaactagatccaagaccatctcgaattcaagcgtgatcaaaggt

SEQ ID NO: 239469 - DNA, 959 bp, Homo sapiens
cggaggctgcactgagcgggacctgcgagcagcgcgggcggcagcccgggggaagcgtccgggaccatgtctggagaactaccaccaaacattaacatcaaggaacctcgatgggatcaaagcactttcattggacgagccaatcatttcttcactgtaactgaccccaggaacattctgttaaccaacgaacaactcgagagtgcgagaaaaatagtacatgattacaggcaaggaattgttcctcctggtcttacagctggtgagaagatgattttgataggaagaatgtcagcccaggttcccatgaacatgaccatcacaggttgtatgatgacgttttacaggactacgccggctgtgctgttctggcagtggattaaccagtccttcaatgccgtcgtcaattacaccaacagaagtggagatgcacccctcactgtcaatgagttgggaacagcttacgtttctgcaacaactggtgccgtagcaacagctctaggactcaatgcattgaccaagcatgtctcaccactgataggacgttttgttccctttgctgccgtagctgctgctaattgcattaatattccattaatgaggcaaagggaactcaaagttggcattcccgtcacggatgagaatgggaaccgcttgggggagtcggcgaacgctgcgaaacaagccatcacgcaagttgtcgtgtccaggattctcatggcagcccctggcatggccatccctccattcatttatgaaacactttggaaaaagaaaagcctttttgaagaggttccatggatgagtgcacccattcaagttgggttagttggttctgttggtggttgctaacacccctgttttgtgcctgtttcctcagaaaagtcctgttgtgacaagcttgaagccgagttgaaactagatccaagaccatctcgaattcaagcgtgatcaaaggt

SEQ ID NO: 239470 - DNA, 986 bp, Homo sapiens
cggaggctgcactgagcgggacctgcgagcagcgcgggcggcagcccgggggaagcgtccgggaccatgtctggagaactaccaccaaacattaacatcaaggaacctcgatgggatcaaagcactttcattggacgagccaatcatttcttcactgtaactgaccccaggaacattctgttaaccaacgaacaactcgagagtgcgagaaaaatagtacatgattacagagaaaatgaattgtggagagcaaagtacatctatgattcagcttttcatcctgacactggtgagaagatgattttgataggaagaatgtcagcccaggttcccatgaacatgaccatcacaggttgtatgatgacgttttacaggactacgccggctgtgctgttctggcagtggattaaccagtccttcaatgccgtcgtcaattacaccaacagaagtggagatgcacccctcactgtcaatgagttgggaacagcttacgtttctgcaacaactggtgccgtagcaacagctctaggactcaatgcattgaccaagcatgtctcaccactgataggacgttttgttccctttgctgccgtagctgctgctaattgcattaatattccattaatgaggcaaagggaactcaaagttggcattcccgtcacggatgagaatgggaaccgcttgggggagtcggcgaacgctgcgaaacaagccatcacgcaagttgtcgtgtccaggattctcatggcagcccctggcatggccatccctccattcatttatgaaacactttggaaaaagaaaagcctttttgaagaggttccatggatgagtgcacccattcaagttgggttagttggttctgttggtggttgctaacacccctgttttgtgcctgtttcctcagaaaagtcctgttgtgacaagcttgaagccgagttgaaactagatccaagaccatctcgaattcaagcgtgatcaaaggt

SEQ ID NO: 239471 - DNA, 453 bp, Homo sapiens
tgctgcccctacacactgatggaaaaattgtgttctgcagaaaactagagttcctcacagggtgaggaagagttatggtcatctgcacagttgtagcccgttgcgagtgttttcccatgtgcacagtgatatctaggcaagtgtgccatgatttcctggtgaggataaaatctatggacggtgagagaactagtcaaggaataactgaagtgagctgcagacaggattatcattttgagtaacatcccaatgtatttgtcatcctttaattaatttttatttttttaattaaaaaataatttttaagtgtaaacctttaatgatccacaaagcccaaaatgtccatttgattttcataggtatcgtttccatatgcttagacttccagcagctattagaagagaaaaatatgtaacagctttgtgtttaattaaaggcaaatgaaatccagtc

SEQ ID NO: 239472 - DNA, 494 bp, Homo sapiens
cctcataacaccatcagacagaacccgaggctacagaagcctatgatttagttagcctaaacccataaatatgtaggctgcatacatatacttactttggtttttggtcaacctcaaacattttattttgtttattaggaagatgtctttcctcattatatgataactattatttatactaaactagtttgagagaaacaatcaagtgaacatgtgtgcaatttgttaaaagaaatcatccaaaaagataaacttagagaaatgagaatttgagcccacactcaattttttgccctaaggctatttttcaacattttacataaaaaataattctctgttttatgctcacacatggtagaccaaatatttgtatgaagatcttcacagcagcttctagaacatatcttccgaaaccttcagagaaattgttttaatttgtcttgaatggcttaagtgatgccttgctggaaataaattgctatattagatgtcta

SEQ ID NO: 239473 - DNA, 380 bp, Homo sapiens
gctttcatgtgaatcctccatttccctctggtctctataatatcactcaatgaagctttccctagccacctatttaaaattacagtaactccatcaatacttctattcccccctcctatcttacttttttattcccagcacttaacatttgacgttgttatatttattgtatgcctcggtgaattgtcctttgttcactgctgtgtctccagcacttagaacagtgcctggcattcttaattgtcacttagtgaatatgaatgagtttcacatttggcagagctaagtttaagtgtggtctttagctttataagtgctgttgcatccctggcacttagcacagtgctcaacagtagatactattcattgtgctaattatt

SEQ ID NO: 239474 - DNA, 340 bp, Homo sapiens
gctactcagaatgcgacggtgaaatgaaagggataatactctcccattctcttgtaatttggaaattctccggacctaaagccagatcagcctctgctctaccagcaccaaaactgtgcacgaggcacactgtagtcatctaaggaactggagatgttagcctgagaacgagaagacaagatgtgcttgctgggctcaaacgtgtgaaggtctactttgtgagaaagggattggattcactctttggagttaagataacttttctaacaatgaaagccatcctagctgacataatgtgaccctcaaacacttcctttattgagtgagaggctggacaaaa

SEQ ID NO: 239475 - DNA, 2224 bp, Homo sapiens
aatttctagagtttgggttcactactttgtctcaccgtgattacagagaagttacaaatatcattactagtagaagactttaatacacctctgtcagcatgttgacaaggaatccaaaaacaaagagtagtctccagattctgcaagacagtgtgaaatggcaccacatggcacataaagttaacagcctattggatgcatactcaggcctgttaagtaatgaatccatgatcctggctgtgaactccagctttgtggatcccttactgcagtttgaatctcagttgaagataatagagtcatcctttggaatgctagttgtcatgccaagtcttgacaaagtaaaagaaatggggagcagttatgagtacattgaggacatggagaatttataccacaatattttaaatatatatgagaacattcttacgagcttggtgtctaaagacctctacaaactacagatcttaaaggaaatgctcgtgtggatgagtaaagatagttcatatctgcaagagagaataatggtgatcatcaacaaggtgttaagatttacagtcacaaaagtcagaaaatacttaagtgttgatgctccatgtttgggtctcctggcagcagagctgtctcttttgtgttcccatgaagatccctcgattgtaaaacaagcatcattgggaatgtgtcacctcctctacattgcacggtgtcagaacgatattggaacaaataagcctacaaacggtaaaagtcatagcctccagtttccttcttctgatgtagaatttctacccaaggagtttcaacaagacgaaagtaaaatagctcagagagtagggcaaaccttactgcctcccttgctgactgactttgtacagagtctcctgatgaaactctcttcacctgatgataaaatcgcatctgatgcagcatccatactgatatttactctggaatttcatgccgagaaggtcaccatggtgtctaagatcgtggatgctatttacaggcaactgtgtgataacaattgtatgaaggatgttatgttgcaggttatcactttgttgacatgcacttcacccaagaaggtcatctttcaacttatggactacccagttccagcagacgacactctgatacagatgtggaaggcggcatgttctcaggcgagcgtggcccctcacgtgctgaagacaatcttattgatactgaaaggaaagcctggggaaatggaggacaccgtaacggaagggaaacgtttctctcttgatattaccaacttgatgcctttggcggcatgccaggccctgtgcacctttctgcctcttggttcctacaggaaagcggtggcccagtatttcccccagctcttgacgactcttatgttccaagtcttctacaacagtgagctgaaaccgatactcaaggacagggctttgtatgcccaggatgccctgagagttctgctgaattgttctggactgcaacaggtggatattactctaatgaaggagaatttctgggaccagttatctgaagatctgtgttactatcatggagtctgctttattgctaaaactctcagtgaatataactttccacagtttccggagaccctgaagttatctctataagctctcagtagaaggtcctagaaggtcagaagacactgtcatcgtattaatattcctcactgaagtgagttttgtagactgtgaacagctgtgttctcatttccttttcttacccaaatttaaatcaaaattccagtttctcgtatctctccctctgaatgttggttcttaccaagacttaagatcatgaaagatatttgaagtcggatggggagaggtgtggagttagatctgggttatggaagagttgtcccttcagctttccccagcagttggtttttctctgtttctaggggtgtgaatttgtacaaaaactaattattttttaggaccagtttatatatttctgcatgattgttaaagtatattgagggataattgggtttaataaagatggtagttaacatctgggatctaggcagtacttttgaccatttagagggagaaaggaactggctgagtaactgggtaaaatgaagatgtggaaccatattactttgtatatcaatattgtgccatgtattgtaatactataatggaatcaagcaaattgacaaacttttgtttacaaaaaataaaggctttataacctg

SEQ ID NO: 239476 - DNA, 247 bp, Homo sapiens
tgtttcctctcaagcaatgtttcctgaaatatacctgagcttggaacagcatggatctgtacgagctggtgccccactagttgatgacatggcttcatgaaaacagaggagcacctcaccactagaagagacccttgcagtaggaaacaaagctgcatgagaaaaggtgggatgggatggaaacggcctactcactcccccaggagtggagaggaggaagcctgaagggatgagggcagggttatgc

SEQ ID NO: 239477 - DNA, 520 bp, Homo sapiens
caaaagtatatttacagattttcaaataattaggaaatgttagtaatatttagaagctcctcagatgattctagttttcagccatggttgagaatgttgctaaaaagtagtgttatggctgatttccgagaaggaaacagaggttcagagtggttaagcaacttgtccaaagtcacacagccagaacatagtggagtgggaactccactgaggcaggctgactgcttaacccatgtgtctgttgtgccccaggcactgtcacatattatttcatttaattctctcaacaactttgtttttttaactctgaaaactaatccagaaaagttaaataaccagcccaaaattgcagagctaataaaaggcagctaacagtgttttctatcttgattctatttgggtggacaagtgtgtgtacttgtcaatagtcatttgatgggtcacttaagatctgtacatcacactatatgttgattttacttttaaaaggcacaaataaactgccctctgggtaacaata

SEQ ID NO: 239478 - DNA, 629 bp, Homo sapiens
taagcccttcgataatcaagatgagactcttatgtcttgtatccctcaagttaattccagtgcatttctttaaaagaggtttgggcaagaaagcaatgaatctaataaggctatcagaaaagttcagaacacaatgccacgcttcttcgacaatgaaggcagtacataacaaattccctcatttgcttggaaagtattgatgaaacaattaacttatttcattaatctgttaagaaatgaagtatttttttaaaggactgaataaaagtctctttatataaaatcattcaaataataatcttagctatttcctgtttgtcaaacaaagattaaaagcatgtatgtggcaaagcgtggtggctcctgccagcactttgggatgccgaggcaggaggtttacctgagcccaggactttgagaccagcctggacaacacacgaagactttgtctctacaaaaataaaaataaaaaaattattcatgcgtcacggtacatacctgtagtcacagttgtttgggaggctgaggtgggaggatgacttgagagttcaaggctgcagtgagttaggattgcaccagtgcactccagcctgggcaacagagtaagacctgtcccttaaaaaaaaata

SEQ ID NO: 239479 - DNA, 608 bp, Homo sapiens
gagacagtgtcttgctctgacgcccaggccgaagtacagtggcatgatcatggctcactgcagccttgacctcctggggccaagtgatcctctcaccttagcctctctagtagctgggaccacagatgcgtgccaccacacccagcttatttttgtattttttgtagagacagggtctcaccatgttgtccaggctggtctcaaactcctggactcaagcaatccacctacctccgcctcccagggtgctgggattacatgtgtgagcaaccgtgcccagcccacataaatctttctaaactgtgtctgtgatagtcttttctcctgccatacactttttagtggttctctttgtactcagaatgtaattcatatatttgaacttacaagccccttcaaaacttagcaccaccaagcccagctaattttttttggagagatgacgtttcaatatgttgcttaggctggtcttgaactcctggcctcaagcagttctcccgccttgacctaccaaagtgctgggattacaggcatgagccatcatggccagcctagatatttttttgtcgagaaaagtgagacaaaggaacaccgggatcctcgagaac

SEQ ID NO: 239480 - DNA, 479 bp, Homo sapiens
gggagtgacaggatccactcttaactgctatgtggaccagctggagtgggacaaggataaagacaggaagaacagttaaaaggctgatgtggtaatccagtttaaaaagacagcaacctgcagtagagtgatgggagtgagagaacagtgagaagaaagaaattcgagaatttaggaaagaatcaacaggactatggtaattaccggaagaagctctgaattcaaaaatggtcttaaaaattaagtttgttttgctaaataaccaccaaccaaaaactttaccagtagtcaacatgctcaaatcaacattaaaataagatatacttgagtggtttcatatctaatcactcatatgagcactgccttgctcttcatctatggaacaaattcctcctagaatttactacttagataaaaaactctaaatcagtggttggcctttttgtgcatggaaccctttgaaaaatctaataaaagca

SEQ ID NO: 239481 - DNA, 451 bp, Homo sapiens
cctaaaacaaagactgagagaggttatgtgacacacccaatgttgcagaacatccggtaaaacaggaatttgatctcaggcatctcttcgccatcaccaagaaattacttagctgcccctttaattgtgctttttctgtaagaacagagctcattattgaaggctgtaaagcaacactgaactttcatgcacatctattagatgttaacaactgaactacaacttggaataagaataaaagaaatagaaatccaaggtactatcaggtactattattacaacctcaagtggttcagtttcttgactgagtcttattttattaaacctgagcagatttaaatttaccaaatcatgtttgatttgtccgtagctccaagatctgtggcgaagtccctgtgtaacagcattgattttgctgcagttttacttgccccaagagatttaacattta

SEQ ID NO: 239482 - DNA, 293 bp, Homo sapiens
atgaataaaactgatagctttcaggattaagaaatatatttttgcctatttatttctggtacaggcttctaaaaaagatttttaaaattgtcttcttgatgaggatattttgagtgacatagacccgtccttcaattcttgatggtaaactttctgaagagcaatttttaagctctatgaggaacttacaaagtattcatacctttttaggaatctaagttcacaaaataaactgaagtgttagaaagatttatttcctattatttttggtacagtgttatgcatactagaga

SEQ ID NO: 239483 - DNA, 585 bp, Homo sapiens
taatgatagcagtttgcagttggaggcttaagtagagaaaaggtaacatttacatagtcatcatagggaaatttgaaaggaaatcagcaagatttcaataaaaggatagatgggcagtagagagagtttgattgaaaatggatagcaagatctgtagtaggactgtgtaacttcttgtttttctgttagagctttatcatcttggagcaaaaatagagaaaactgatggtggaccaggaggataacagcgatagagtcaaacttgaatttgaatctctgctatccatatcattggttgggtgactttggttaagttatttaatccatatgagcctaagttttatcatgtctaaaactggcataatacctctattgcaaattatagtattggatgagatcatgttggaaaatccctcacaagttctataaatgttaattcctttttctttttctgcaaagagtgagtcagtaacagcacagtaaggatgacatttaagggcttaattataattccaggctgagtaggaactctaaagtagccaggaataatctcttggactgagtaaaagcggggaggagttgagt

SEQ ID NO: 239484 - DNA, 497 bp, Homo sapiens
ccgactgcatgtaaggggaagtcagcccctcataaagtgaacctaaattgcttagcccccaagaatatttgttctctaatgagcctagtgtgggtaaggctgcacctggtgaagggggcagggtcagaaactccgctgctggagatcttttccagcaaggaaaagtctcctgggacctgaaaggcacttaacctcacccagactgccgctaaagaacaatgaacttaggagtcttcgctgtgctcctcttaagtttgtaagagactgtaataagtctcttactctctccgggcctcagtttcctcatctataaattgaagaatctagaccagataagaggtctccagcctggcttgactagtggaggaccccttttaccatgtatactcttgccaacaccttggaagtattttatcatgcaataatttgtgtatgatgtgtaatagagaagggattgttaaataaaacttattttagatccatgtataaccttaaaa

SEQ ID NO: 239485 - DNA, 373 bp, Homo sapiens
ggaattttctctaacctcataacaaatgaaaaatgaatcttatagaacctgtagtagatatcatactcagtggttaaaagctaaaaacatctcctaaagaaacaaaatgaataagaattggaaaggaaggaagaagacaaagagtgattattcttagatgaagcgataactcaaaataatctgcttatatgaatgataactcgaaataatctacttagaaataattagaattactaagttagtaaaataaataattacaattaataaaagatatcaagattgatggatataaaatcaatatacacaatccagttcactgtctagataatggtaacaaacagaaaaaagaatttaaacaaaacttaccatttac

SEQ ID NO: 239486 - DNA, 1072 bp, Homo sapiens
gaaaggtgggagcgaaataaaacaaggagcagaaccgcgaagaagccatgtttggtgcgtcgaagtttaaactcgtaggacttgggaggagccaaggtatatccgcagaagagaccacccctgccctttcgctttgacgctcattgggccttttggctgcgcatttcaccccgggctgagaaaacaagctggggattcgacaagaatgaactcaaagtctggaaacggcagcttctgagagtttacaatgtttcaccaactgtcgtccaaataagtcgtcacccctgtcagagtagttgcagctctgccgttacccactgctgtcactgtggccgttttattcgcgagggttacagttctgtttagcatgcatctaatgacttaagactccacgcaagtaaaacggagtttcctcccattaagtattggctttgctttaacagtgctttgagaggctctctgtggccaacatatcttctcatatctttgtcctcgtttcccaatctccgcgtggtgaaatcatctatcaagacttggcttaaaggacctctcttctgcaaataatgccatcttccgctaggtgctcactgcacacagactcgccgcccaccacttctgtccaccttctgaactccgatagttatttacccagagactgtttctcatctttaagtgtcgtgaagactttaagatctgttttatctctctataccccaaaatggcctagcacagtaactaggacattgtaggtgctcaataaatgtttgtcgaatatcaatgacagcaggaggcagtaaatggtccctctttgtagggcctacagctgtgcctgagtaggatgtacagaagtcctgcatacgtgtgaagtgtctccaggaagctgcactggaggggacaggaaatgtgggtaatcgtatggtgcaagtggtagcaaaaaagacaacataaggaaaatgttatttaggttttgcccagtcttgctgtttaaagccctgtgttagatgcttttcatgcgctattttactgaatgtaaacaaccaccttattaaatatactcacttttttaaaacga

SEQ ID NO: 239487 - DNA, 382 bp, Homo sapiens
tctgattcctttgcaattttaaaaaatgttaaaaacatgtctttttgggtttgaaagagctaggatgtgcgtctatgtgcttggggtgagccctgggcacttcgctcccctgtggcaacttgtgggtacggtttaactggaccacgctgagcttctgcagcgttggaacctcaagtttggggggactgggcgggcagggtcgcctgccacgcaggcccgagaaagaggagagtggtggagggggcgttctcacgcctggccccagggcacacggctgcgcccgccgcccggaaccccaccggggctgcaagcgtcctcggggtgggttgcggtgggagtaggggagctggggtgcgtggtggtaggtggggtgcgcggccgc

SEQ ID NO: 239488 - DNA, 2319 bp, Homo sapiens
  misc_feature (519)..(519): n is a, c, g, or t
  misc_feature (567)..(567): n is a, c, g, or t
  misc_feature (569)..(569): n is a, c, g, or t
  misc_feature (575)..(576): n is a, c, g, or t
  misc_feature (653)..(653): n is a, c, g, or t
  misc_feature (866)..(866): n is a, c, g, or t
aatgtatttatcttcattgaacagtcgtcttcagaactgttctttttttcttgagacagggactcatgctgtcacccaggctggagtgcagtggcgcaatctcggctccctgcagccttcacctcctgggctcaagcaatccaaccccttctgcctcccaagtagctgggactgcaggcgcgagccaccatgtccagctaatttttgtatttttttgtagacatggggtttcaccatgttgcccaggctggtcttgaactcctgagctcaagtgacctgcctgcctcaaccacccaaaatgctggaattacagtcatgagctactgcaccccatccagcggaattgtcagttctgaggtgacaaatgttccccaaaatcactatgctatgcaaagacatgcattaaaaaccacagggagtctaggcacagtaactcatgcctgtaatcccagtgctttgagaggctgaggtgggaggattgcttgaggccaggagttcaagaccagctgggacaacatngcaagaccccatttctaccaaaaaaaattagctgggcttggtggcacncncctgtnnttctagctatttgggaggttgaggtgaaaagatcgcttaaacctaggagttcagggctgcgatgagccatgatcacnccactgtactccagcctgggtaacagcgagactttgtctctaaaatagtaataaaaataataagataaaaaccccagggcttgtggggaaaattggatcgaggtacaacactaaaaaaaaaggtcatcagtgccacatgaaacaaagtaggaacctaataaaagtggtagagtggttttacacgttaagtgattaagaaataaatagtgcaanaaatatgatactttaccttgaaaaatacctgaagctcagttgcggaagtggacattggaagggttgcagcttgtgagtcactgtgaagtggtggaggagagttatctggatggaatctgatggatttggttatggaagtagcccataacacacacggaatggaggtagctggcagatatctgtgttgcatgcatgtaggcattttgtgtattcctgcattcctacgtgtagctgcgttcatctatgtggagttttctgcattcacccattatttcttgaggatgatgttgtgtgtaagcaaatgtgaacttcgggttatgctcaattattccctaatacattgatctcattgaaacaagttcacattttcaaaacaagcattataacggaactgactctatacagttcatgacatgcagcttctggatttggcgagttggaggaatgagaatatagaaaggttacactctacataattttcttgttctcaagtaacaaacccatgttaattagaaattttagagttaatccattttattaatggtcaacatatacccaaagtatttcacgacaccaacgtgtgcatcgtgtatgtctgactcatatgctttgactcctcatcagaattctgcaggagcccttctccctaggataaatccctcaattttaaggtatgccctgtagggccctttacagtctcaccctgttcagccttatcattagtcctccctcttactcctccccagcccctcaggaatgcatagctgtttcacttcccttaaaccaagcatgctttctcatacttctgtgttgtttcccttcactgtctcttctgaccagagtgattgatgtagccacaaaatagagtcccttccagtctcagcccaagcaccttgtgtcccatggagccttctctgctaggagctttcagcacttgtaataagtagctggggccctagttaagctgcagatttcagagcccctccccaaacctaaagcagcagcatcttgagatggagggtgtcctacgtaatctgcaaatgtttcccgttttgaatgtcagagaactacttgtgtttacttataaggctcttgcaggcgcttgtcactgtatcttctgtgccagatattgtgtctggcactcagtaaacgtttaggaataaatgaatgctgttgagggttttgtgtgttgtgcaagtattgagatgtcttaggctttgctctggcgtcctctagagcctgaaaagttgcttcatttctcagcagcatttaccaaccacttatttaaaaagctaataggaattgttggtatttagtgagagatggggtataacttaagggatgaactaacaaaagtatgataggcatatgaataaaccaggcaatttagagaattatttccttctcacctttttttctttccagaagtctcagaagtggtaatgtttatgtt

SEQ ID NO: 239489 - DNA, 1555 bp, Homo sapiens
atttcaagcactgactgctaagattggcatgtctccagccacgtacatttgcaaaaagtcagatttgcaatgtaatatgtcatggagctcatgcttgttgaagagaatctttgataggctggacacattcattttagtaggaggcagaggtggcctaacagcaaactctaggttcaggatctaattttcatagccttcaaggatgaatgcaatataaactgtgtagtagattgtgatgctcattccaactagggaggcaagcatttgtacctgctatctacaaggcaccaaataatgcatgtgtcaccattgctataaattgtcctcttccaggacctaactatttgggtaaagaacctacagttcccatcaccacctatgtatgtatgtacaaacataaattagtccaaattctaattttctcttatttttctttgtggaaaaacagataagaaagctcagtaaaggaagatataagcaattaatgttacagttcttcaatataataatttgaattaaatgtactaagaagcaaaaactattagtgttgagactatcatgatgaagcttttggtttttttaatatattttcatttttatgcataaaatcttaatacatagaattccatgatgtcatcaggcattaacaatcacttaccttagaaaccaactctttttatctaggcttaacagggtttgtattaatgtattggcctagcactgggccctgctagatgctcaataaatatttgcctaatcactattagacattttaaaatatcttttggctgggaacagtggctcacacctgtaattccagctctttgaaaggccaaagcaggaagatcccttgagcccaggagtttgagaccagcctgggcaacatagggagaacctgtccctacaaaaaatggaaatttagccaggcacagtggtatgcacttatggtccctgctacttggaggatgactcaggaggattgcttgagcctcctaggatgtcaaggctgcagggagctgtgatcacaccactgcattccagcctgggtgacagagcaaaacccagtctataaaaagaaaaaacatatttcagtttatttttatttctgtgttaattgtttagaaccaagaaaatatgagtaccttaaattctgtaagtaaagaggaaaatgtctttaacattgtaggaaattaggaattaagtaactgcccttcatactggtaatcttgatatgttgagggaagtgacttgttataagatagaggccaggtatggtggctcatgcctgtaatcccagcactttgggaggccgaggcgggcggatcacgaggtcaggagttcgagaccagcctgaccaacatggtgaaaccccatctctactaaaaatacaaaaattagccaggcgtggtggctcatgcctgtaatcctagctactcaggaggctgaggcaggagaactgcttgaacctgggaggcagaggttgcagtgagccgagatggagccactgcactccagcctaggcaacagagtgagactctgtctcaaaaaaaaaaag

SEQ ID NO: 239490 - DNA, 2584 bp, Homo sapiens
  misc_feature (20)..(20): n is a, c, g, or t
  misc_feature (1124)..(1124): n is a, c, g, or t
  misc_feature (1286)..(1286): n is a, c, g, or t
  misc_feature (1595)..(1595): n is a, c, g, or t
  misc_feature (1599)..(1599): n is a, c, g, or t
  misc_feature (1606)..(1606): n is a, c, g, or t
  misc_feature (2142)..(2142): n is a, c, g, or t
  misc_feature (2459)..(2459): n is a, c, g, or t
tttgaagttgtgcgagtttntgacgatgtgtaaagctacaacacttctctgtgcatgagctttagctctactttaacagtgaaaccagttggcaagagatgtaaccacaaagcagttttataacgtttcttaactctcttccctctcaagtttttagacctttagtcctgccaactccttctttcccctttatggttttaatttaaaaatttgttttatttaaatgggaagaagaattttaagtggaaggaaaaaatgtcagaaatcctaaatagagaggaaggggttttgttgtgactcaaagcaccattgtaagtctcctcctcccagaccctgctaggaacaggacagctgatgtcatgccagtacacacaatgtagattcagtgcaaaaggctgctgcatgttgaaactggccaaaggtaggaaatgactgggactgtagcagacaaaaatgctgattatgtgtaaggatatggtgagacactttttctcataaatatctagtgagatatgggtcagaacaagcctatctccctaaggctgcttggagaggagaaaaactttccatataagatcttactagtccgggcgtggtggctcaagcctgtaatcccagcattttgggaggcagaggttgggggatcacttgtggccaggagttcgagaccagcctggccaacatggtgaaaccccgtctccactaaaaatacaaaaattagccaggcatggtggcgttgctggtagtcacagctacttgggaggctgaggcaggagaatcacttgaacctgggaggtggaggatgcagtgagccgagatcatgccactgcactccagcctgggcaacagagtgagactctgtctcaaaaaatatataaaaataaaaataaagatcctactagatggctgatagcactgggccaccagattgattgctaaaggtataggaagatggaagaggctgggcacggtggcttacatctgtaatgagaatttagggaggcccaaggcaggaggattgcttgtgcccaggagtttgagaccagcctgggcaacatagccagacctcgtctctactaaaaatttaaaaattagccaggtgtggtagtatgcattgatagtcncacctcccaaatagctgggattataggcgcccgccaccacgcccagctaatttttgtatgtttagtagagacggagtttcatcatattggtcaggctggtcttgaactcctgacctcaggtgatctgcctgcctcaagcctcccaaagagctgggattacangcatgagccaccacgcccagtctcagtctagattatttttaacagttctgtcaggtattctatagtctgagctcaacctacctgtatagtctcacagccaatcttatactcaaaccttggaatactcatcccccaactgctactttttgaatcttttattcttaatatttcacgttttaacttcagtgtgtttatactttttgaaatgagaccagaacatagtagactttatagagaagaccagttttacctagattccaaaggaagaattaaactgctgttattgtttgaaatgcgtttttttttttntttnttttttntttttttatggagatagggtcttaactctgttgcccaggctggaggagtacagtggtacagttatggctcactgcagccttgacccctctgcctcagcctcccaaatagctggggccacaggtgtgtaccaccactctcagctaatttttaaaattttttatggagacagcgtttcgctatgttgcccagactgttcttaaactcctgggctcaagtgatcctcctgccttggcctcccaagctggtgaaattacaggcatgagccaccacacccagcctgaaattcttaaaggatgagaatgtcaatgacagagcaccttggcatcattgtgactaacctgggagacagggaagaagcacgccatgggaagtgtttacatttgggtacagctgtgctaagtactgtggagcccatagccttgaggtagacggctactttgccttttttcttgaactgtcttgcagaatgtggatttggggtaagtggtcttgaagcactcatttagtcaccctcaaattaagatttttacttcanctttcttgggcctgtacctccaagatgacaaagaaaagaagaaacaatggtcacaccaaagagggccgcaaccaggtgtacgctattcactgcagccaatttgctgcataaactgtgcccattgtgtgcccaatgacaaggcttattaagaaattcatcataggccgggcgcggtggctcacgcctgtaatcccagcactttgggaggctgaggcgggcggatcacgaagtcaggagattgagaccatcctggctaacacggtgaaaccctgtctctactaaaaacacaaaaaaattagttgggcgtggtggcgggngcctgtagtcccagctactcgggaggctgaggcaggagaatggcgtgaacccgggaggcagagcttgcagtgagccgagatcacgccactgcactccagcctgggcaagagtgagactccgtctc

SEQ ID NO: 239491 - DNA, 191 bp, Homo sapiens
tccaagggatcaggaggggatggcggttcaaaagccctcaccatagaggcgcctccaagccttcgtaccagtggaaatggagaccgggaccaccttcccggcacccggaagcctcccagcccctcctgggccaacttggctgcctattcagttttcttccgtaaccccacagacacgtcagtcaattccct

SEQ ID NO: 239492 - DNA, 466 bp, Homo sapiens
atccaaggcctgctcagtcgatcaaatgtgccatgatcaatatcaagcctggtgagctccccaaggaggctgcagtgggggcctacgtgaaggtgcacactgtggagcagggagaaattttgtgatgaagatatgtgccagaagttcctccagcagaacagctggaatatctttcggaaggacctgttgcagctgctcgtggagccttgccaaagtcaactgttcactccaaaccggcccaagaagagagagatctacaaccctaagtctgtggtcctggatttgtgcagcatcaacaagacgactaaacctcgttatcctatttttatggcaccccagaaatacctccccccattgaggattgtccaagccatcaaagcacctcggtacaaaatccgagaactcttggcttagtgtaagagcacaggggtccttatttaggacaaataaaggatggtggattggg

SEQ ID NO: 239493 - DNA, 434 bp, Homo sapiens
acggataaggaaggaaatattttatgaactgattgacaatgatgacgagatgataaaaaagttgttaaagctcaatattgcattccccagtgatgaagatatgtgccagaagttcctccagcagaacagctggaatatctttcggaaggacctgttgcagctgctcgtggagccttgccaaagtcaactgttcactccaaaccggcccaagaagagagagatctacaaccctaagtctgtggtcctggatttgtgcagcatcaacaagacgactaaacctcgttatcctatttttatggcaccccagaaatacctccccccattgaggattgtccaagccatcaaagcacctcggtacaaaatccgagaactcttggcttagtgtaagagcacaggggtccttatttaggacaaataaaggatggtggattggg

SEQ ID NO: 239494 - DNA, 469 bp, Homo sapiens
atgtgtgtatatatatatgtgtgtgagaacaaaagacgtggggactaatggggaggggtggcactgagcaagggtgaaaaactacctgttgggtactatgctcacttccaaggtgacggatttggtcatattttaaaccccagcatcacacagtatacctttgtaacatccctgcatatgtaccccccaattctaaaaagttgagaacaacaaaaaaaagcaaaataaaatatttaaagcaataagaaattgtgacagatctaaatactcttcaaaaataaaaaaaagagccatactagacttataggaaaaatttaattgctatttaattaaaaattcaaaatataaggccaggtgcagtggcttacacctgtaatctcagcactttgggagtccaaggtgggtggatcacctgagatcaggagtttgagaccagcctgaccaacatggcaaaaacccatctctacta

SEQ ID NO: 239495 - DNA, 408 bp, Homo sapiens
caaaaacaaagatgagaaggcagggagaaagaaaagggaaagggggtagaaagggggtagagagagaaaaggatggggatttaactctctgataaatactaacatgtttacaatttttaaaaaatgggtcaggtgcagtggctcatgcctctaatcccagcactttgagaggtcaaggcattagaattgcttgagccaaagagttcgagatcacgctgggcaacacagtgaggcatctatctctagaaaatttttttaaaattagtcaggtgctgcggcatgcacctgtaagtctgaaagctggggcgggggattgttcaagcccaagagtttaaggctgcagtgaattataattgtgccactctactctagcctgagtgacagagtgagaccttgtctcaaaaaaaa

SEQ ID NO: 239496 - DNA, 346 bp, Homo sapiens
ggagtcggaggttgcagtgagctgagattgtgccactgcactccagcctgggtgacagagtgagactctgtctcaaaaaagaaaaagactgggtgttctttggagaactaaccatctttcagggatgagaaacctgccagctattcatttctgggcctaattgtttctcggatttacctaatgccaggaatttcaaaaaactagactgaacccaaaatatataagtgattgaaatcatttttgaagtaaagctgatggtggcttcaggcctctgcccattcccagggtttccagcttcagattttagagaccccttctcagtaagactacgagtaatgtgagaggc

SEQ ID NO: 239497 - DNA, 429 bp, Homo sapiens
ccatctgctcttggtccaatgtagaatagatggtacctcaggttgcagggagccatcctggttatgccacctctgtccccttgccacattgtccacacaccatccctgctcttggtccatgcattttgtgttgctgttccttggtaacctctgccactgcctatgacagcccgccactggtactatgttatgcaaattgccagcctcaatacaaaccctgtctatgaagaggcacttggttggcagagtgaaaacacagagtaacgagatgccatctgcatttcctactacatagctcaattagttgattgatttgtaacactttaaaaaacattttctaggcaaagcacattaggagagtgttttataatgtattcagtttaattaaaactgcactaagtggagtactttgcttcttggtttgagaaa

SEQ ID NO: 239498 - DNA, 480 bp, Homo sapiens
tgcgcctcatattctttgtctgaattacagaggcagaggtaatcttcccaaggcggtccaggcttcgctgagatgagttatgcagatctatcagcagaatgacttggacagggagaggttccataactgtcttctttccagagtcactcagagccattgtgagtgagactggaaagtagcccactgggaaaggaggctgggctagccccgagtgcccatgtgcagggaggaggtgacctggagccctgtcctccattggagcaaacgtctcacatctactagttgaaatggaggccttgatccacaaggagacacatgcagatgcacctttaaccccagagaaggacaccagtgcctgtcacccgggctcttgtgggccttgtaaggatgatatagttgcaatcagtaaggccaataaattacagattctgaggacaagagacagcattggagctggggtcatacagaagagttacctgt

SEQ ID NO: 239499 - DNA, 1568 bp, Homo sapiens
  misc_feature (263)..(263): n is a, c, g, or t
  misc_feature (644)..(644): n is a, c, g, or t
  misc_feature (1314)..(1314): n is a, c, g, or t
  misc_feature (1328)..(1328): n is a, c, g, or t
  misc_feature (1455)..(1455): n is a, c, g, or t
  misc_feature (1518)..(1518): n is a, c, g, or t
aaacaaagcgatggaatttgaggggtacaacccctacagttctgtccaaattcacttctctaaactcatgttctccctccactccaccctaaaccctggcctcctgaggcaacgaagtttgcctatctggaaccattttctgaagctggatggcagacggggagcctcaagagggaagaaaagaatggcaaacttttcattggcccagtggccggcctcataaatcatcattcataattagaattatttattcccaaatcacnatcccaagccccagtttcccctgtacctaaagctcttttcacttctagttcaagagagtcttgccccctctctgcgtctcaaaagtgatctcttctcttcctctaaactcacctgaagctttcaccaagtatgctggccggttctgcttcctaccctattgcctaccaaaaggagataattccagcccctctttctgagatagggtgttaatgaatccttactgaggcacagacctctggcctcctgcagagaggtcctcctggaagtgccctggggactctggagacctggcctcccagcagccactccctctgcttttaagaggaagctttagcctgagaaagtttgactccttcctgaaagctgcacttatttcagcnaggctgggctcaggtttcagggctcagggactctttctctccctttctccttcccaagactgaaatgcagctgcccagaagtgctgaggaggacacagagtcggcttcctaggcacaggcccagctctgtcccctttccttgtgctgggaccttgagtggaggggaggagtcagggagcctcagggaggcaaagcaggccacacatcgagggaagcggctggggagagctgactcgcaggaaatagtttcaccccagtggtccaggctggggttcccggtagctcctccaccattctccccgcaacacccaaccagctctgcttttaaaaggtgaacacaatctttcagaagctgcagcccaagccctttctggccctggcgaaccttccccattcccctcttgccaaacatttttataccaaaataattagataattaataatcatgtcaaatactgtgtttctggcactccatactttttaagctttggaatctgtgtgtaatagatctaaatagcagcccacaaacttggccaggcaacaaacatcccattcttgattgtctttaaaccaatgtaattctacttctgagcccctaccctcctgagtggcaagacatttcaagtcagaattactggggtctggttgggcgcggtggctcatgcctgtnatcccagcactttnggcggctgagatgggtggatcacttgaggccaggagtttgagaccagcctggccaacatggtgaaaccctgtctctattaaaaatacaaacattatctggttatggtggtgcgtgcctgtaatcccngctacccaggaggctgaggcagaagaatcgcttgaacttggtgggtggaggttgcaggagccnagactgtgccactgcactccagcctgggcgacagattgagactccatctc

SEQ ID NO: 239500 - DNA, 551 bp, Homo sapiens
tcttgagctcaattcagagcagcttggcttttgttctagaggactttgtgctatctacctaaaccaagagtgtccaactagttctgtgttgaggagagaaagttgccaagactgtcctgtcactgtgaggaatgaaccttttccactcaataattttagcaaaaggcataaatttaaaaggagctagatagaacaaataaaatttaacttttaaaaatatattcactggccaggtgcagtggctcacacctgtaatcccatctctttgtttgggaggccgaggcaagtggatcgcttgaggtcaggagtttgagaccagcttggccaacgtggtaaaaccttgtctctactaaaaatagaaaaattaggtgggtgtggtggcgcatccctctaatcccagctacttaagaggctgaggcaggagagtcacttgaacccgggtggcagagattgcagtgagccgagatcacgcctggataacagagccagagtgtctccgaaagaaaagaaaaagaataatcatggatatttgagaaatctgtgtaccatat

SEQ ID NO: 239501 - DNA, 423 bp, Homo sapiens
agaccttggctttccaactagaagatggtgagtgctctctcaccaagacaaaagccttatgaaatgagccagaataatcacccagacagtaaatactcttaaacaacaaccatactcacgctcagtgctatctagaagaattcagagagtgcctacactggtcctaaagttctcactgagctccatgaaagtttctgtgtcagagggggcaggttgagttttggtgtcagacttttgggttctaactttggctttgccacttgccagctgtatgcctcggtttcctcatccattgaatgggttgataataatgatatattcctcataaaattgtgaggatgaaatgagataatccaacatagagcactccatatggtgcctagcacacattaagtaaatgtttgcagttgttatcattggatt

SEQ ID NO: 239502 - DNA, 491 bp, Homo sapiens
gaatgtcaaacttagatttagatctcctgagcttttttccttaactttgctttttatccttactggcttcccagtgtttagaagatgaaagtaaagaattattaaacataggaaggagccacttcctaaggctattccaaagatagcaaaataaatctcacactcaaaaagcagagagagagataaaggtggcagggggtggtggtgggggaagaactgaagtaataaactgaagaacagtaaaacaatcagtgcaaactattcctgtgtcactcctcacaagatagtctttgcaatcttctcaatgcaaagatgacaacctacacgaaagacgccaggggagcagctttaatgtactgcatttgtaagacacctggctatgagtttgactcttgatctttccaacaatttagactcacaacacaaagagaagccatcaaagagtagagtgtaaaaaactacaggcactatggcaaacactttgggggaag

SEQ ID NO: 239503 - DNA, 597 bp, Homo sapiens
gtattctgggtcatgcgtcttccccaggagctttggttaaagtgagtttgaggaaaatatgggtgctctcagatgctcacagaccacgtggatgtgaaatttagacttttatttggatgataataaagacagactttaaatgttttcagagtaactggacagctctatctgtctcaataactgctggcagttcaaattcagctggaaactgtactcaggttcctcctagccctgccccattctttataacatggaaaccctgattccccccgccgaacactttccttcaggcagcatgatttttgcttcaccgtaaacacaccaggatcacggatgatgatagcatttattgcttggaataaaaagtgatttgcggccctgtaaataggacagcaaatagttttgcttttgacgtaaggctcccatgtcacttcatgatttcattcatcttcatattccagtatctgacatcaattcccagtgggagaaattgtgctttgctgcgtgtgtcttaactcagtctctgatgttctggttctgactcaggatgttggtgacagctgcaccacatatgccacgtctttcatgctagactaa

SEQ ID NO: 239504 - DNA, 293 bp, Homo sapiens
cacacacacacactgccccgtggaataggcaggacggggttgcatttcccctcttttaaaggtgaggatgctgagcctcagaaagatcaagtgacctgaacaaagtcacacagccaatgtgtttctccaaaagaaatgaccaggagtcagtgtttctttatacaagggtgtccaatcttttggcttctcggccacactggaagaagaagaattgtcttgggccacacataaagtacactagcactaatgatagctgatgagctaaaaaaataaaaataaaaatcacacacaaa

SEQ ID NO: 239505 - DNA, 419 bp, Homo sapiens
ccaggctctgctcttttaactttggatttaactgatgcttgacagaatacagagaaagattggtctcatcttacatctttccatgccactatttatctcctcaaatggaacaactggagatgctaaaaacccacttcttgaaattacaggacagaaaagaacttgtagtacttcacttccctggcacgtcttgagtgccatagacacttaatagtggctcatgcctcagtggagaactggggaaacaaattgtagaaaccaaaatggaactagagaggatagaaagacagatagtatagcagcttaaggaaagagactcaaatctttctagaggtttcccatctttgattcctcagagcatatattcttgacaaactgcaaaatgattcaatagatatgttatttttaaattaaaaaat

SEQ ID NO: 239506 - DNA, 409 bp, Homo sapiens
ggaaagaatcatgaagggactagtaattaagccttaaaagaagagtaggatttgggtgggtagatgtagcaaactgagttttgggtcagccttaccacagccttgtaccatctgacaagtcattaggactttctgatcctcaatctctttaactgtcaaaggggaataataccagtgctatgtttcagggttgtgagttcaaaatggataatatctcagagtactttgtaaattgtaggtgtttctgtccttatggtggagtatctattgttttctaagtttctaaactcactaactttcctcaatctgagcttttaattaattttttattattatttttgagaaagggctttactctgtcacccaggctggagtgcagtgtggaatgatcttagctcactgtgcgacc

SEQ ID NO: 239507 - DNA, 595 bp, Homo sapiens
aaaacataatgcaggttcagtcaattccgcttctaaatctcagccatgaaggaactgggaaggtgctcaatagccactattaacagttgttccttacaaccacatggcagcactgttgaagatctgtcctgcacagcccggtgaacacacatccattgtattgatgcccttgttttctccatttctgcacaagctgagattgtggtctatgtgtggcctcccagggtacagttcccacagttcatacagataggcttagccaagctttccctgccacaggacacagtgcttgggtggctatgtttaggagttaccagcacaagctatgctgggagcagcccttctcaacaagacttcaggccttgtattgagtccaagccagcaaataaactctcagtgacttcctgctcaattcctcttgggaatcttgggacagggacactattagtcttgacagattctcaattttgaatgtctgggtctgtcttttttttcctaataggcttttggcttcttctacaaatttttcaactcccatcttctgtggccagttcttcatacccaggggaggagatatttgcttttgttctaatat

SEQ ID NO: 239508 - DNA, 696 bp, Homo sapiens
cacatccacatgtgccccatcagcacgcctcctgtttcccctagaccttaagcagtgctgataccacgtctttttaacctcgcatacctgtcttactggtgaaaagggggttcttttttgatttcatttccctgatatgagtgaagttgagtatccattcatttggagattggcatgtgctccctggtgagtaaatctttgccactttccttttgaggtatttggcattttcatattgtttgaggtggctttttataacatccagaagatacggaatctgtggatgtgaattctttatatacatagaaaatatttttttccagtctgtcatcttttaaccttatatatggagtcttttgctctacagatctttataattgtatctaattagatctatcagcatttcctttaatggtttctaggtttcgtgtctgtgtcttccttaccccaggatcataaaataccttgagttttaaaaaaaaaaagtataattgttaatgcatttgaaatatatttttgtgaataggatgaagtagaaatctcacttcctagttttcaaatttgccaaaataatcaactattgcttcccccactagcttgaaaggctgcatttatcataaaccaaatccccatatccccacacaggtgtctgtggatgcatgtgtgtttactcttcagcctctaggtaaggagcat

SEQ ID NO: 239509 - DNA, 371 bp, Homo sapiens
gcaaatgccttcatgtcagtttaggagctgtgtaggctcctatggaatactccaccatttacattttcccaaagacacaattgtacaggttcataggaactcaagaacaggtattatttagcacctttcagagcagtagcttttaaacttttttttgacactaatccacagttaatacattttacatcacatccaagtgtgtgtatatgtatatatatatacctttaaaaataaaagttgcaagaatatgcatccaaactctatgctgtgcatactgatattttctattctcttccttttcattctttttttttttttttcaaaaagtgtaggttaccaccctaaaattagtttcacactcatcatttgaa

SEQ ID NO: 239510 - DNA, 379 bp, Homo sapiens
tccgagtgccatttaggaggtagaatccaaaggccctgtgggtcgagaggatgtgagaggtgtgataagtctcaggtttctgactatggcaattgcatatcctttactgagatgggaaacgcaggaggagaagctaaggggataacagctgtggttcggatcgtgttaagttttaggtgcctaagaggagatatcaggaggcccgtgagtggatgagtcagggctcagagagagatggaggctgagagcttgttttgggcctcatcagtctagagttggtgttcaaagcctttggaggagaagaaatgtgtattgaaagaaaggacctgaggacagaaccaagaggagcccctacctttaagaaagggaaagaaaagca

SEQ ID NO: 239511 - DNA, 481 bp, Homo sapiens
tctcatgctgaaatatgaggaggttgaaatgttgaaggttgggcctggtgggagatgtttgggtcattggggttgggtcctttatgaatggtttggtgtcttccccactgtaatgagttcatgtgaaagctggttgcttaaaagagcctggaacctcctctcctccctcttgctccccctctcaccatgtgatacacctgctcccccttcaccttctacaggtagtaaaactttcaaggcctcaccagaagccaagaagacgctgttgccatgcttgtacagtgtgcagatccatatgccaaataaacatattttccttataaattaccaggtattcctttatactaacgcaaaacagactaatatacgcatccatattcagcttctttgctcttctacttcctatcatattttgctgtaactttctggcacacaagtagacttaagcctgttcatccttagtagggaacattaggaaaca

SEQ ID NO: 239512 - DNA, 326 bp, Homo sapiens
tgatataggtgacttatgcttaaggaccactcatgtggtcacaaggatattctcaccggtatgttgttctgtggtggcagtttggcctgttttgaaaatggcccacatcacaagagtccttgtattattagctcagtcatcatcaggaccttttttttctttcttcttcttatattctctgccagttcttcaatattatgtccaaactgaagattgaaacaagttaatcccactaaactaatgctacatattttcttaggagttgccacagaaataggatcttatatacccatcccatcagtgaaataaagagccttaacaacaaa

SEQ ID NO: 239513 - DNA, 421 bp, Homo sapiens
tttactaactatcctaatgtcacttaaaagaaacaacaaagcagaagcaaccttaaaaagatataacaccaatgttgtagtccctcttccagaatatttagctattcttcaatctatactacagccctgacacgtcacaaagctccattcctgtgtgttatctagatgtaacatatctccagttgaattttcctccctacttcaaaccttataaaccagaggtcagcaatgtatgtcccacagccaatgctagtcagccacctgtttttgtaaataaggttttactgaaactcagctacacatattcatttacatattgtctgtggcttcttttgccttacgacagagtcgagtagtagcaacaaagatatgttggctcacaaagtcaaaaatatttgctacgtgaccatcttcagaaaaa

SEQ ID NO: 239514 - DNA, 355 bp, Homo sapiens
cagattcattgacaggtaaattcaaccaaacatttaaagaagagtgataccatttctacacagactcctccaggaagttaaagaggaacaactaggaggccaatattgttaccctaagaacaaaccagacaaagacatgacatgaacaggagagtacagaccaattatctctcatgaatgcagagttcttaacaaaattctaacaaactgaatctaataatatataaaaaggataatgtctcattactaatgggttttataccaggaattgaggttgtttctacattcacgaatcaatcagtgtagttaatcattaataacagactaaaaaagaaaaactgtatgatcatctgat

SEQ ID NO: 239515 - DNA, 380 bp, Homo sapiens
ataagctaattactctacagaaagtactgtaaacaacttgttattcttactctaatatgcgcatgcttttcaaaattttaaagttcttatatgatgaatgctatctcaagtaaggtatttattcataaggcgcttaaaatgtatgactaataacaagtgcaagcaagacagtgcttcataaaatattattaagcgcactattattgttacgcagtttttttaaaagggtgtaaatatctagaaaataatattcaatacctgctttttaagttgaattgttaaggtttctttttgttaaaatatattcacacaaaatgcatggtatcatagaagtaccccacagatctaaattccttagttacagcacaattttactagag

SEQ ID NO: 239516 - DNA, 460 bp, Homo sapiens
cgcgcccggcctttatgttttaaacatcgtttttgtgttcttgttcagtggttgccatgcagagagtgggatcagtcggcaggcacactcacccatccaaaaccggtttggatgttgggactgatggagggtgtgacaacacttattattcacataatggaatgttctggtgagaacagggcaagcacaggttggcccaggtggcaaaggcaaggcactgaggttgattttcagttttgttgtgaccaggaagcagagctgggctgagggttcttaccagggtgggctagctcaggtgtagggcaaagagacaagcagagagagagaaagagagagagaatgttggggtttgagggctgtcagtgttccaatgtcaaaatgaagttttcctcttaactatggtcccgataccttaatgagaacctgctaactaaataaagaatcttcaaatgagaaatga

SEQ ID NO: 239517 - DNA, 1903 bp, Homo sapiens
  misc_feature (49)..(49): n is a, c, g, or t
  misc_feature (1523)..(1523): n is a, c, g, or t
caatgggcatcgtgtgatgtaggaagaaagggttctggggtctgaggcnggagagacataggcatttgtaagaagaaaatccctccatcatagaggattccaggtagaggcaggttggctggagtggcaattagtccctggttttggcaggtatgaccacagagttctcctctcttgcaagggaacccatgagcttggacagagaggaagttctgttctttcacagggacctgcctggcatgcagttgaggtcagagggagtaaggctagtcctagtacaggtcccattttttccccctaaagccaggcagtacctaaaacttccagttccctgccaccccctccaccccacccccacccccatggtatagttttgactgaacaggaaaaaactagttggctaggctcaggtgtgcaaaataatactgggagaggtgttagtagccagaacacagggctccaccttttgttggaatcgccttcatatgtatatctaagaagatggagacttaatttttaaatctcacactcagttaactccattattgcccaaacgctatcttcctcttttgttgtaaagtagagaaagagggttttccccacatctccccttagtcctgcttagaagatggctgtgggatttgtgcttctttactgtagacagatcatgtcatctggacagcttcttcctaacaataaaaataatattaataataaaccactgtaatagataataaataacaaacttatcatgtgctaggttctgtgctaagccttttcctgggttccttaagaactaggatttgattcatgatcagaacccatggctctttgcctctgtgcttgcctgtgtgcatgtggtcctcatggcggaacacaagaaccacccacaacacccagcaagcaggcccaggatgcttgggtcctgagcccagacccactgtgaatgaattagggcctactgagagatttcctaggattggggaatctgaatgagtgaaaagcatcccgggagatgcttgactaggggctgactgctgctggttctgatgcccaccactagccctttctcttcccatgtgatccttctcctggctgatggtggtcctgctcccgtggcacttgatcagtccttccaccccttagtaatcatcttcccttctctgggctatgggtggttctccccactggccctggtgtttttccacactcactttaaactgtctggagctggtctgctttctttcatgtcagcgggtatgtatctttccaaccaaagagaaaacttctggaaggcagcaacagtcatttgccctgcctcctaacagtctccactttgtccgtgtctgtctctttccctcccttcctctccttttcccttttccttctccacctcagcacacagtgggagcttcctgttccttatttctcaagttgtcctgagcaaatcttcctcttaaggaatccttagtgcctgtccttgaggtgcccagcactggctgtgggcagcagcccttcacccnggccatggcctgccccgcccttcatggctgccccttttatggaagtgttgctggtttccaaagctccatctgctttggtggcttttagcttacttgctttgatgcaaaattggtagcacataacacaaagctcctgtaagcaacctgctagcccctttctccaagagtccagttatacataggaattggtaaaccaggctgttggaaacgttgacttctttttctgtagtttttttctggggcatctagagagaatgccttatttttctttccacacataaccacaaaaaagttaaaagcactttttaaaagacactttcccctcaattacctgtggtaagaaatgctgttcttatattacattccttcctcacccattt

SEQ ID NO: 239518 - DNA, 543 bp, Homo sapiens
cggccgccagccccgggcccgcgcccccagagaggccgagctgggagggacgagaggggggcgcgcactccaagtggccgcggctgccgcacccgcgcgaccccgccaggtgcgccgctcctcctgcactttcgggtctgcgcgggcgccactttcttccgcgccatctggtgtcagcctttggggaggggccttccccccaaggcaggggttggccctggattggaggctgaagccctgggatccgggagcagaaggtgccaagccccacctgcctgcccgctcgccactgttgtggagccaaacaattggacgcctgggactgaaacgggaaggtggtgccatgggggagaatccgagccctggggtggaacctgggccaggtggaattacctgcggcggtggttcgagttgggggagttcgggggtccgctgcagccgttcactcattcacttgctcaattcaatcaacacgtgtttactgcaggcctaccatgtgtaaggtggggaggggcatttatcgaaaaagtgaaacacaggtgc

SEQ ID NO: 239519 - DNA, 597 bp, Homo sapiens
  misc_feature (1)..(1): n is a, c, g, or t
  misc_feature (108)..(108): n is a, c, g, or t
ntttacaccttaggtcattacatattaagaatttgaatctatatggtgacaggattttttcaggtttatctcaccccgatgttgggggaaaaaaatctccagaactcnatagtctcttgaaatgattgtccactgaagttccacgtattcataaagtgctcccacaacttgctgacaagcataggtattttacatcctgccatgagtttcaagacattaactcctttagctatcaaaaatggataaaaaccacaggtgactgacaagactttcacaagtgcagacaaaggtttggattcaaagcctggtcatatggtttggctgtgtccccacccaaatctcatcttgaattcccacatgttgcaggagggaatcagtgggaggtaattgaatcatgggggcaggtctttcccatgctgttctcgtgacagtgaataagtcttatgagatttgatggtttcataagggggagtttccctgcacaagctctcttctcttgtctgctgccatgtgagacatgcctttcaccttctgccatgactgtgaggcctccccagccatgtaaaactgtaagtccaataaacctctttcttctgt

SEQ ID NO: 239520 - DNA, 882 bp, Homo sapiens
ccctcccacccccaccctaggtcctggaattcagctcacggcctggggactgcttcaaaaggcaggtcttggtctgaggagagggcagtcagggcatgaagctgcagccgccaccgctgcttctacaaaatctaagcactgggctgcagccatgtcctactgccagcaggaagggaaggatgcaatcatttgtgatgtaaaaagaccatgcagctccaagcaacacagctgatgaccccagtgatccctatggggggagcacggattgaggctgccaaatggagacattaactggaactgcctgtgccttgggggaagggccagcggcccctgtggggaacaattcaagctggacttttcctgcttccactatagtatggagaatgtcaaggggtcagactgtgtagaccaattggggccatgcaggaatgcatgcagaaatacccagatctttgtccccaagaaggtgaggcagaggtagaggaaaagcccgcagaacatgtagaagtagcagctcccactgaggccactgcaaccaaagaggaggaggggtcaagttaatgaaggccataggactccagtccttccaccccttcagagtgacacggaccttttgcaaaatgccatttagtcaccctccaacaaagtgtctttccctctgttgtcctgtaaactgtaatgtacgaaataacatattttgatgatcggggtcttggcctcttgacatatacgctaaaaaaatgggggttgttttatatgtgtcctgtgtaaacctgtcggcaaatatagccaccacttttgaattctcctagatggccctgaattttgccactttgaaataatgtgctactcaatctcagcaaccaaaaaccattatccagg

SEQ ID NO: 239521 - DNA, 832 bp, Homo sapiens
ccctcccacccccaccctaggtcctggaattcagctcacggcctggggactgcttcaaaaggcaggtcttggtctgaggagagggcagtcagggcatgaagctgcagccgccaccgctgcttctacaaaatctaagcactgggctgcagccatgtcctactgccagcaggaagggaaggatgcaatcatttgtgatgtaaaaagaccatgcagctccaagcaacacagctgatgaccccagtgatccctatggggggagcacggattgaggctgccaaatggagacattaactggaactgcctgtgccttgggggaagggccagcggcccctgtggggaacaattcaagctggacttttcctgcttccactatagtatggagaatgtcaaggggtcagactgtgtagaccaataaggtgaggcagaggtagaggaaaagcccgcagaacatgtagaagtagcagctcccactgaggccactgcaaccaaagaggaggaggggtcaagttaatgaaggccataggactccagtccttccaccccttcagagtgacacggaccttttgcaaaatgccatttagtcaccctccaacaaagtgtctttccctctgttgtcctgtaaactgtaatgtacgaaataacatattttgatgatcggggtcttggcctcttgacatatacgctaaaaaaatgggggttgttttatatgtgtcctgtgtaaacctgtcggcaaatatagccaccacttttgaattctcctagatggccctgaattttgccactttgaaataatgtgctactcaatctcagcaaccaaaaaccattatccagg

SEQ ID NO: 239522 - DNA, 607 bp, Homo sapiens
cagaaggtgaggctttgcttgtcgacctgcttcagtagtagcattgacagaacagtctctgtgtactctgtcccctcagtgctttctgcatatgtgttgctcactcatcactatctgcatgttcgtggtctctggaaagaatcaactataatgatcagaataattgcctggtaggacgtatttcctttgagttcagcaagacgtgccccctcacatggtgttcctgttcattcataaggctgtaataatgtatgagttaggagacccttttgaccaattcccctctgttttccatcttggaaaaaccagaactctgttttcttgagcaaatgacgttgccaccagccctgaagctccttttcctgggtttgtaggggttggtggaatcctggcagtctgccgctcttcctggcctccagagatcagggctgtgactttccatctgcagatggcagttctagctgcgaggttggtggccgaggaggacgaggacacagctcagggcctgtccttcaagggcttccgtgtgcagcagcagcactctgtaatatcatagatgaatttttgtcaaaacacagagaaaagttgattacacttctcatttatt

SEQ ID NO: 239523 - DNA, 465 bp, Homo sapiens
catgacacctggcttatttttgtattttgtgtgtgtgtgtgtgagccactgcgcaggccttgggcagctttcttgatctctgttacctcatctataaaatgatgataataatagcttctcccttattggggaattgtaatgattaaatgagataacatgtaaaatgctcagtacaggccaggcatggtggctcacgcttgcaatcccagcactttgggaggctgaggctgctagatctcttgaggccagcagttaagaccagcctggccaatatggtgaaaccctgtgtctaccaaaaaatacagaaagtcagccaggcatggtggtgcatgcctgtaatcccagctactcagaggctgaggtgggagaatcacttgaacccaggagacagaagttgaagtgagccaagatggcgccactgcactctagcatgggctacagagtgagagcctctctcaaaaaaaa

SEQ ID NO: 239524 - DNA, 2240 bp, Homo sapiens
  misc_feature (5)..(6): n is a, c, g, or t
  misc_feature (8)..(8): n is a, c, g, or t
  misc_feature (13)..(13): n is a, c, g, or t
  misc_feature (15)..(15): n is a, c, g, or t
tcttnntnattcnancaggtgttgtggaatacttaagcaatggaggagtagctgacaaccataaagacttcaaggaactaaggtacaatgagtgtcttatgaacttcagctgcaatggaaagaatggaagctcagaagggagaatcacacatggcttccaacttaagagcgcctatgaaaataacttgatgccttacaccaattacacctttgatttcaaaggcgtgattgactacattttctattccaagactcatatgaacgtgcttggtgtcctggggcctttagatcctcaatggctggttgagaacaacatcactgggtgtccacaccctcacatcccttcagaccacttctcactgttaacacaacttgaactccaccctccactcctgcctcttgtcaatggtgttcacttgcctaatcggaggtagtggagtactgccccgccaagacggggatctgttgctatggacctgtacagttgtaaatcaaagtatgtaggagtgaagtatggccatccttaagctgcttcttcaggtttctttcattatgtgtttgctgtaagactttgtacatttttgtgcatattggtatcatttggcagtagggctggaaccaaagtattactctctttacaaaattttaatttaacatgtttttaaattggaccttctttatattgtattaacagccagcattcaaaattgataaattaccaatttgaggcccaataacagtgtatttgtttttccaaaacaaatactttcttttgaatggtttcagtgagccaaccattttataaaaggcaatttttaaaaactataaatacagtattttaaactgaatgatgatatgccttccagggaaaaccttgaatttttcctttataactgacttttggattccaaagtcatttgcacattaacagagtacttaaatttacttgttcagtccataaactatgatatagcctctatacatggtaagaaaatttgaaactttgtttcagttgtctgtcagggttgaattaagaagctactggtttattcccaattgttgatgcctttaggtatgttggaatcttttttttgcctaggaggggccagttgaaaatctgtgactcaagaggcagtgaacagaatactgttttctggggaaaaattggttggctacttgatgttaattatggcacagtaacaggaaaaggttgtgtctgtgtttttaagtttttctttattctgcttttttgctgctataagagttttctgaaatttatattttaaacttttcatgcactttactgtttctagtctcaaaatgtgatatttttaataaacaagaaattttccattatgtgaatgaaattttaaaagacaatagcctatatttgtgtctcactaatatataaagtataggtcaaatttaaattatttaattagttttaaatatacacaatttgtctcctctttcaaacctgacatcttcggctgttttattagtcttaaatgatgcatttactttggtcattttatgctaatttcttccatagtaaattaatcaggctatataaggtaatatttccccagagggtaattttagtgggacgagggtggtgggatgatgtcatatcatacatgggattgcatcagaagggttctgtaaagcctgaactcccttttaaaagtgcctagtgatagaggcgttgtttgtcatctattataattggaatgtcattgtagttcagtgaattttgatgtaaataaaatatcttttaaaaatgttaaagtaccaggataaacaaacaaaaagaaacaacccttaagatgacagattttcctcaacatgcaggtttcccttcttatatacctcaagtatccaacatctagccatgcaaattgattacctgaagcatagtactggaaagtagaatagcatgaaaaacttaattttgtggacattacctttttttgtaatcagctactgtatgttttattttagatcttttgttttgggtgggttttctgctctggaggtatatgcactaacaaaacattttcctcctttcatatacgcatgttacttagctatgtgagcaatatttcctaccatacttcactcccaatattttttgagatgtttgtataaaatggaatttaaagttcacttatgattgtatatgaaccacagaggagcccatttattaataaaaaacttttttaatagttaaatgtagaggg

SEQ ID NO: 239525 - DNA, 531 bp, Homo sapiens
tttttgtactttttttttttttttggtagagtcgggctgttgcccggcctggtctcaaactcctctaactcaaactaaaaagccatcctccggcctcgtcctgccaaagtgctgagatcacaggcataacctgccgcgcccggcccaagtccctatttttctttccaggcttcctaagttcatttaaaggcgaatttatctattagtaatgacggctgacgagtgatggcagagtggacaggtgtaatggagagatgaaaaatgaaccttcgcctgtaatcccagcgctttgggaggctgaggcgggaggatcacctgaggccaggtatttgagactagcatgggcaacaaattgagaccccatgtatccaatttttgtgttttttttaatgtggtgtggtggcgtgtgcctgtggtccctgctactccaaaggctaaggtgggaggatcacttgaacccatgttgaggcttcagtgagctatgattgcaccactgcactccagactgggtaatagagaccctgtctctaa

SEQ ID NO: 239526 - DNA, 344 bp, Homo sapiens
caaacagacttgaaacacttgtacatcagctcagagtgtgcattgtccactgcaaatactagtgcaaattaagaagaagagaaaaaagaaggtccacgagctaccaatgacatctaggactgcttctgtctcatagcacatactcctcccacaaggactacaaatgacaagagaaaatttgtataattggaattctggacatttctcaaatgctcattgactcaaatactttctgctgtatttggaattttcaaaccaaaacatgatagcaaccagaccagaaaaatgtaattgaccagaaatgtcctacaatatttacaatatactcatttttctgcatgttc

SEQ ID NO: 239527 - DNA, 204 bp, Homo sapiens
ttaagagctgtttttgtaggtcagctattttaaattcccctcagtgttttgacatttctctgcacctccaacagatgtctgatcaatggggctgcagggatacggtgccactgccatgatggttgattttagaaaagcttttaattcagaagatgactatttcctcgaaaatcccttccatgcaatgaggacctagacagctgt

SEQ ID NO: 239528 - DNA, 707 bp, Homo sapiens
  misc_feature (391)..(391): n is a, c, g, or t
  misc_feature (406)..(406): n is a, c, g, or t
gccagggcctgcccgaggtggcacagtggggctggcagagctggggttcaggccattttccatctggcggcttgggcaggtgggcgctctctccccgtgtgccccccacccggggcctggtggcctctgattcactctctacaaggctccaccactctcccgctgtatctccctctgggtctctctgtgcatctctctctgtttctccccctcccctctctgcggcggaggtgcctctgcgcgccagggccaagcgccctgtaaatcaccaaagctgggattctggcagagtcagcgttctcctctctctctcctcgtgccgaattcggcacgagcatttcctcaacttcactactgtgtcgccctgtgggacagggaagtccaagtcggngaagaagcctgtggngaggggttggtgggagatggggagcccatatggcccagtgagtcaggaaaatagggtccagaggcagggaacataaggccacattcgacttgagccataccaggaaatgctctctccataggacgtatgccgtaaatgactctgtaccttacttcatcctttcgttatatagggcgtccttaagtagaggtatttaacacaaaactctgtatggggccttgagccctattctcagccccgtttcttcacaccggggggtgccttcatttcaataaaccctccttcttccttcaaaaaaaaa

SEQ ID NO: 239529 - DNA, 3874 bp, Homo sapiens
aaaaaggtacaactaccttgctgatgctgtacatatggctcacttgtgcccagagagagaataaagccatgtcgaaactatctacgattccttgagtgtttttccagctacctgccacttgcccacccactcccctcagatctcagttagaacatgacaattgggctcatgaacaggatcctgagtggttgcaggtgaacaagcagttggcacaagggcaaagtgatcacatcctgattgagtggctatggacagccatacagactgtgtggaacaacgctggtgaaatacccaaaccatttagaagcagtaatgcctcacttgcctgggactgggatggtgtggctgagactgccttactggcagccaggtgcgctattcagcagccacaagccctacaagtaattaaccaggggcacctgtttgagctggaggtgcatgtggccacagacggttttggttgaggcttgtggcaatgcacagagcgcctaagaatgccagtaggcttttggtcccaactatggaaaggagctgaactccggtattcattgatagagaaacagctagcagctgtatatgctggccttcgggctcatgagagcatgacaggacaggctgcagtcatcatatggacaacttacccaataacaggatggatgcgtctatgtgtaatgaccacctggagtgggatagcacagatgtccactttggcaaaatggggcgactccttgcagcagtggagtaagctgagtacaagtcccatagcagcagagttgcaagaggtcttgggacgtgtagtcctaatgcaagataaggccatgcggcctgaggcacccctagatcctgagtcttcaccatttaaggaagggcatcccaggattcctgagggggcatggtacacagtagatgaggtgctactgctgcctggaccactgttgcagtccaacctagtactgacaccatatggtttgaaactgggtgcggacaaagtagccaatgggctgaactcagagcagtgtggatggtaatcaccaaggaggtgacacctgtggtaatctgtactgatagctgggcagtctactgaggcttaaccttgtggttaactacttggaaaatacagaattggctagtgagccacagacccatttgaggccaagccatatggcaagacctttggggaataggtcatcaaaaagaggtaactatttatcatgtgtcaggccatatgcctttggccacccctagtaatgatgaggcagatgccttggctaaggtcagatggtcagagtcagcaccaacacaagatgtgaccttgtggctacaccggaaactgggacatgcagggggtaaactgatgtaacaattcaataagtgttggggtctgtcccttcccaagcaagacatttgtgaggcttgtcagaaatgcctggcatgtgttcagacatatcctaaaaagaggcagctgcccggtgttatacaacaagtaacaatagggtgagtgcccttgaccaggtgggaagtagactacatcgggccgccgccaaagtcgcgagggtatacgcatgcactaacggctgtagacatggccacaggcctgttgttcacctacccttgcagggtggccaaccaacagaacaccatccaggccctgcaacacttatgttccctgtatggttgtcctctggccattgagagtgataggggaacacatttcactggacaacaggtacaatgatgggcacagcaaatggacataaagtggggattccatgtgccatacagcccacaagctgaggtattattgaatgatataatgggatcttgaagaatggattacgcttgcatgtcaaacccctgtctttgcggagctggagttccaggctggacctggtgctccaaaccttaaatgaatggccacagaaaggtggcccggccccagtggaggctttgtttcactaggccaccacccccattcaattggagatacataccaaggatgacctcctccgatcaggtatggggacaaatggtaacctgttgttgcctgccccaacaaccctgaaggcaggggaacagaaaacctggctgtggccatggaccctccaagctctccactgctggtggttggccatcatagctccctgtggggagggcctacagtatgacttgcatgtcactttttgagtgttcaatacatggcttccaaggttgactgtttgtagaggaacagccagggaaggaaccctcctctgagggacatatgtactatctgatgggcctattatgagctacgctgtgactttggcatggatacaggattctaaggaaccatggagatttgagaaggtgtggtaccatcacccagggcaaaagcccttggtggctgcattgttatccagggatggaaagttagcctatattttgcctgagggatgtgatttacctctgttagtacctgtgcctgctctgtcatttcaaccgtaggttaacatgctccaattgcattgtggactgaccccacacctatgctgaggtgaccaatgtttccaactgttggacctgcactgcctttccagcagcagctgcagacagcttgccccgacacatacatcccgtgtctgcagagaactggacatgcctggagacttgagatcccatggctgatgcctggaacacaatgtggcaagctttggacaaaggacacagcaagacccatggctggaccgtagcattcgtgatgagtggggctggctagtaggggaacatgtagtagcccaagcccaggcattgcagtgcacagagcaacattggggtaacaggatgggtacctgtcacggcctgtgcaaacataacatgtgtcaccacactgaaggtatggtggaacaagtggcctcaccaaggtcggaccccaatggactttttgcctcttgggagcttatgggtctatgaggacacagtagcctttcctatcagcaaactggagtggatgttgtatctgggggtggccttatgtacctgctactgttctccccacattgcccagatgcctgtataactgggaggcactgtgctctcagtttttgcgaatgtgatgagccccctggtgtttctaccctttggcaatgactatccctggagcaggtgtcaaaactgtagaagcacaatttactgctcttgcggagcacaccgctcaggctctgaattacacctgagtgtccctcctcctgttaatgaatgaggttgatcagatcaaaaagtggtgttgcaaaaccaagtggccttagacataactgctgcccaaggagccacctgtgcccttttaggaacacaatgttgtaccttatccctgacaatcagcagaacataacagcagccctgcaaaggggtcttccaggagattaaggtgactgagagcctcactgtcaaccccctgcagagatggtgagcatccctaggttctggcgtacattgggccctaatagtcataagtatcatagctgagatcctagtagtgagctgttgctctctgtattgttgttgtgggttatggactcagggctccgccatataggcatgtgtccctgcctggaggacgccctcagcctagggggtgtagtgtaagggaaatggctgtgctttagtcaggagtaggctgaggcagccttctggtgcagcatgactcagtgggtttggagtgcaagcacacaaccttgctcgttatgtaaccacaccacatgaggcccattaggtaacaactcacatgagctcgtgtttggctcagagccactattgtctgtaaaaggtataccttgctgatgctgcacatatggctcgcttgtgcccagagagagagtaaagccatgttgaaactgtc

SEQ ID NO: 239530 - DNA, 2047 bp, Homo sapiens
tgatgctgtttgctgtagggattgacttaaattggagtcagttcttctaggacagtacgctgtgtgtgtgtatgcgcgtgcatgtgtgtgttgcagataagggcattatcattcggtcttcaagctccttttgtccactaaatttttgtgccctaggatcaattactttcactatttttgtgatccaacctttagcttctgacattcatttgtattgaattcctactctagctggcactgtgctacatattgagaatacaatggtacatactatagactaaattccaagagtttatattctacaggtttagagtaagttggaattccagatattgataagtgccctttaaaaaaaaatgaaacaaggtcctgagataaggatggcctgtttagagcaagaagaaaatccagtgtggctggaggagtgtggacaaggcagggagtgggtagaaatgtggtcagtgattggggctagtgccaggtccaggtcttggtgggtctcctggggcacagaaaagagcttgggttttactctaattgccgtggaagccaatagaggcttttaagcagggcatgacacgatctgatttagttttcaaagaaatcttgttggcagttgtgtagcctttctattcgaagcctggtctgtagatggactggcagcatgagcatcatctgtgagctttttaggaaggcacatttttgggacccactcaggtttcctgaagcagcatctgcatttttaatagaatccccagtttgagaacagctcttgtagagaatagatggggtcagatgaggaaaaacagctttacaagcccccacccttactcttttctcaggtgtagaaagcagattgttatagacagatttctagacttatctcagtgggctgacccaagcttgcttccaaattccactcttttttctttattttttttagataggttcttactctgttgctcaagctggagtgcagtgatgcaatcttggcttgctgtaccctcgaactcctgggctcaagtgattgccccatctcagcctcctgagcatcttggaccacaggcatgcactaccatgcccagttaagttttaatttttttgtagagacagggtcctgctatgctatccaagctggtctacaactcctgggctgaagcagtcctcccaccttgaccttccaaagaaagtgctgggattacaggtgtgagccactgcacccagccccaaattccacttctggttggactaacatagttttttatttgtttgtttatttccctaattcctaggtgactctccttcttgccttttactcagcagctgaactactgatttttcttttggtgttccatttatttatctttctattgattctgtaacttcatagaccctcaataaatgaccactatttccatcataattccaagtagcaattgcataaaatatccatatcttaaaagaaagataacaggacttcattataaggatggtataagtttgacacgcatatttgtaggcaggccgttattactaacttggtattatgaccactttaccatgaagggctttctgaatgctgttggcatgtgtgtcagttaggattaggtttggcttaagcttttaaactgttaataatagtttacacaaaatagaagtttatttctctctcatgtcaaaatctggagggtagactggaattgctttaaaagttctatttcataaagatctcaggtacctagactttttctatttcttttcactgtgtctagcctccattctgaagctgacctcatggtccaggatggctgctttacttcctgctatctcattaaaattccagccatcagaagagatgaagagatggtgcaaaacaagcactgcagcagacctttcagaaaggctgttagaactgctgcatgggccggcacggtggctcacacctgtaatcccagcactttgggaggccaaggctggtggatcacgaggtcaagatattgagaccctcctggctaacacagtgaaacctcgtctctactaaaaatac

SEQ ID NO: 239531 - DNA, 1130 bp, Homo sapiens
tgttttaaatttgcagtttgtggtcatttgtgacagcagccacaggaaataactaccggggtccacaaaccctagtgccacggctgttccaggtgacgctggactgggggaacagggtgatgggggctgcaggtacactgctgcctgtgttctcttcggcacccatgtccatgtgtggaaggcagagagctccctttgcagccgcccattgtgtgcacgtggcaggccagagagctgatgccccagccgcagcctccaccaacaacgataaatacatctgtgtcctcagccgtggttgggctaactccggggtgtgaattaggtggggccgagctccagttgccccctcagtggtatttgcctgcacacacacccttagtgacttccttcccctccctgcaacctggctggtgcttcctggggtcacctccccaataaacacctgcactcactctctcatctcggtgtctgcttctggggcagcctagacggacacagagagcttgtggatggtggatgaacaaggcctgtctgagggagcaaggtatcagggaacctgagcctgagggaggtgcgggagctggagcatgggtctggaggaggaaaaagcactcttggagtagagaaaataagggaggcagaggggatttaaccaatgagaaacccaagaaaagaacctccagggcaagaagtccaatagggctgatttcttttctttgcactctttaaacaatcattatcatagtaaaatatgcgcatagttaaaaaaaaaaaaaaaaccaaactgcctagaatagtggtctagtgaaggcacagctcctcgcgctacctctcgcctccagctcctgcctgctccctgaaggtaaaacctcctttgagcagttttaggctttggctctggaggttgcccccatgcctctgaatgacagctgctgtggttatttggagtttatcagcctcagatattgtctgttgacctgctgcgatgaaggatggagtagtagacggaattataaaatggcccagagtctggcccctggtgcacagctacctccccgctcccgtgcacttctcaaacacggttctgggtgcagctgataacagcccagatcactggactttaagatagg

SEQ ID NO: 239532 - DNA, 615 bp, Homo sapiens
gaagccacagagtcgggaccgggtgcggtgcgcgcgcctcaaagatcgcaaacccaggttacggcggctggccacgcccctccaccgccaggccacgcccccgcagcgctcagtcggctccctgcaaagcccagctgcttccggctttttctccgcgccagtcagccatctttactgagggcagccgtgctccctggcttcaggttaaaggcgtggtggcactgagttaggttaaccgcgggcagagaagcctgtccctagctacacttccctggtagttcgcatagtcacctagaaagatagtgctttcttgcacccgatgggctgcttgttccctccctgtgccgcgcggggcaccctcggacggcgcatctcgcggccattggctgaaaggaagaccgctgggaggcccatcttccggcgtcgcccgggcagcgcggctccggagctgtctgccactcttctcctggtgttccttcagccccgtcagtgacgccgcggacggccttcttatccctcgcctgacagcagtggcctccccagctctctgtcctggctcctattcgcctcctgacagcgctggttgtgttgcttggggcgcccaggcgcggccgc

SEQ ID NO: 239533 - DNA, 412 bp, Homo sapiens
cctaatcttttcctagccacaagatgctctctacaaccctggcagtgaagcaactgaacccagcccctgggaaataagccccagtcctggtaattcctgtaggaattgaaataatactagtgaactatggcgggcacagtggctcacgcctgtaatcccagcactttgggaggctgaggtgggcagatctcttgaggtcaggagtttgagaccagcctggccaacatgatgaaaccacatctctactgaaaataaaaaattagccaggtatggtagcatgcacctgtaattccagatactcaggaggctgaggcagcagaattgcctgaaccggggaggcagagtttgcagtgagccaagattgtgcctctgcactccagtctgggccacagagtgaggctccatctcccaa

SEQ ID NO: 239534 - DNA, 472 bp, Homo sapiens
ccatttcaggaatccagatatggtcatgatggacaggaagagacaagagttacatagaggaattctgggaagataagaaatgtcatttttatgtactgtttgcatccatcagacaaggcatcaggaaaaatgatccttcaggaaagagtgattttttttcttcaagaaattagaagaggggagaaattggtttaagattaaggactccatgcataagagaaactgggagggaagacaggtagaaatgctatggggttaggaaggaagaatgcagaggtggattacttagaattgagacatctgatcaagacagagggatcacagcttttgctaacaaagtactagtggaggatgccactaggtgaggtttaataaataattgttgacaataagttccatttaaaaaataaacaatttatgcttcttctttgcctaagtgtcaaataaaacattcagatttttatttcaaagt

SEQ ID NO: 239535 - DNA, 435 bp, Homo sapiens
gggtggttggtctccatccagagatgtctgtggaaatatgtggatacctggatacgtggcaactatggtaattctttatgaacatccagttgccatccctttaagcaggttgagcgttcaacagtggataactcttccctagagtactagtcaattttgttgtgtgacaatcagaaagcctatttaataccaggtactgattccaaggctgaaaagaaaagagaagaatattatattaagtggaaatgtagtaaatttactactatctaaatcttaccttgctattctgccagtgttttatttcaattcactgccaaataaagttgcaactaatttttaaactaatatttaatgttggagagatttagggatataatttgtactggtatcaatgatacattaaccaaattaattaaaactagcttatactgaaaa

SEQ ID NO: 239536 - DNA, 254 bp, Homo sapiens
ccagagtccatgctctgcctcctgactccactcgcctactgccttgtaaaatagaccatttctatacagcaagaaagtacaaatagaggtgtactcagagaaagcgacggaaagataacatactaaatgtcacagtgattatcataagggtgtggaatcatgtaattttattatgttcttttttgttcaactgcatgtgctaaatgtatttgttgtgtaataaaagaataaatgttataatatttaataccagg

SEQ ID NO: 239537 - DNA, 395 bp, Homo sapiens
atcttaaactcctgggtttgagcagtcttcctgccccagcctcccaaagtgctgggataacaggtattgagccaccccgcccagcctcacgttcttctcccatacccacacaccttgatcttgactcacccagctctctccagcgactcttttatttgtccctgcctccactgccccgtctactcccacagcaccctggccattccaaccagcctcccctcccaacccacgccggcccatctctctttcttgcctgtccccattggcatccatggccctggtccatccatgtggaagcatttctctctctatattcacactaacctacctcttttccccatccctgtctgtgtgaacacgtctttcctccaaccacataccccttcacctcatcc

SEQ ID NO: 239538 - DNA, 379 bp, Homo sapiens
acatctcaggcctggtgagtctggatgtgaccgcttcctgtgggagcccaaggcgcacctgcgtcaggaagcgagacccgcactgggcagagaccaccagcatctgatcctgacccggctcaccgagcactgtgtgccctgtgtcgtgaacaaggacgcttactgtgtctgtggctggctgtggaggcttccctggggctcccaggccctgcctctgaccctcagccttgggagctcagggtcccctcgcacctcggggtccgtgcccaaccacacgatgccccctgtagcctgttttcagaggtcattccccgccccaacacacacactctgcaatatcttaaattatatatatctataaatgatatatacataaaaa

SEQ ID NO: 239539 - DNA, 356 bp, Homo sapiens
gaagagaggaaatcggtgacagaactgaattaagacatctttctagaaggagccattttccagcctcttaccactgccctgggtgatcctctaggtcacacaggagctgatatcatggttgagccctgggaatctcagccacgctctgtccctgtgcatctcatacaagcttccatggtgatgaaaattgttaagatgtcttatgtgaagcacatgggcgttgggtttgctcatcacaagctgcctgctgctgatgctgtttcacctatttaaaatacccaagtgttgctttatttaatggaattgtgcccctgcccctgcacttgcatatggtcttagattgctgctcatttcca

SEQ ID NO: 239540 - DNA, 257 bp, Homo sapiens
tgtttggggaataaggtctcttgagagtgttgggttcaagggtgtagtacatataatgggaagtagcattggaaagatgggcagacataaagctagaagtcaagtcagaaaagtgtagggccttgaatgctgtcctaaaaaggtgggacctccttttgcatggaatgtttataagatccgctcttcaggagattatcaggagattagcagtgtaaagattgcactggaggaagacagaacagcaggcagatctgata

SEQ ID NO: 239541 - DNA, 375 bp, Homo sapiens
ccatgtgtggtggcgcccacctgtagtcctagctactcagaaggctgaggcgggaggattatttgatcttcagaggtcaaggctgtagcgagccaagattgggccactgcactcccacttgggtgacagagcaagccctgtctcaaaaaaagaaggaaagaatgagaaaagaaaaccagaggagacctactccaacattaaatgtaaatagatttaatgcttcaattgaaaggcagagatggccgggtgtggtggctcatgcctgtaatcccagcactttgggaggtggaagcgggtagaatcacctgaggtcaggagttcaagaccatcatggccaacatggtgaaatcccatctctactaaaaatacaaaaaa

SEQ ID NO: 239542 - DNA, 416 bp, Homo sapiens
tgcccatcgacagtggactagataaagaaaatttggtacatatacaccatgaaataccacacagccataacaaagaacaaaatcatgggggtttttttgcagcaacatggatgcagctggaggccattatcctaaacaaattaacacaggaacagaaaaccaaataccacatgttcttatttataagcaggagctaaacatcgggtaaacatgggcataaagataacacggtagacaccagggattactaaagaagggaggatggaagcaggtgtgggttgaaaaactgcctattgagtaccatggtcactatgtgggtgacgtcagtatcatgcatacatcaaacctaagtgacatgcaatttacccatgtaatgaatttgcacatgtatcccttgaacctaaaataaaagttgg

SEQ ID NO: 239543 - DNA, 385 bp, Homo sapiens
gtatgaaatgatccatgtgacttaattcaccatgagatttcctaaggccttggtgtgggatttcaatctcccattaatcaaattaaattaatttttgaagcctcttgactgatggtgagtgaatcccagacaaaggcatcccagtgggctaccagtgcctcagatttctaccctgcttgacttgaccgcgtgtgcgtgcacacacacacacacacaattaaggttagggttggaacaaagagaaaggcacacacaacacatacatttctagccattctgaatttctagcagttctagatggtcttaggtcagcaaaggattcttgcactcaacattcagccaaaacaaggctagtgttcttatcatagcacaccccacccgcata

SEQ ID NO: 239544 - DNA, 207 bp, Homo sapiens
tagcaaggatgcaggtcccaccatccatgaatgctgccatttaattcaacatgagaagtgacccgtttcacctgtaaacggggtgggggaactcaaaatactttcaaacacaaggactttgactttacaacgtttggaaaattacagaacacaagaaactatttctatcaaaccaaaagaattcagagtttctcaagagatctctta

SEQ ID NO: 239545 - DNA, 420 bp, Homo sapiens
gatgtctccgtggaggcgacatgtgaactgagccttgaatgatgcaccccagtcacacctggctaggagagacctggtgtgagagccttccaggcagaggaaattactgtgtaaagatccttggatagaaacaagcttgggccaggcgcggtagctcacgcctgtaatcccagcactttgggaggccgagacaggcagatcatgaggtcaggagatggagaccatcctggccaacacggtgaaaccctgtctgtaataaaaatacaaaagattagctgggtgtggtggcgggtgcctgtagtcccagctactcaggaggctgaggcaggagaatggtgtgaacctgggaggcggagcttgcagtgagccgagatcatgctactgcactccagcctgggcgacagagcgagactccatctc

SEQ ID NO: 239546 - DNA, 2160 bp, Homo sapiens
  misc_feature (636)..(636): n is a, c, g, or t
  misc_feature (1129)..(1129): n is a, c, g, or t
  misc_feature (1477)..(1477): n is a, c, g, or t
aataaatgttcagtgagaaccataatgtgaatagtataacccagcatgattttggtgtgaggataattgataatcattttcttccagcagacctacccatctcggtgggatttgcttcaagtgatgtatatgcaaattaatttgcatctcctggtcatatactaattggttggtgagtggttagtagccaagaaacactgcttatggcaagagaaagtcaagtgaaagattaaagaaaatcatgattaataatctgccagctgataaataagatagttataacaccactttggtgaggtgtacgcttttggccatgtgtacactggtgcattttcaagacagtggctatcttttcacttctgtttggctaatcatgttatgttgttctgaagttactgctgccctatacccacttcacacagcctgagctctgtctccttccaatgaacatgaagatcttttgattccgtagttcctggttctgttctgattccgacaggatgctggcatcctcaattaggccagctaaggaaagcattagaaaacagtgatgcactacactctgtggaacttaccgaaaccaacaggattttagagaagaaataagggggagcctgaagctgtcaggccgcaaanaatgtcaaagagaaatgaaacttcagtcttagaatgtcaaataaagtgtgataagaaataagaggagggaagatattccaagtaggtaagggcatcagcataagcaaaggtgctggaaggggtaatgaacatgtaatggtgggtgagcaggactgctgggagcagacagtgagtttgggtagaaatgacatagaagagtgaattggtaaaaatggaagagatgatgggcaaatgagaaagcaacgaagcaaaaaatatatagtacaatatgatattggaggacagaaatgattattgggggtaatttgacttttgaccatttcccaggcttaattcaagtatatttagctttcaaacatgacttctcctaatatcttctacacagctctttcagatgaaaaaaaaattggctaactgggtaaagggtgatacctttatagctctatttttttaatccctgaggaagtgaaccatgttatgagtcacatacatngtgtttaggtaggtgaggaaatgcattgaactgatttgcagagaatgagagctccagacccagacagtgagacttcagaacttcatagatgtcaaagcatctttgacatctatgtcccagctctaggacacattcatgataggttcacttacttccaaacccaaagaggatattcttagacacttcctagtttcttcatcttgtaaaagtggttaagtggcttgtccaaggtcttttggctataaattgtagacaaggattcagagccaagtgttctgtccccaagaatgcttttgtctcttttttttaaatagtaacatcatgaggacatctcaggtcatggctggngagtgctttgtgctctgtaagggactaggaaattgttcacatacttcttcaatattgttcctgctgtgctttttataggataacacattttaactctgtcctcactaccaagactttatataaaatcagctggaatgaattgctggtcaaattcaaaattaatttcatgtcaaagtcttttcctcatgatatttgtgtgttttgtgagaactgcctttcttaaattcttctgaaccaactcataatactccaaatttaaatccatccatctataaaactaccttttctgtatcagtagtactttttcagaacatacctatttctagattataatcaaatattcttaaaataatctggtagtctgtgagtcctttgtctagaacttaattaaaagtggcaaaggaggccgggcgctgttgctcactcctgtaatcccagtactttgggaggccgaggcaggtggatcacgaggtcaggagatcgagaccatcctgggtaacacggtcaccccgtctctactaaaaatacaaaaagttagccgggagtggtagtggatgcctgtagtcccagctacttgggaggctgaggcaggagaatggcatgagcccaggatgtggagcttgcagtgagccgagacggcaccactgcactccacactgggcaacagagcaagactccgtctc

SEQ ID NO: 239547 - DNA, 488 bp, Homo sapiens
tgagatgaagtttcactcttgttgcccaggctggagcgcaatggctcgatcttggctcactgcaacctctgcctcccgggttcaagtgattctcctgcctcagccttccgagtaggtggaattacaggcgcccgccaccatgcctggctaatttttgtatatttagtagagatggggttttaccatgttcaccaggctggtctcgaacttctgacctcaggtgatccacctgcctcggcttcccaaagtgctgggattacaggcgtgagccaccatgcccggcctaattttttatatttatttgtagagacagggcttcactattttgccaaggctggtatttttttgacgttaaaaaactttaaatcaagtttatatctgctgtaaatttccattctctgtttatttcttggacctttatgcttcgatttctcatactcggctgtgctttataaattgcagttccttagccatcactgccattgtca

SEQ ID NO: 239548 - DNA, 625 bp, Homo sapiens
attcttcatctcccttacgtgaaatcttttaacagacacaaggagagaacacaaataatattgttttgaagaaaatattagtgtttctcttgtcagaactttgatttgatgaggtgattaacgaatatttattgagtacctactatgcgacaggcattcttctaggtaacggaataaatcagtggggaaaaaaatatcacatacatacatatcttcccttctgaagcttaactggtagtgagagacagaaaataacttatgtatagtaagacttcccagatatatgcagagagagtgagcaagacagaattaacaaaataatcacatgataaaagccaggcacggtgactcacgccagtaattctagcactttgagaggctgaggtgggagaatcgctggagtctgggagttccagaccagtctaggcaacataataaaactccacctctacaaaaaaaatttgtgttaatcagctgcttgtggttgtgtgcacctgtagtcctagctactcgagaggctgaggctgaagtgggaggatcactttatcccaggagtttgcggctgcagtgagctatgatcacaccactgcactccagcctgggtgacaaggcaagactctgtcta

SEQ ID NO: 239549 - DNA, 320 bp, Homo sapiens
cggcggccgcgcgacacggctgcgagaacacgacagaaggtgactcacgccagtaattctagcactttgagaggctgaggtgggagaatcgctggagtctgggagttccagaccagtctaggcaacataataaaactccacctctacaaaaaaaatttgtgttaatcagctgcttgtggttgtgtgcacctgtagtcctagctactcgagaggctgaggctgaagtgggaggatcactttatcccaggagtttgcggctgcagtgagctatgatcacaccactgcactccagcctgggtgacaaggcaagactctgtcta

SEQ ID NO: 239550 - DNA, 1862 bp, Homo sapiens
  misc_feature (237)..(237): n is a, c, g, or t
  misc_feature (327)..(327): n is a, c, g, or t
  misc_feature (1842)..(1842): n is a, c, g, or t
tgcatttgcatttgcagttattcataaattctttgcatagaccaatgtccagaagagttttatctagttttcttctagtattttttacagtttcaggtcttacatttaagtctttaataatataaggaagatatttctaatagtcagccttctacaatttagttgggcttccttatgtggaaatgcattctctagtatttagtattttagaagccaaatggccaccttttagctccntggtacaggacattcttgcctaaggtaagaagtctaatgaaatggaatcctgggtcccctgggtctatcaaattttatgatgccttaagnaataaaattgtttcagatttttacctggtgatgaaagaaataagtattgaacatggcccaataatactctacattccccaattccacaccctgcaatttttaaatttgatttagtgtttctgggtatttcagaagtcttcttactcccccacagaaatgctctactttttccattgccacatttttgtcagcattcttcactcattaacttatcctaatcctagcgcggctcagctggtccctgaaaactgcaagccaggctaatatttccttctctgacccatccactgtccctccaatactgctagtgctacaagccaggctaatatttccttctctgacccattcactgcccctccaatactgctagtgctacaagccaggctaatatttccttctctgacccattcactgcccctccaatactgctagtgtagcaattctaacaaaggtgagcgcagctggggaggtagtcagggcttggaaagggaaggcagggaaccaggagctctaaacattgttgactctaccaaatgtaattgagatgaagttctatgtttttcctgagccccaagccttccgccagatacctagtgctgccataggttgatgagggaggcaaaaaaaggccaggggtcatcaaaattgtggtcattattaaaggctctgaacctcactgtgatctgatgagttcagctagaccaagggttactattaaaagcaccttgcctagatagagacagatttggacaacatatactaaaacaaatgagtggtctgacttcacactcaggaggtacttgttgaacactgattgtatgccataagggattctaagtaatgaatttatacagagaataagagagatactgtctctactctcagacttacaatctagtggggaaaagaagagagacagaaaaaataactagattatcatcagatagtaaaaagatgcaatgaagagaggtaaaataaggtgatgtgatagaaaccagatggttaatttatatggaggaatctctctaagttattgacatttagactaagagaggaaaggaagatggagcctgtcatgataagattggggggaaattgttccaagcagagggaacaagctagtgcaaatgccacaaagcgggaacaagtttggcaagtttgagaaccagaaatcggaccaggatagtgagagcacaggggaaaggggagagtggcatgagatacactcagaaaggtaaaaacagtccaaatcacatgaaattttggaaaccaggataaaatgtgaaatgtttttctcatgttatgggaagatgtaggaacatttttaaaagagggtttgacatgaatcaaatttgagatttacaaatctaattatggtacaaccatgctgttgcaaatgataggatttccttctttttaaaggcagaatagtattccattgtgccacatggataaactggaggacattaggtttagtgaaattagccaggcacaggaagacaaatattgcatganctcacttataggtagaatct

SEQ ID NO: 239551 - DNA, 294 bp, Homo sapiens
gcgccctcatcctcccctctcagtgtaggacaaagttgcagagtcctcagcagggagcatataattaattcaaaaatggaaactgcagtccatgcggctcttctatcactagggtgtatccagctgttcctgtgggaatccagtcactcttaacttcattatttgcctttcagtataggatcttatttttctggctcacatagaatataggtatttacaggcacaagggctcaagaaatgctctttcccttcttcttggtgcaggaatctagtctatcacatccctaccagacc

SEQ ID NO: 239552 - DNA, 336 bp, Homo sapiens
ctcccagactcagtgattcttctgctacagactccgagtagctgggaccacagctgcacaccaccatggccagctaatttttaaattgcttgtagagatgggatgtccttatgttgcccaggttggtcgcagactcctgggctcaagcagtcctcccaccttggactcctatagtgctgggattataggcatgatccactgcacccagcccaaaatttaccattttaaccatttttagatttacagttcagtggaattaagtacatttaccttgttgtgcaaccataaccaccttccactttcagaaacactctgtaccccttaaacaataactcc

SEQ ID NO: 239553 - DNA, 465 bp, Homo sapiens
agatgatgaaatattttaataaacgatttacaaacaggcttaagtggctgctaagaggagactaaccccaacctgcagtacacatctcaggtgagcagtgccccaagagggcacttctcagctgtggcacatagttggatgggcctggctgcccatcctttacctgtgtgccctcctacagtcactggccctgtggtttccgtggaagacccagcaggggccttctatcccctttgacccatttctaaagactttatataaattttttaaaaatgttttttaaacaacagagagtgagaagttatggaaactcatttaaaaattttttaaaaagtgaaacctctgtgctagccaattcttaaacatggtgtgttttcctgcttaagttatatagaaatattttcctgtgaaaatactttgtctctgtgacaattctcccaaacaaaaaaatctaaataaaaatta

SEQ ID NO: 239554 - DNA, 581 bp, Homo sapiens
tgaaaattgtatgtatttatagtgtacactatgacgttttgatatatgtatacatgtggaatgattaagtcaagctaattgacgtgtccatcaccttacatccttatcatctttttgtgatgagaacttttaaaatctactgtcttggcaattttcaagtatccaatatgttattattaaacactttttatgctctaaataaattgaatttatttttaatcctttggatacttactggcaatatgacacaaattatgagaaaacctgattagtgatttgataaaattaaggtagaaagataaattgtatggactatattgtaatttaaaaattatgtatgtctttatcttatttttatctagacactgccagctcatcaacattatatccagacatgtacaatactgcttaaattcagttgtcttggatattctgtcaacttttagtcatacaaaaatcacaactaggttgggcatggtggctcacgcctgtaatcccagcactttgggaggacaaggtaggaggatggcttgaggccaggagttcaagcatgggcagcataacaaaattctgtctctaca

SEQ ID NO: 239555 - DNA, 1272 bp, Homo sapiens
  misc_feature (716)..(717): n is a, c, g, or t
acataatgttataaataagaaaactgaggctcaaaaagttttacacttgtccaaaggtatccagcaggctgcagacctggactttgaatccaagtttttctcattcaaaatatgttttttctaatgcaatatgaggcatgaaggcaatggtatccttttgagaggtgtgatggtaagttttatgtcagcttggctaggctgtgatgtctaattgcttaaccaaacactggtctaaatgtttctatgaaagtatctgtggatatgattaacactcacaatcagctgagcacagtgggctcatacctgtaatcccagcattttgagaggccgaggcaggaaggtcacttgaaccaaagagttcaaggccagcccagggaacatggtgaaccactgtctcaacaaaaataaaaataaaaattagccaggcatggtgtcatatacctataatcccagctacttgggaggctgaagtagcaggattgcttgagcccaggaggtcaaggctgctgtgagtaatgaccatcacaccactgcattccacttggatgaaaaaccaaaacattgtcaccaaaaaaacaaaaatgtataaataaataaataaataaaatttacaatcagttgactttaagtaaagcagtgtatccttcataatgtgggtgagactcatcggattagttgaaggccataaaagcaaaaactgaggcttcccagagaannaggaattttgcctcaagaccataacacagaaatactgcctgggtctttagcctgccagccagccctatatttttcagacctgccagctcccagaatcacctgagccaattccttaaaataaatctctctttttctttctctctttgtatatatataaatatgtatatgatatctccaatatatacatataattgaggggacataaatataaatcaatctctctccattaatatatgtatataataggttctgtttctctagagaaccctgactgagacaaagagtaactgaaagtcacccaagagaatgtggaaaagagtcaaaggaaatgtatttctccctcaataggtcatttcctagacaactttccagaatacgacaagaagcacataacttcatgatcaaggtcagaaagatgctttttctgtaaagtgcctcatgagaaattttgtatgctttatttttttcaaggtgaaaaaaagtttgtgaatgtttaaaaataattcttttcaaattgtcccagtgcagtaatttttagaatgcaaactcactctg

SEQ ID NO: 239556 - DNA, 622 bp, Homo sapiens
ggggtttcccagtcaggctgtgtaaaaggcgggcaattttttttttttttgctgttaacctctgtgctggttttactcttgaacagggctaacatgtaaacatctacaaattcttgttttttatttaaacgtatgcttttacaaatgcaaggaacccttcactgaaataaaaaacaaacaaaaacagaacaacaacaaacgcatctactttggacccagagaagaaggtaaaggcatatgtctgatgtcatcaccactatttcaagaaaaatccacatgaacaggggacataaaagtagtgaaaatgagcaagcagttagggaactttacattccaaactcccaaagagcaggaggagagactggaaatttcaccccacattctctcccctcacttatcacaaaaaatcacattgtattagttcagtaccttatgaatcagagactgaattacatttggcaagaaccctctctagagtgaaatggaccagaatggaaaaacctacacaaataagataacccacctccggtccaagacttgaaaataactaaatagaattacaactgcgaagctattctttggaatgatgctttgaccaaaatagttcgacacacctgctacc

SEQ ID NO: 239557 - DNA, 374 bp, Homo sapiens
agggaaaaaatattttcttctgggtggccctaaactgctttctttttccccattgcaaatgtatttttatgctgggttacatttccaaaacaggagtgttttttttctatcgttgaaatgaaacaaacaagtttgctttcagagctacagaaatgcccaactgttaggaaaaaaaaaacaaaaaaccgttttccactggccgcttgcctctcttatccccatgcaaccttgcctattggcccctttccctaggagagcccctggggctgtctgatggaactgattgtaaaactattttgtgcagtaaaaaagtcgtttcttcaaaatctgagaccacccagaacatgcccaatctttggcaaatatcgactggt

SEQ ID NO: 239558 - DNA, 278 bp, Homo sapiens
actgaagggatttaggcttctgacttctctgctgcatctgaaaatctaaataatgaatatattagtccatgatatggtttggctgtgtccccacccaaaatctcatcttgaattctaatccccatgtgttgggggtgggacctcattggaggtgattagataatgggggcagttccccatgctgtttttgtgatagtgaatgaattctcatgaaattggatggttttttttttttgagagtcttgccccattgcccaggctagagtgcagtggtgcga

SEQ ID NO: 239559 - DNA, 425 bp, Homo sapiens
cagagagcaataaatgccttctgaaaaaatgacaaaaatgagcagggacaaggggataaaatgccagaagtgggatgggagttgtagttattaaaaaggcagtcagccacagcctcactaagaagagggctgacatatgtgccaagaattgtagaaggtaaggtcaagcgaaggaagagcattcaaggccacactcccaaaggtcctgaggcaagaggatgtctgaggtattcaagaaacactcaaagtgaccatagtgactggtagagtagagaaagtatgggggagaaaggaggagatgagattggaaatgtttggatctgggtttgaaaatgggagttgattatggaagactctgtgcaggctatttaaggattgcatttcttattctgaatgaggtagggaaccattaaaatattttcagc

SEQ ID NO: 239560 - DNA, 401 bp, Homo sapiens
aaactaataaagggaagcagatttataagtcaatcaaaaacagttataaatgcaagatgcattattctggctttgcaatttgttgctagttgctttgaacatggctgtgtcttttttttctggaaaatacttttgaaattaaaccacaaagccacagagtaaagccctgatttaaggaacaacctagaagcagtttttgtaaaacttcttctttttttccttatatatgacaagaataagctacactctgatgaaagtcctttgaatttcacttccaaaaatgtctcccaattttgtttactttttcttccctattatcaataatactctccttcttttgtcatgattacagcagctggtctccctgtccttcgtattcactcccatgatattttcataaa

SEQ ID NO: 239561 - DNA, 614 bp, Homo sapiens
agatacaggaagctcacaattagcctaggaagagaaaatggcgacagaaatatggacgaagatagagattctcatcactgttgcttaaaaagaattcaatcatcaatttataatttcagaagagttctgataagttcctggaatgagacatgctcctaaaatatactaccatcactataacttagaactaggctaagtgtattacatatattaacctaactgaattacctatcaaccctatgaggtaagtgcttttattatctctagtttataggtgagaaaaccaatgcttaaagaggttaagtactagctgcttgttacaaacaaaatatttgtgttcccccaaaattcctatgaagttctgacctgcaatgtgatagtatttggaggtagggcctttagaaggtaattagggctagatgagatcatgtgggtggggcacccatgatggaattagtgtccttataaaaagaggaagagctggtgttctctgtctaccaactgaggacacagggagaaggctgccgtctgcaggccaggaaaagagccctccccagagctcaaccatgctggcaccataatctcaactcctagcctccagaagtatgaaaaat

SEQ ID NO: 239562 - DNA, 387 bp, Homo sapiens
gagacaaagtcacactctgttgcccaggctggagttcagtgatgcgatctcagctcgctgcaacctcctcctttctggactcaagcaattctcgtgcctcagcctcctaagtagctgggattacaggcgtgtgccactacacccagctaatttttagtatttcttgtagagacagggtttcaccaagttgcccaggctggtcctgacctcaggtgatctgcccttcttggcctcccaaagtgtagagattacaggcatgatccaccgtgccctgcctgggttcttctgaattcaaggtctttatgtgtttttatgtctcttgcttgagattaggatatgggattatactcattcaccacccatcccctcccttcatgaccatctctc

SEQ ID NO: 239563 - DNA, 527 bp, Homo sapiens
aaatatttaatgtttatggtatcacagaggtatcaagttgggcgaccatttataggattccagagaagactcttaactctactctcaaatgtgaattgcctgtacaactgggatttccacttcttggaacagtagttgaagtcagagatactaatggcttcacaattcaggaaggcagtggccaagtatttttaggttgttttatatttgttgattgggaatttttttttcaagaaaaatgatctgatgtgttaattttattcctttcgtctttttcttttgtctatctcatgcttttcagtgataatttttattctcattcatatagtcatgaaataccaaatgttacaataattatttcagataataatgtctaacacattaataaaagtaatttagagactgtaacttggaccttcatatttatatttatagccaaaattatatttaatcagtagtctaagaatttttttaattccataaattttaagaaataaatttcattttatctctgcttatttactgaa

SEQ ID NO: 239564 - DNA, 352 bp, Homo sapiens
aaatatttaatgtttatggtatcacagaggtatcaagttgggcgaccatttataggattccagagaagactcttaactctactctcaagtaagggttttcattgtactatatagagaagagagactgtatatttctaggatcttaacactgacagtgtttttgataggtgctggggtaataattttagaaacacgattgtatctgatattttaagttgggaatccagaaccttccttactatagctggtgccaagatactgctgcaactttttgtactaaatagtaatgaataacatatatggttacctttccacctaaccttttcctcttgtcagtctttgaattagagcg

SEQ ID NO: 239565 - DNA, 374 bp, Homo sapiens
ggccccccagggagattgaaaagggagggccagaggacagacatgaggaggagacacacaggaacccaaggaggagggtttccaaaaggtgaactggctggccatgggctgtgtccagagagggcagaggaggtgacttggccctggggaggctttggggggatccttgtcggagcagccttgggtgaaggcagaggagccgtaaaaagggaggcagtgaaggctctagctacaagggagagagggacaagggggagagacaggggagcagggtcccgaaaggtattatttttaagtggaaacaattttttaatttttaaatgtttttcattaaatcagaaagtacatttatatggttcaaaattcaaaatcca

SEQ ID NO: 239566 - DNA, 493 bp, Homo sapiens
ttctttttttgagacagagtcttgctctaattcaatttctgtatctggccgtttttaggatatgctctttgtttttggtattctgctctttcagtacagtgtgtctaaatgtgcaatttttattttttaatttttgctggtataaattgtatttcttttatttgtgccttttactagttctggaaactgctcaaccattattttttttagtgtgataaaatatgcatgactcaactattatctttaaaaatagtctctctcctccattttctctattttctgcttccagaactctaataagcttatggtgaaccttttcattaattcctcatatattttaacttctctgtcatgttttcatccccctttccctctacagtacattctaggtaagttcttcagatctgtttctcactaattgtctcctcttgcatctaatctactgtttaatgtatacatcgaggattctttccccaacaactatactttttat

SEQ ID NO: 239567 - DNA, 173 bp, Homo sapiens
aagggagagaagctgccaggcccagtcccttcccggtcttctgcaccctccctcgtccatcctgagcaccagctgggagccacaggggctgtttcccttcgtcccgcctctgctgcctgtggggagttcccttgggtgcacgacagtctgccctgcccgtgcggtcaggagaa

SEQ ID NO: 239568 - DNA, 954 bp, Homo sapiens
aacgatggtctcagctgtggtgtttaaaaattcttcagaccaggctgggtgcagtggctcaatggggtaaatgatcaagactgctctggatctgaggtcattagtttggatgctgtatccaaactatattctgcatgaatggccagaggtgtgaggggaccagtatctcaacacatctgtaacgcaccctaacacaatacactggttgagaaattctagtttaaataacttgtggagatcacgacctgaatagtcaaaatccatgcagcaggttgagaaaactatttcacaattcctcttatttcaagagatacgcaatcaccttttgcagctttcaagtatagaccagatgtactaacaggcaaccatttcgtctggaagatcatctatttggaggtcactgacacaaaaaaccaaaaacaacaaagacaaaacaagcctccttaccctagctcagaaggataagcttttcctccacttcatattgattctcttttcccatgtcaatttaaggtggtaaccatggccaacaacattctctctcacctatcatactaatgccatataagtagtagtgtttttgttttttcaagtggggaaatatatacagctcaaaaaaacaaaaaaatatctagcaactaactccttggcagttcccttgactctctgacctttaagtcccaaggttctaagtatacaatgaataagaaaactacctgttcaaacccaacagaatatgtttttttctggtttgattaaggcttcgaatttggaacataaatactctcagtaatacttagtaattcatgaagttactgcttgtgtaaacttgcagaatatttaactttaggagattataaatcctaacatgcccctaggggccttctgcttttattcctacatacaaaacatacaacatgtttgtttttaaaaacaatgcacataggccaggtg

SEQ ID NO: 239569 - DNA, 1008 bp, Homo sapiens
aacgatggtctcagctgtggtgtttaaaaattcttcagaccaggctgggtgcagtggctcaatggggtaaatgatcaagactgctctggatctgaggtcattagtttggatgctgtatccaaactatattctgcatgaatggccagaggtgtgaggggaccagtatctcaacacatctgtaacgcaccctaacacaatacactggttgagaaattctagtttaaataacttgtggagatcacgacctgaatagtcaaaatccatgcagcaggttgagaaaactatttcacaattcctcttatttcaagagatacgcaatcaccttttgcagctttcaagtatagaccagatgtactaacaggcaaccatttcgtctggaagatcatctatttggaggtcactgacacaaaaaaccaaaaacaacaaagacaaaacaagcctccttaccctagctcagaaggataagccaaaagaaaacaggttaacggtaaaaatgtatgattaaatgaagttattgttttttttcctccacttcatattgattctcttttcccatgtcaatttaaggtggtaaccatggccaacaacattctctctcacctatcatactaatgccatataagtagtagtgtttttgttttttcaagtggggaaatatatacagctcaaaaaaacaaaaaaatatctagcaactaactccttggcagttcccttgactctctgacctttaagtcccaaggttctaagtatacaatgaataagaaaactacctgttcaaacccaacagaatatgtttttttctggtttgattaaggcttcgaatttggaacataaatactctcagtaatacttagtaattcatgaagttactgcttgtgtaaacttgcagaatatttaactttaggagattataaatcctaacatgcccctaggggccttctgcttttattcctacatacaaaacatacaacatgtttgtttttaaaaacaatgcacataggccaggtg

SEQ ID NO: 239570 - DNA, 1897 bp, Homo sapiens
aaacacttgcaaccacaagcaaactcgccgctccctgggtcccttcccagtggactctgcacattgggagccttataaagtagcctctgcatctgcctgcctcgggcagaggagggctaccctggggctgagagttcacctgtctcaggaaccacctgagcccacagatcctgtgggcagcggccagggcagccatggcttgggcaagtaggctgggcctgctgctggcactgctgctgcccgtggtcggtgcctccacgccaggcaccgtggtccgactcaacaaggcagcattgagctacgtgtctgaaattgggaaagcccctctccagcgggccctgcaggtcactgtccctcatttcctggactggagtggagaggcgcttcagcccaccaggatccggattctgaatgtccatgtgccccgcctccacctgaaattcattgctggtttcggagtgcgcctgctggcagcagctaattttactttcaaggtctttcgcgccccagagcccctggagctgacgctgcctgtggaactgctggctgacacccgcgtgacccagagctccatcaggacccctgtggtcagcatctctgcctgctctttattctcgggccacgccaacgagtttgatggcagtaacagcacctcccacgcgctgctggtcctggtgcagaagcacattaaagctgtcttgagtaacaagctgtgcctgagcatctccaacctggtgcagggtgtcaatgtccacctgggcaccttaattggcctcaaccccgtgggtcctgagtcccagatccgctattccatggtcagtgtgcccactgtcaccagtgactacatttccctggaagtcaatgctgttctcttcctgctgggcaagcccatcatcctgcccacggatgccaccccttttgtgttgccaaggcatgtgggtaccgagggctccatggccaccgtgggcctctcccagcagctgtttgactctgcgctcctgctgctgcagaaggccggtgccctcaacctggacatcacagggcagctgaggtcggatgacaacctgctgaacacctctgctctgggccggctcatcccggaggtggcccgccagtttcccgagcccatgcctgtggtgctcaaggtgcggctgggtgccacacctgtggccatgctccacacaaacaacgccaccctgcggctgcagcccttcgtggaggtcctggccacagcctccaactcggctttccagtccctcttctccctggatgtggtagtgaacttgagactccagctctctgtgtccaaggtgaagcttcaggggaccacgtctgtgctgggggatgtccagctcacggtggcctcctccaacgtgggcttcattgatacagatcaggtgcgcacactgatgggcaccgtttttgagaagcccctgctggaccatctcaatgctctcttggccatgggaattgccctccctggtgtggtcaacctccactatgtcgcccctgagatctttgtctatgagggctacgtggtgatatccagtggactcttctaccagagctgaggcaagaccactgggaggcctgagagtgggccagctcgctgctcaggcgaatttctcatttcaagccactggggaaactgaggcaaaaccatacttagtcatcaccaacaagctggactgcttagctgggctgttttatcttccctgagtgcctgggtctccctccctcacttctgccctttcccttcctcctcctcttctcctccctcttccctcatctcccccctccttcctctgccccaccccagcggggagcagactgctcctccaggctgtatagacctgccctcttgcattaaacaacttctcttgagctgcaactttca

SEQ ID NO: 239571 - DNA, 402 bp, Homo sapiens
tatttttagtagagacgaggtttcaccatgttggccagactggtcttgaactcctgccctcaggtaatccacccgcctgtggccccccaaagtgctgggattacaggcgtgagtcaccactcccagccctgaatgatctttcctctttagtgtgttctcacaaccacctctcactgagctttcttgttttttgtttttgtttttgtttttgtttttgtttttgtttttggcagagtctggctttgttgcctatgctggagtgcagtggtgcaatctcagctcactgcaacctccgtctcctgggttcaagcgattctcccacctcagcctcctgagtagctgggattacaggcacccaccaccacacccagctaatttttgcatttttagtagacacagggt

SEQ ID NO: 239572 - DNA, 639 bp, Homo sapiens
ttattcattcaagagatatttagaaagtccctctgtaataaaatactttatgaggtaccgataaatgcaagtctgtatgtgtattccaaaagttcaacgttcacaaagagtagagccatcctatccacagcaggtctgttgggatcactgagttcaaatcactaaccacaacaagtgttatcctgtgtcaacaacatccttcaaatccttcgaaacacctgattggaacttaggtaaggtttaccactgtgccaatccactgctttccaaaagagtgagcacagagcagtattgggttagtgagtagaagaaaaagaagcttctgctcctgcattttacaattttctaccattgatgaataaatcttctctctacaaactctatacactgattatatttcctacctaggcacaaggctcacacatttgagcaggaagtctgtgtaagaaaagagaggctaggcatggtggctcatgcctgtaatccccacaccttgggaggccgaggtgagcagatcacttgaggtgaggagttcgagaatagcctggccaacatggtgaaaccccatctttactaaaaatacaagaattagcaaggcgtagtagtgcgtgtataatttcagctacttgagaggctaag

SEQ ID NO: 239573 - DNA, 367 bp, Homo sapiens
ctgaatttttatattagtaattatatttaaattataaattaaaaaatacggaatatgttaagctgtctttaaattaatattggaagtatacctttttagaagattattgcaaaatttgctcctcagttctgcaaacttagggaagttttagaaaataatttacaagtagtcagtaagtagttacacattcaaggattgaaaaatatgaaatactattttctgtagcttataaaccaacactaagagatgtttctcctttgtatttataatgcatttgaattacattctttggatgtatgatgtggtaaattactgtaagaaactcactgtcatctaaacctcaattataataaactattttactcta

SEQ ID NO: 239574 - DNA, 380 bp, Homo sapiens
tgtttttcttaaattcactatggctgtactctccaatctgtgaatctactgattcacaggtaaagactgcctggtaatgaagtcatcttcggtacttgattaactaaatcccattgggttatatcagacagagagagatactaaatcataattaactgtaaacagtgttaatgaggtttgggtgtattattcataaattttgagattactttttaattgaagaaagtagtaacaaaaagtaagaggcagctgttttttgacagcatgagaaaagatttgaaaagatagactgtgatggtctattttttttccttcagtttttttttaggttccctgtgcattataaaagacaattactggccattaaggcacaactaatt

SEQ ID NO: 239575 - DNA, 340 bp, Homo sapiens
tttttaataattctattttttctccactaatttgagatgttgcttttattgtatactaaattttcactaatatttgggtacagttctggaattttgattctgtgattgaattctttttgaatttccataaagataagacatattgcaataaatatgaatctttatcccaataaagttgattattgcaggggttgaaaaagtaattttttgtttattcttctaaggtcttagctaggatcccttgttaaaaaaaaagacacattactagaacaaaacaaaccagaagtttatcaacatgtattccttttgtatacataggagatactcaggaaaagcggga

SEQ ID NO: 239576 - DNA, 2133 bp, Homo sapiens
  misc_feature (802)..(802): n is a, c, g, or t
  misc_feature (1146)..(1146): n is a, c, g, or t
  misc_feature (1636)..(1636): n is a, c, g, or t
gaaaaacaatgtttttagagacagggtgttgctacgttgcccaggctggactcaaactcctgggctcaagcgatcctcctgcctcagcctcctcagtagctgggaatgataggcgcgtgccatcatgcctgtatgaagtggaaatgaaaggctggtataagctgtaaagtctttttgttcttagagatttttttctcattctaaacattatcagacctgaaaagtatttgtcgtaatgactgagacggtcctggggtaacagcgtcttcttaacggccactttaattggcgtagtttacacctagcctctccgagaactggaggacactggtaatcactattagatattgagtgctgactgtatggcagacacataagcattggtgatctcctgtgaggcaggtattgttattcccaatttatagatgaagaaacagaagtcagtgaggtggagtccgtttttgaggtcacgcggctagtaattggagcctggtttagaaccaagtcagtctcattccagaatccagaaccagtgatttgtaactgatgcacttgtctccaaagggatccagcactgggttttctcatttttaatgcatccattccttaaagcctctgttcacagtcacaaggtgtactttttaaaggaacacagcacacaaatgtgaccgctagtggacagcagtggcagcccagttggatggcagagcctggcatgccgactgggacagaagccccagcacacggtgtgatgatggcgtctccaggctgacctccatggcctcaggaatcaaagtcctcngtctctttcacgcggggttcagaaagaaaactcggctatcttacatctcctctcccctgtttatttgactaaagtgaagttcatgtggcttgagcctcgtttcctggggaaatcagcctggcttaggattccattgtcttctgggactgggaagatgtggaaggctgacctcacgcccagctgaaggtcaccttcccagactctgagctcggctgccttctgcatcgccacggctggagggcctggcccaggccgtggctgcatgctggctttccactgtctcggtgtccctgctgcctgtcagtaatgtgcccagcaccttctggtgtcatgtcccctcttgnttgtgattcttttcctgagctagtccattttctacctcgagtctgctctcctgccattcccaggggccacagctcagtaatgtgggtgtcagggaaccccaggccaggcccccttgtgccactgtggctctccccaaagcagggcaccaggctggctgggggggtcctgcccagagctgccccacgctgccgtgtttgtgctgctgctgtgcagtggtgatcttgccaaaatgtggcttttcctttctcactcccccagagctcccagaaaagtctctaggacttttcttccccctaaataaaagtcaggatgtgaagccttttgacagaattggagtttactgtcatctgtttccgtttctctaagatagggatcctggcgaagcccatgaaagccatggggcgctcccaccgaagcctccgaggcacagacctcccgggagtgcctgtgggcgctgcttccttaaactgcaggaggctgcagcctctngttgttcatgcgtcgttttttcatagtgtgtgtgggtttagagctacatgggttcttttctcacttatctgttcataccgcatgacaccgtccacttcaggcacagttgacggccgtctggaggtcatcagctgagggcacagtttgcctggttcttctataataggttaagtatttttttctccatttttttcccttttaaaagtactgctagaaggccaggtgcggtgtctcacacctgtaatcccagcactttaggaggccaaggcgggcggatcagttgaggtcaggagttcaataccagcctggccaacctaaggaaacctcatctttactaaaaatacaaaaattaaccaggtatggtggtatgcacctgtagtcccagctactcagaaggctgaggtgggaggatcacttgagccttggaaagagaggttgcagtgagccaagatcacaccactgcactccaccctgggcagtgagtgagaccctgtctc

SEQ ID NO: 239577 - DNA, 387 bp, Homo sapiens
gaacctagtgcctctttttaggaagtttttattggatcccagctatgaagaatggaagcaatcttccaagatgtacaaacatacaaaagtgacataactaaatgaaagtagagaaaatcccaaagacatcactgttctccacgttaaaaactaactgggcagctatcaagcatattgttattctctattgccagaggaatcctatgcagaagcttttggatccaaattaaatacattctctaatccctggggatagctcaagattctccttcccaccagctctattgtcaagaagaagaagctctgatacatgtcaagaacattccattgtaaagagtagagctttgggtaaaagaagtgaataaattatttcccccttgcattata

SEQ ID NO: 239578 - DNA, 482 bp, Homo sapiens
agggaagaagaaaaaggtaactttaataaccctctgccaactgccagagggaaatgctgaccatctggctcaatatctggccctggagatgctgctagttgacccttgacacccaagtagaagcaggtagttcctcagccacctccatccctgccctcccgagatccaggtgcagattaggctgagcttctggcactgctggaatatagagtgtggttcaaccccagcccagagggttcttacaagactggtcctttctagagaggagcgctgccctagattgtaaccattcctcccgtgtgcatggggacagcacagtgtaaggaaaagaccatgcttttggagtcaggcagaataaggtaaggccagactctcccatatatcctcagcaggaacatgttagcaagctaagatatctgtacttagcttcctaatctgtgaaattgtaacatataccttatgaggtcatgatgaggacttaa

SEQ ID NO: 239579 - DNA, 1794 bp, Homo sapiens
  misc_feature (106)..(106): n is a, c, g, or t
  misc_feature (870)..(870): n is a, c, g, or t
  misc_feature (1748)..(1748): n is a, c, g, or t
  misc_feature (1750)..(1750): n is a, c, g, or t
accttgcacaaaaacatgtgggcagaatggccttggtgggtaatcaagactggatgttaagccagcgggttgctgttttatctctcccggcctatctcctaccccncccccaacaacctgcatcaccctgttggcaggagctcagagccactgtcaccctcttggaaactatttatgtagcaagaggcatagacatgctcatgtcctgtgacccagtaattttactcttggaagtttatttacaggctgagcttggtggctcacgcctgtaatcccaacactttgggaggccaaggtggcaggatcgcttgaggcaaggagttcaagaccagactgaccaacataacaagaccttgtctccatttacttctttttttttaatgaagtttatttttaaacagcatgggagaagcttcagaatcatggtgcatccacagagtcaaatagcctatagccgaaagcgtgattctgaaggctctatagaaaaatgggcaggccttaccatgagggggaaaggagtggttttgtgactcaggcatctggataggctggatgcctaaagaactagaacttggggtaaaatggaagcacttgtgttggttggggcagggggaatgggttggtttgttttcccctatgctccattgtcttttcaattaaactgtaaaaaaatgaaaataaaagtaggctgctctagcctgaagagcacttgagcactatagagagcaatcggctgtggagtggattgcgggcctctatgtactgcaatcagtggagaggattagttcccctctcatacgtttccggaaggttcagaacactagtgtgcaacataacactccagtcaaggccaccagtcatgttcttcangttcccagaggtccatcccaccaaaaatgactggacaacacctggttttctccacacagtcagtgaagccacaccccatggctctgctaaacaccctggagtggtccatgcctctgccttcctctcaccttagtcacctactccacctgtgaggcccgggggctactgccaggatgcatgttctccagccctcctctgccctccatctcgagtccaaccctggccatttccctcttggtcctgtcccttccataccgataagcagatgacaccactgtcacttcacatccttcagtggttttccatcacccttagaatagacgcccacattccttattgtcatgatctacacatgctacaggccttgggcccttctttcctttctcagcttaacttgaacccttgccctcattcttgtgggagaaccttctccctcatccagttcttgtgacagtcggacttcttcaggcctctcctggccacccattatacagagcccatgccctcctgctgtcacactgctttcagccttccatgtcatggcacacataggaaacagtggcatccacagggtgcaatgggtaatttggaggcgagactaggggaaagtgcatgtgctgtttctaccatagaaattataaggatggtggctcacgcctgtaacctgtaatcccagcactttgggaggctgaggcgggcggatcacctgagttcgggagtttgagaccagcctgaccaacatggggaaaccccatctctactaaaaatacaaaatgagctgggcgtggtggctaatgcttgtaatcccagctaccaggaggctgaggcaggagaattgcttgaacctgggaggcggaggttgtggtgagccgagatcncnccattgcactccagcctgggcaacaagagcaaaactcagtcttg

SEQ ID NO: 239580 - DNA, 603 bp, Homo sapiens
gtgttaatgtcacatgcatcagaggagatgaggcttgaacccaggtttccagcagggttcagcccaggagcacgtggacccatcacagtgaaacctttgagaggcttagctccagaaggagatattgcccctacagcccaccccaggtctcacaggggcagagctgcttggcttaggcactccgtaacctgagagtgtctctcttctcatgctgatgatacagcaagcaggagtagttgggcttctcccccaagacccagatcagaggggctgtgcagacaagactccttcttccctgggggctgtctctgccccctgaatctggatgctctctgagaagctgtagtaactatgtgtgtccccatgcatgtgagtagtccttagagggctgaaaggctctgaactctcctgacctcccagtttacagtatttttattattaagatacagattgatcatccggcaacctagattttacatagcagtgtgggggcagagggaaagcttttgttccaccttctgaaggttcactgtcgaaatgaactgacaataaacaggtgaacaggaaaactcggggcaaatggttgaagcttatataccctat

SEQ ID NO: 239581 - DNA, 453 bp, Homo sapiens
gctctgtgggcgacaggtgcgtctggcctccctcatcctcctcttcctcccactctgtggcatccttagcgcgtgtcgtttcctgctcccagaaggtcaagcagcacagtagtggcgcccggagttgatgtcggtgaggacagcaacaaagaaggtcggtggattcctctcgggacacatctgccacccgctggactggcaaaacagctgggggaatgggttggcctcccagtccttctccgggaagaactgcagaatctggccctggcctttcccactcccgcgcgggtgcggcctgaatgccaccagcaggaagtagtctgtgatccgcgccatggggagggacgctgggcgggctccgcggctcggggactcgagggctgcgcgctcatggcccgggcctggccctggaccgcacacccgggacaccccgggttcgctccgcggcggccg

SEQ ID NO: 239582 - DNA, 388 bp, Homo sapiens
cacatataacatttaaacatttaatacctttttttggtattactgtatttattgttagggtttttcatgccttatttcttgctgttttaaatagtacagtgtacactgatgcagtttgaataactcagcaggtaggatttaaggttgtatacctctattttgttgttgacgatcagctgtacatctctggaaggtgatccttcttatacagataccaaaaagcacttagtgatttattttttgtccaggacaggtttctgaacatttctgcttgtaatctagttttcttttaagtttatatcaggataccaaagcaacatatttagcccccacgtctgttgagtctttaaaggacctactaagattattagtatagattctcaaatat

SEQ ID NO: 239583 - DNA, 705 bp, Homo sapiens
taccttttgttttgtgctgacatattggattaagttgtgaaatgaagtttttatcccagcttttccaatatatttctcataaatattggaaaacaatgcagaaagaattatttataatgttgtttgaataacaatgaaatggaaaatcaaagaaatctgttgtagggtttcacagagcctttattactgataatgttcatgggtaagaagtgtgtgctagttttactgtgtgtgggatatgcctctctccattttggtgttctggggtccttttggtaggtgaagtggggtgtgttgttgcaataagaaaacttagtaaagcaaatttatttcttaccctcaaattgtgtaataagattactttcatttttaatgatcactttactataacaaagatatttgcaaactcatcattgctgggctgggcgtggtggctcacacctgtaatcccagcctttgggaggccaaggctagtggatcacttgaggccaggagttccagaccagcctggccaatatggcgagaccgcatctctactaaacatacaaaaattagccaggcatggtggtgcatgcctctaatcccagctactcaggaggctgaggcacaagaatctcttgaacccagacgtggaggttgcagtgaaccaagatcacgccgctgcactccagcctgagtgacggagtgagaccctgtctcaaaaaa

SEQ ID NO: 239584 - DNA, 342 bp, Homo sapiens
aggagtgatcaggcaggtcaggaaaatgaggaagagctgccacagactgaagagttgtcagtgacacaggaggaaaaccaaggcagcacagggtcctgcgagccatgtgaatcgagtttttcaagaagagcttcatcaactgtattctaacaggtgttctggaaaatacttcagattgaggcctttatcctggtattgaaggatctaattttcagaaactgcttttttttttttttaaagatactttaaacagtggtagtgttaccggaaaggggtcctgatccagaccgcaagaaaaagttcttggatctcgtgtaagaaagaattcggagtgagtccata

SEQ ID NO: 239585 - DNA, 255 bp, Homo sapiens
tgaggagcattgggttttagtcttagtaattagccttatgacctcaccaatgccctggaagtaaatggtctagtgttccttcatacaatttacaaggcttgaggtcaagcaaacctttataataagtattagaactgtcaatgttataagatggcaacagctattatttgtttatgctttatttgtagaagccttaatgattctttggttttacaaaaagaaaataatcaaaaggtcactttcagacaaaaaaaa

SEQ ID NO: 239586 - DNA, 730 bp, Homo sapiens
gaaaaagatacagaactaactctaaaagaattcaagaaaaatttaaggatgggaaaagataattatacttttttagttgcacagggtgcgaatggggtggaagaaattgagcaaaaatgtaattagtttgttacttctaaccaaaccacttctgaagcataactttataggctcttactctgatttttcattctatcaaacatatgaattagtgggaaattatagtggtactttaaatttcttggctgccgctatgcatgtttttttcttagcctaagaaaactatctaggaatagtgaaaaaacatagaaatccttactaattaataacactactaaactgacaataaaataacatcaaaaactaatatcactacagtcaaggatgttttaaaattgaatagaggctccaaaaggatttaaataaagaagtgccaaacaatgtggtcagcaccttaactcattagttaaccactaataaaaattttcttatactagtatctttttcccaacaaaagagacaaaatgaggtttcaagggtatcataatttggcaaaaagttaacattctccatcttctgcaataaacactgattcatacatacaatctattcccaaagcttttagagatacgtacacagaaggcataaatgggaaagaatttatgggtgaaaattaatgccttgtaagaaattcattaattttttaaatataaagttcaaggtaatcacc

SEQ ID NO: 239587 - DNA, 676 bp, Homo sapiens
gaaaaagatacagaactaactctaaaagaattcaagaaaaatttaaggatgggaaaagataattatacttttttagttgcacagggtgcgaatggggtggaagaaattgagcaaaaatgtaattagtttgttacttctaaccaaaccacttctgaagcataactttataggctcttactctgatttttcattctatcaaacatatgaattagtgggaaattatagtggtactttaaatttcttggctgccgctatgcatgtttttttcttagcctaagaaaactatctaggaatagtgaaaaaacatagaaatccttactaattaataacactactaaactgacaataaaataacatcaaaaactaatatcactacagtcaaggatgttttaaaattgaatagaggctccaaaaggatttaaataaagaagtgccaaacaatgtggtcagcaccttaactcattagttaaccactaataaaaattttcttatactagtatctttttcccaacaaaagagacaaaatgaggtttcaagggtatcataatttggcaattcccaaagcttttagagatacgtacacagaaggcataaatgggaaagaatttatgggtgaaaattaatgccttgtaagaaattcattaattttttaaatataaagttcaaggtaatcacc

SEQ ID NO: 239588 - DNA, 541 bp, Homo sapiens
ctctaatatttgatttaaggtggctagcccttttggaataaacctatgaaatgtttcttaccttaaaagaatgttgcaagatttgagacattgatatttagacaaatgtaacacttctgagaaattgtaagatgacataatggaaatagtaataaagtaagtggcaaatgtggttttaaaacaagccagcagtgtctggatttgtctactgatttataggaaatacatgataaattacatcacagatgggcagtgaggagtatctagactatgggaaattctacaggacccaaaacctggtttcctcaacaaacaaattgcaaggaaggggtgggggaacctatataaaatacataaaagacttaccaatcaattacatgtggacttcatttgtatccctagtgaaacaaacacattataaaataaaattatgccattcttgaagcagttgagaatttgaagtctcttactgaatatttaatattaatgaattattgttgatttaatggtattgagtttatatgttaaaaaatccacctta

SEQ ID NO: 239589 - DNA, 616 bp, Homo sapiens
ggaggaaacaagacactctggctttctgaattgccagagttcttgcactgtttcttttgagtagttagaaaccttctttcctggatgttgttagagagctgaggctttgtgcagggttttaatttctagctaaattcttgtccatggttacacaggggtctatattagcaaaatatttttggtgttgaagttttgggctgtgatccagtaggtggtgcttaagtgtattggccagtaggtaggctcttgctctgccatatgcagggcatgctccctctcagtgctctgaaagtgtgggctcctttcccacttgagtactggctccagatcttggcttggcacactgcagctctgggatgagctcagattttatgttccctcgccagcttgaaggctgcagcagaagaaaccttagcagtggttatggcagagggcctttcacttgactcttggtggtccaccccagagaaacgaggagctgctatcagccagtgcaattggccaaagatggggcagctgtgctgtgggcccaagccagagggtcccggtttggtgaagagcagggctacgggtgggtcacaagagagatagactgagttcttctccttagggcaac

SEQ ID NO: 239590 - DNA, 262 bp, Homo sapiens
ataagaaggcaagtttatttatttatttacatgattatttgttgtaaaagtttactgtttattgagatggcacttgggtagcaatgtcttgtccactaaagaacttatagtatcaccttttgtaaagattgatttagactgggcagggtggctcatgcctgtaatcccagcactctgggaggctgaggcaggattgtttgaggccaggagtttgagaccagcttggacaacataggaagatcccatctctacaaaaaataaa

SEQ ID NO: 239591 - DNA, 316 bp, Homo sapiens
tgtattgttcaatgctatattcctgtagaatggtgcttggcacttagaagtaccccataaatcattattggacaagggttagcgggagcgacaactctaaaagggaatctgaagcagtgatggaaaggaggagccaatcaggggaggggctgggggcctagtagaaggaggaaccaatcaacggagaggttgggaggggacttggcagaaggaggaggagccaaccaggggagcggtttagggggtctagcattccaacagaaggaagaggctttgtagaggtcttgagagacaggaccttggtgtagtttaagaa

SEQ ID NO: 239592 - DNA, 273 bp, Homo sapiens
gagagagaatgatgaaagaggatttaattgggaaattggctcacacaattgtggagaccaagaagtcccatgatagctgcaagctagagatgctggctcagtcaaagtcagaaggcctcagaactaggaaagccaatggtataactcccagtccaagatcacaggcctgagaactcagggcaatgctggtacaagtcctggggtccaagggctgcggagcctggagttgttgtccaaggaaaagagaaagggtatatcacagcttcagcagat

SEQ ID NO: 239593 - DNA, 500 bp, Homo sapiens
ggcccggcctggctgaggccgcagatgggccggatcgtcagccgctgacgtcggggccccgcccgccgggcctggcatttgggccgcccggtcaatgccttcgacgcgggctgggcgatgggccgggggcaacgagcgcggaggctgcgcgcaaggccctctcaccccgcggcctcgcgcggccagagtccctcgcgcgggctcacgcggcggcggcctgggccttccgggcgtccgcggggccgagggcgcttacccgggcaggcgccgcttcggccatggctgcccgcgtccctcgctgggttgcagtccctggacccggcctgtcgggcccggggcggcgcggcagcgacggcggaagcggagcgggacccgcctaacctgagagctactgccgggcggcagcgaactgcgtcccgagccacgtgccccgctggccctttaaaaaagagctgcgctcggcggccgagcttgaggacgcgcacagcgccccctgcagc

SEQ ID NO: 239594 - DNA, 460 bp, Homo sapiens
cagtttgttctcgaatgctttccttccagcaattgccaaaagcagagagtgcatgtgtccagcacttggacaggtgatttgcggtgtggctgaaagagccctgggttgcagtggtagaatcgggagatctagatttgaactccatcttacatggatctcactcttggtgagagcgtgggcagatgagctcccttgggtgcagtgtgggaatgaaatcaacaccgtctgcctcacttggctccggtccgctgcctcacctgcccagcaagcactgcccactgatccccagcccaccttgcaatttgctcccaagtgcagcccttgcctcaatccgtgtgggtgagcgtagggggagggtacagcccgtttgatgaggagcccaaggtgaggtctgggagtcttgggtcctggcagacaaggagatgggatgaggcatttctctgataccttgccttccttt

SEQ ID NO: 239595 - DNA, 951 bp, Homo sapiens
tttgtttgttctgttaagtacctaagtaatgtgtttttaggaaaagaaacctagcaagaacattgtagacaaggctaggcaaagatgatctatccttcaggtgatgtgtctgtcctcaagatcacttacaaagaagaggattggactggaagttactacttcacaattttagttttgttttcacatctgttacttcaatcctgatgacaattctgaaatggatacaactactactatgtatccttctttcactagtgaggaaattgagatttggaattgagaagtgaagagctttgctggagtcacacaggtgggaagttgagagccaggacttcaacccagcaaatctcctaactccaggtagaaggttcttcatgctctaccactttaataagaatgctctagactttgttaatacattagattagtaagatagcaaactcctactcaacctggatattgggtctatgtcttgttgttatagagtctttaacttttacagagacatgctaaaatatttatagttgaaatggttaggatttctttcaaagtcatccagtggtggaggaaaagatgaaatgtgtggagatagagataacgataacaacttttgaattgataattgttgaagataatatgagatgggttcatgtggtctgttctactattgtatctatataaaattttccataatttaacaaaaaactcccaatcttacaatatttatcagacctacagtgtattattttctaagttgtttctaaacttgtttccatttctgatgacttaatcaatgtctcaaacatttctaggcattctccatctcatgcattccttctgttcctctgcattagtttctcccttcctgttctactgaattacaaccttgcaagaaattaaaacctacctcccttccaaagaaaaataaatttaaattaaaagaaaacctaa

SEQ ID NO: 239596 - DNA, 464 bp, Homo sapiens
atttcagtcaaagccttggtaaaataaccagtttctccaactgggccctgttacaaaagaaaacagattcttactgtacttatgcaaataattatattgccataaattacaaatacaaataatttccaaattctggagaaatcagatagagagaaagaaatatgcttcaaattttgtttacaggagtacactttacccaattggtgcaaaagtagttgcaatttcagaccatgaattttaaatcgttataactaggctcaaacactttttttttttttgagacagcctgggcaacagaacgagactcggtctctcaaaaaaaaaaaaaagtttagctcccttaagccatttctgataatttattctaaagataaaatcaaatgtggaattcatttataaaggtatttattgcttcatttataatggtgaaaaaaataaaaaatctctatctccaataaaaaaaa

SEQ ID NO: 239597 - DNA, 1296 bp, Homo sapiens
gagtttcaccctgttgctcagactggagtgcagtggtgcaatctcagctcactgcaacctctgactcctgggttcaagcgattctcctgcctcagcctcccaagcagctgggactacagatgtgcacaaccacacccggcctgaatttttctctatttacccaatctgcattgatggaggatgataataaataccaccataaggacaaagaaccttatcttctccatcccattttcatcacaaagagtaaaaacagcagtcataaaattgtttggcagagaataaaataggttatacaggatgtttaattacaatgttaaaagttggggattgggaaaccaagggattcttgttctgacaataaagctgctcaatatttacaaatgtgagcagttttaataccgaaacacttaacgaaggataactggctgtacagctatactgaaaaatcaatacaaagaaatattctatttttaccagtcagttttaagcctaaaacttttccactctgaaaatttagtagaacatttcaacagtgatgaccagatgtaagagttatttaaaggtcaaaaagccttttgacttttaaagaacaagaagatgaatcatcaagtcacaggactaagaaagacctaaacacaactccattaaaaaaatatgaccacaaatgtgatgacagggcacgcagtgccttaaatttctgacttaagtcagcagttacattccatcagattccctagctcctcacagttggtcttgtttcctgcttctaccaaagggtcatcctcctattttgctttttccctttagtaataattctttcttccatcaaccactcgagtatcagataactctggaagatttagtttaggtttgcattcttccttgcccagactactgcaatagcattgtaatgagtttccactgataccagaaagatctttctaaatggaaatctcatgttcatttatcatttgaaatccttcgacagttcccaggctttagtattaaataaaattcatcagagtggtatataaagcctcttcgtatgtttatatttagccccctctctcaccattctttctcaactaattacttgaagttacacagctagtaaggagatatgcttttcaaaactttcaatgacacactccattcaaaaaggtgacgattcaacttgaagggaaaatgttattataagatgttaactcatctttaaaatttaatggaaatccttgcaagtgggcggtaaatatgaataagatacggtgaacaggaaatactacaaagctgagg

SEQ ID NO: 239598 - DNA, 1242 bp, Homo sapiens
gagtttcaccctgttgctcagactggagtgcagtggtgcaatctcagctcactgcaacctctgactcctgggttcaagcgattctcctgcctcagcctcccaagcagctgggactacagatgtgcacaaccacacccggcctgaatttttctctatttacccaatctgcattgatggaggatgataataaataccaccataaggacaaagaaccttatcttctccatcccattttcatcacaaagagtaaaaacagcagtcataaaattgtttggcagagaataaaataggttatacaggatgtttaattacaatgttaaaagttggggattgggaaaccaagggattcttgttctgacaataaagctgctcaatatttacaaatgtgagcagttttaataccgaaacacttaacgaaggataactggctgtacagctatactgaaaaatcaatacaaagaaatattctatttttaccagtcagttttaagcctaaaacttttccactctgaaaatttagtagaacatttcaacagtgatgaccagatgtaagagttatttaaaggtcaaaaagccttttgacttttaaagaacaagaagatgaatcatcaagtcacaggactaagaaagacctaaacacaactccattaaaaaaatatgaccacaaatgtgatgacagggcacgcagtgccttaaatttctgacttaagtcagcagttacattccatcagattccctagctcctcatccctttagtaataattctttcttccatcaaccactcgagtatcagataactctggaagatttagtttaggtttgcattcttccttgcccagactactgcaatagcattgtaatgagtttccactgataccagaaagatctttctaaatggaaatctcatgttcatttatcatttgaaatccttcgacagttcccaggctttagtattaaataaaattcatcagagtggtatataaagcctcttcgtatgtttatatttagccccctctctcaccattctttctcaactaattacttgaagttacacagctagtaaggagatatgcttttcaaaactttcaatgacacactccattcaaaaaggtgacgattcaacttgaagggaaaatgttattataagatgttaactcatctttaaaatttaatggaaatccttgcaagtgggcggtaaatatgaataagatacggtgaacaggaaatactacaaagctgagg

SEQ ID NO: 239599 - DNA, 442 bp, Homo sapiens
tctctttgggaaagttcaaaatctgtctattatcagtcttcagtcacctctcctttttctattcaacaaataaatatttaaagaatgcctaaccatgtggctctgtgttaggcatttggcaaatagagaggagtaagcagacagggttgctattcttagagaattccaatgaccattgccaacaatagcatttcaatcaagcaagcataacatgagaatctcccatgaaattctcccataacatgggagaatcaagcaaacacaacatgggagaatctcctgttgtgtttcaccaggtctatctctgggggaaatagatctgagttagtgactttggctgcatcttgctggaattcttcctacgactctctcacctctgcaactccactcagatataccaaggaattcctctctgctctggcagttctaagaaaaataatga

SEQ ID NO: 239600 - DNA, 529 bp, Homo sapiens
aagttttaacatatttgtaggtgatatggatggtgacattgcaatgatctttcctcttgcttacttcaatgaacttgaaaatatggttgcattttaaaaggcctgtgctacctttatgagctgtagcactcactgcagaggtctgcggcttcactcctgaagtcaagtcggggagaccatgaaaccaccggaaggaagaaaccccggacacatctgaacatgtgaaggaacaaactcctgacacaacatctttacgaactgtaacgctcaccgtgagggtctgcggcttcattcttgaagtcagcgagaccgagaacccactggaaggaaccaattccagacacattatcactaattaaacctatgtctgtaccttctagcattatatataaaaagtgcaacatagaaaacaaaatttaaatccacaactatttaatattcacaacttctggatttatctcatgttgcaaactatttttgttaccctattctttgagaaatataaaacatcagtatttcattggtgaaa

SEQ ID NO: 239601 - DNA, 2302 bp, Homo sapiens
  misc_feature (903)..(903): n is a, c, g, or t
  misc_feature (1156)..(1156): n is a, c, g, or t
  misc_feature (1343)..(1343): n is a, c, g, or t
agcagagatgcatggtatagagctatcctgtgcattacgatagctgctagccacatgtggctgttaacactgcagtgtgctaggtctgaattgagaggtgccgtcactgtaaaatacataacaggtcttgaagatttatatattaaaacctgttcatcatctcaataatttttagattgattatatgtagaaataatatttttgtagtttgaatttaataagatattattaaaactggggccaggagtaggggctcatgcctgtaatcccagccctttgggaggtcaaggtggaagaatcacttgaacccaggagttcaagatcagcctaggcaacataatgatacctcatctctacaaaaaaataaaaattgaaaaattaattacacttggttgttttcatatttttgtgggattacaagataaaatttgaaaaatagatgtagcttgtgtttgtggcttgcattattttgctatttgaaagtccaagtatagagtgaggcacagcatagactggaggcacattgcttcacttcaaatcctgatccttccccctactcgttttgtggtctttggcaatttactaaatctgtctttcattctttgtcttatcatcttgtaaaatcaagatagtgatagtacctaactcaaaatattgttatgaggatagtttatatgtctaaatcatttagaacagtatctggcatagagtgcatactcttcaaatgtttgttgaataagtaaataaacccactggtcatgtgcaccttcaccccagtaggtagaattatcaaagaagtaatgcagtttttaagtagcagtttcgtgaataacctgtatttttctaggagcaatagtagcaattgtagactgacatggtgaacatttttgatggtttattagnttaatttccttctcctcactttcttcctctctccagaacaggtggaaggaaaggagcaaaactcaaatatattaatttcattactctctagtaggctttttgggagaatgattctgaaatggatggcaagtcaggaatttttttcttcgcattatggcagtttcctgttactttatgtaggtaccttgaaataaatctaacatatgaaaactcaagcttctatgttacagagtggattctttggatccattgnagagcattgtcagcagccatccagacacctccatgtattcatgtattcattaactagagaagagacactttgaagtcaatcaaaatttaaaatatttatgaagcctatatataaagggaagatatattggttgtggcagagacactcttaaagtggcctccaattcttgtctcctggtgttcacacncttgcgtgggacattcctcttgcaagtaggcaggacctgtaacttgcataaccagtacaatatggcaaaggggatggaatattcatgatgacacatatgcagtaacatgaaaataagatgtcagcacccatccttctggagtttctcctttgcttgatggctttcagaaagtatgcagccctgttgggggacctgcatagcaagagacttctggcagcttctagtgactgaatgtggcctctgccaacagccaacaaaacactgccaagaattaagttctcccaacaactggattaagcttataagtgaatccttccccagtcaaacctctgatgagaccacaccctgccaacaccttcatttcagccttgtaagaccctatcagaggactaggtatagtagtgccaaactcctggcccacaatacatatgtgttcttttaagctgctagtttgtggtattattgttattcatcaataaataactaatacactggcatttttactttcccaaatttaacctccaagcatattttatggcaaaagcaagacatatgcattgaaattattgggtgatttttccttttcttctttttactagcatcagagggatttaagtatatgatacttagcagtagaatcagtcactatatttataatatttcacagcatttaaaacagtatatacaccaaagactttaggttggcagacaatgattcagttattcatatgttgatctgatataactatgttgttaggaatgtatgagacacatatatttgggtttctgaagacagatatgaactgaagacaattttttcaagttattagcatcttccaggtggtagttggaatactgaaatggattaaatcacctgatcatctgtagacattaaagaaggctaaggacagagtccctgaagtaacaacttttaaggatcatgcagaaaaagaatcagc

SEQ ID NO: 239602 - DNA, 853 bp, Homo sapiens
  misc_feature (725)..(725): n is a, c, g, or t
  misc_feature (758)..(758): n is a, c, g, or t
ggaggctcgcaagtgcgcgtggccgtggcggctggtgtggggttgagtcagttgtgggacccggagctgctgacccagcgggtggcccaccgaaccggtgacacagcggcaggcgttagggctcgggagccgcgagcctggcctcgtcctagagctcggccgagccgtcgccgccgtcgtcccccgcccccagtcagcaaaccgccgccgcgggcgcgcccccgctctgcgctgtctctccgatggcgtccgcctcaggggccatggcgaagcacgagcagatcctggtcctcgatccgcccacagacctcaaattcaaaggccccttcacagatgtagtcactacaaatcttaaattgcgaaatccatcggatagaaaagtgtgtttcaaagtgaagactacagcacctcgccggtactgtgtgaggcccaacagtggaattattgacccagggtcaactgtgactgtttcagtaatgctacagccctttgactatgatccgaatgaaaagagtaaacacaagtttatggtacagacaatttttgctccaccaaacacttcagatatggaagctgtgtggaaagaggcaaacctgatgaattaatggattccaaattgagatgcgtatttgaaatgcccaatgaaaatgataaattgaatgatatggaacctagcaaagctgttccactgaatgcatctaagcaagatggacctatgccaaaancacacagtgtttcacttaatgataccgaaacanggaaactaatggaagagtgtagaagacttccgggagaaatgatgaagtatccgaagaaaattggacctgagagatgaagggtaggggtcaaaaag

SEQ ID NO: 239603 - DNA, 786 bp, Homo sapiens
ggcgcgggctgagagtccggggatcccgggggccagtcgcggccgggacatcgggcgctgcggccggggacccgctgctgagatagacagaatatggcagagctttctgagccagagggaccagtagattggaaggaacgatgtgtagctctggagtcccaactcatgaaatttagagttcaagcaagcaagatacgagagcttttagcagagaagatgcaacagcttgagagacaagttattgatgctgaacgtcaagcagaaaaagcttttcaacagacggaatcttgctctgtggcccaggctggagtgcagtggcgcgatcttggcttactgcaacctccgcctcccgggttcaagtgattctcctgcctcaatctcctgaataactgggattacaggtacaagttatggaagataaattaaaagcagctaatattcaaaccagtgaatcagagacaagattatataataagtgtcaagatctggagtcgctaatacaggaaaaagatgacgtcattcaaaacttggaattgcaacttgaagagcagaaacaaataagaatacaagaagctaaaataatagaagagaaagcagctaagataaaagaatgggtaacagttaagttaaatgagctggaattggagaatcagaatcttcgtttgatcaaccaaaaccaaactgaagagataagaacaatgcagtcaaaactacaagaagttcaaggaaagaagtcatccactgtctctacactaaagctttcggaaggccagcgcctgagcagtt

SEQ ID NO: 239604 - DNA, 1135 bp, Homo sapiens
ggcgcgggctgagagtccggggatcccgggggccagtcgcggccgggacatcgggcgctgcggccggggacccgctgctgagatagacagaatatggcagagctttctgagccagagggaccagtagattggaaggaacgatgtgtagctctggagtcccaactcatgaaatttagagttcaagcaagcaagatacgagagcttttagcagagaagatgcaacagcttgagagacaagttattgatgctgaacgtcaagcagaaaaagcttttcaacagacggaatcttgctctgtggcccaggctggagtgcagtggcgcgatcttggcttactgcaacctccgcctcccgggttcaagtgattctcctgcctcaatctcctgaataactgggattacaggtgcgcaccaccatacccggctaatttttatattgttagtagagatggggtttgttggccaggatggcctcaaactcctgacctcaggtgatccatccaccttggcctcctaaagtgctgggattacaggtatgaggtattgtgcctggccccctatattttcatactttgagttttttaatataacttttatttattaaaatttttaaattttgtaatgacagggtctcactatgttgtccaggatgatcttgaactactggcttcaagtgatgctcagtgtcccaaagtgttgggattacaggtgtgagctcactgtgctcagacaacttttattatttttaaaagatgttttcataagtcacataaccctttctgggtcttgccagcattaaaatgagcaatccatagcttctcatttcatgaaaagatctcagtcatattcagtttaatcaatgagttccagtgagttctggtgttctgcagcactatggagtaatatggttaactataatttattgcatatttacaaaaagcttaaagagccagctttctatattttcataaagctagaagagaggattttgaatgttcacaacacaaataaatagtaaatgtttgaggtgctggacatgctaattaccttgatttgatcattacacattgtatacacacatggaaatatccctctgtatctcataaatatgtacaattattatgtatcaactaaaaac

SEQ ID NO: 239605 - DNA, 1189 bp, Homo sapiens
ggcgcgggctgagagtccggggatcccgggggccagtcgcggccgggacatcgggcgctgcggccggggacccgctgctgagatagacagaatatggcagagctttctgagccagagggaccagtagattggaaggaacgatgtgtagctctggagtcccaactcatgaaatttagagttcaagcaagcaagatacgagagcttttagcagagaagatgcaacagcttgagagacaagttattgatgctgaacgtcaagcagaaaaagcttttcaacagacggaatcttgctctgtggcccaggctggagtgcagtggcgcgatcttggcttactgcaacctccgcctcccgggttcaagtgattctcctgcctcaatctcctgaataactgggattacaggtgcgcaccaccatacccggctaatttttatattgttagtagagatggggtttgttggccaggatggcctcaaactcctgacctcaggtgatccatccaccttggcctcctaaagtgctgggattacaggtatgaggtattgtgcctggccccctatattttcatactttgagttttttaatataacttttatttattaaaatttttaaattttgtaatgacagggtctcactatgttgtccaggatgatcttgaactactggcttcaagtgatgctcagtgtcccaaagtgttgggattacaggtgtgagctcactgtgctcagacaacttttattatttttaaaagatgttttcataagtcacataaccctttctgggtcttgccagcattaaaatgagcagtaaaatgatgggtttggatgggcccacccagccttaaagtttaatgattctaaatccatagcttctcatttcatgaaaagatctcagtcatattcagtttaatcaatgagttccagtgagttctggtgttctgcagcactatggagtaatatggttaactataatttattgcatatttacaaaaagcttaaagagccagctttctatattttcataaagctagaagagaggattttgaatgttcacaacacaaataaatagtaaatgtttgaggtgctggacatgctaattaccttgatttgatcattacacattgtatacacacatggaaatatccctctgtatctcataaatatgtacaattattatgtatcaactaaaaac

SEQ ID NO: 239606 - DNA, 664 bp, Homo sapiens
ggcgcgggctgagagtccggggatcccgggggccagtcgcggccgggacatcgggcgctgcggccggggacccgctgctgagatagacagaatatggcagagctttctgagccagagggaccagtagattggaaggaacgatgtgtagctctggagtcccaactcatgaaatttagagttcaagcaagcaagatacgagagcttttagcagagaagatgcaacagcttgagagacaagttattgatgctgaacgtcaagcagaaaaagcttttcaacaggtacaagttatggaagataaattaaaagcagctaatattcaaaccagtgaatcagagacaagattatataataagtgtcaagatctggagtcgctaatacaggaaaaagatgacgtcattcaaaacttggaattgcaacttgaagagcagaaacaaataagaatacaagaagctaaaataatagaagagaaagcagctaagataaaagaatgggtaacagttaagttaaatgagctggaattggagaatcagaatcttcgtttgatcaaccaaaaccaaactgaagagataagaacaatgcagtcaaaactacaagaagttcaaggaaagaagtcatccactgtctctacactaaagctttcggaaggccagcgcctgagcagtt

SEQ ID NO: 239607 - DNA, 377 bp, Homo sapiens
catctgaatggtgactttcttatttggaagcttttcctgacttgatcacctttgctcctcacagcaggtgttactctaagtaggcagatgaggaaatggaagctcagagagctcagagtgcccttcccaggactgaggtgggagcccagctttccagtgcctgctctagagctccttctgacataccacctacctcctgccgctaatcaaggcacattcatccctgctgaggggcgaggggcttttatcttcaaggtcattttgttgtgtttaaacaacacaggtaaggaaacagttctaatactggccacctgtgatctctgacagcatgtctttatttagttcagggctaagtaaactttttctttttctttttt

SEQ ID NO: 239608 - DNA, 289 bp, Homo sapiens
ttcgggagcttggaattttgatatgtgctaggcagagagggtactttggtgaccagcccccttgggcactgagtctctactaagctttctggattggcaacatttcacacatgttgttacaactcattgctggaggaattaactgcatcctgtgtatcttcactgatagaagaattcttgcaagcttctgcctggtttcttctggactttgccccatcctccttttgcctttgttgagtcagctttgtatcctttcactttaataaaccatgtaagtacaacaactaaa

SEQ ID NO: 239609 - DNA, 446 bp, Homo sapiens
ctggttgctaaaaaactggaagttactaccaatggaaatgggtgacatctccatccttggagatcatcagaggtgaccagacaactacaggttctaatgatttcaacattcagctgcccgaaggcaggggcctggatggaatttttctttctggtacctttcagatctgagaatctgatcctaattcagaggtagaggaaaacaggtaaaatatttctctccctaatgtgatagcaagtaaaaatgaaaaataaagggcctaaggctggctgtgatgtcattcacctgtagtcccacctacttggggagctgagagaagaggagtgtttgaacccagaagtttgtcgctagcctgggcacatagcaagaccctgtctttataaacaaaacaaaataaaataaaaatttagaaaataatagaagacctaattctccttcttgaaaac

SEQ ID NO: 239610 - DNA, 408 bp, Homo sapiens
ctggttgctaaaaaactggaagttactaccaatggaaatgggtgacatctccatccttggagatcatcagaggtgaccagacaactacaggttctaatgatttcaacattcagctgcccgaaggcaggggcctggatggaatttttctttctggtacctttcagatctgagaatctgatcctaattcagaggtagaggaaaacaggtaaaatatttctctccctaatgtgatagcaagtaaaaatgaaaaataaagggcctaaggctggctgtgatgtcattcacctgtagtcccacctacttggggagctgagagaagaggagtgtttgaacccaggaggcggaggttgcagtgagccgagattgcaccactgccctcagcctggcaacaagagtgaaactttgtcc

SEQ ID NO: 239611 - DNA, 2290 bp, Homo sapiens
cgggtcctgaggaatcctacacaagctacttatatcagtgatcactaggataatccatagaacttttgggaaagaagtttaagacctttctcccaccatttcagcaggataaattccaactggattagaaaatgaaatgttaataatgcaaataagtacatatttatatctgtatataaaatacagttgatatttgcctggtgtttaggtgtctaaaggactttctaagcataaaggcaaaaaaaagtcataaaaatgctatagcagtttgagactctatgcaggaaagggcatcatcacgtgcatggatgaatctgtatctaattttaaacaatttccaatggtgcctgtttccttttctttgaaaatctctggagaaatagttcctcttgctgtgtctttctttaggcaagaatttttactaattgatgtgtagtctgaatcctggctaagtataaaccttttattttttatacctgttcttagtgaaaatgaaactgtgactttttttttaattccttttgttggtcaaaaactacaattaactcttctgagtttcttctctggctgaacaaacaatggtcccattggcctttcagggaactccaggccgtctcaaaaaccttcatgtttcatttcttttcagagctcccaaaaagaatagcttgctcttgacgttgtacatgttagtggaatgatcaggactactttgcaaagatgaaaaatttgtgtttctagtgatttgaaaatagaaatctgatgtaactattagatattgggaaagaaggtgacgaaggtaggtatcaccgaaagcacttaacaattctgaataattctgtacttgattgcatttatgtgtatcataggaacagttgggtttccttgagtgttaaattatttattcacttattccacttcaagccagctaaatgattgtttccctgatggcaaaagtctcagattgattgcacagtttatttggttggattgtttatgctctttttattatttattcttatttcaccaatgaaaatatcactaagttctttggtttgttgacctgattgtacctactttgacaaatcactgcctttctggacccagttttctcattaagtggcagtgataacctgtcatacttacagatataaaaacatgaaagttaaagtattgggtaatactttcctcctatcttttttttattttgaaaaagataaaaaattggcataatgtattagttaagatggaataatcatatgttgatatccagccatttcttctctcaaatgataggaagatttttatgtgaaactacttgtgagagatcttaacaatttgtagttagagaaagcactattatatcatttggaaatgcaagaaacaagttacctttggggcaacagaggcccttgtcattttctcaaaagaaggaagcatcagcattttgatgatgatgttgagattgtagaaatgatgaaggtgaaaaagttattctagcttatgtttagcaaaatgaaatgaacccaaataataaaacagttacaacattgaatctctttgggagaaaaaaaaaagatagaatgctaatgtccttcagaacttcttaaaccagaaccttaaaaaaaagagaagcttttaaaaaatcataatagtttatgatcttgaagggtttaaaagtatttgatgaagatgtcttttgaatttatttgtaggtcttcttgtgtatttaaaagctaagttatcttgtaatcatttttttctatacctttgtcagtaacctcttagtgatgaaataaaaaagattaggtaatcatccagcaatggggaagaagttaaggaacaaagagctcagattaaactagtttttagaatctaagcatttctgcatgaatttgaatcatggaaaacaaaatgtagcactccaacatttgatgcaaaactaaaagtggaatactgctttgatatttgaatgaattgaaaaataattaacatccttggaactgtatgtaaagaaggacttcacaagtattatagatacccccaacctcagcccttttcccatgtatctctttgatcacatccctacctcatagatcacccatgtgctgaagactttcagttctgtatgttcattctagatctcctgaactcaagatcagaatatctttctgacttctgactgtgtatttctggatgttatacaagaacctcagctcaaactcagtattccctaaaccattgtttttgaaactttatgttggatgtgaaatctgtattgtagaataacatt

SEQ ID NO: 239612 - DNA, 508 bp, Homo sapiens
gcacatgtcccacatgcttgtttcctaggacagaacccaaatatttgatccttggacttacgaatttcatcaagagaagttaaagtatgagttacaggaatgtggaggatgaaccgagttcctgggttttcgacaactatgtgactgagacaaaatatacattagaagaaagtaacacggagtttggaaggatagaagaccacagttcacagtacaactaactggaaatatggtgtcaatgtgtctgtttcagaggagaaccagtccacttgaatgaggtcactgtgactcaaacattatgctgtaatgttatcctgaaagagcttcaataaatctaaccactcatgaatgtctagataacacaaatttggcaagatctaaaaactagctaagattgatagtgacagtcaaaggagaaagttgttaaaacactggaaactctcatgggatgatgtctgttaatgatttgaaatgaaataaagttgatatccttggccatggaaaaaat

SEQ ID NO: 239613 - DNA, 1081 bp, Homo sapiens
ctctgcctcaagccccctggatgggattcaaagtaccagtgaccttaggtgctccagtggcttcttcggggaaaggaaccacactttcaggactgggaagttcttcccatcaccaccccaaacccttcctgttgccctggaagccccagtcctgttctcagcagaggtggcacggtgttggctggtgcgggcaggggaaggttgttgtcctctgagcaggggcacacgcctccacctgcgggggctgctgttgtgtttctgtgtgtggcttcccctgtttgcggctgaggcttgaacttccgggcctgcacagcttacagctgcagcgtctccccgtggctgactcagggtgactggcctcctgctccgaaatgtggagttggtgaggctgggtggctgtgggctgcctgaccctccttccctgccctagggtttctgtgatctggtgagtcagttgctccccagtgtttaacagacattgaggacaccctcttatctttacacaaagtgtctcttatagtagaaaaaaaaaatgaagcccagggaaaaccagaaatgaagctggcagagatcaaagtccaagttagagctaaatattcactcctggctttgctttcctggcactgatgccggaacaggacaagccatttagctgctgtggggttggcctgagactgcaaagcacaccttccagaatgccatggtgtgcagggggctccaggactccccagcacgccctcagctctgacctgacagtcatccaagctgggtcgctagccttggccagctctatttgcctatgtcctgcacacctttgcccactcctgcccccgtctcaactttgtcccccgtctacccatgcaggatccccaacctttcccttttactctcctccccatttgtccttgccaaccccgggtgtttgtaaattttgaggtggaggggatgggccagggaatgtgagggcggaggcagattgaggtttgatacaaacatgtaaataaacttccttcttctgtccactccccaggagtggtgctcacgggaacatcactcgcccccaccgccagctgactttttc

SEQ ID NO: 239614 - DNA, 343 bp, Homo sapiens
ctaatgacctcctgcctgctgcctcccagctcttatatgacttatgacaattactaagacaaattgatatctaaacaaagtctcttggggattttttgattattgtttgctttcatatcttctgaatgatcaaaagaggactctaacaggaacctttgatgtttatccaagtaaattcaggtttttcctgcaataacgaaagtaagcttgtttgtggtttgtgaagatttaagcaaaggaggagagaaaagttgatttttaaaaactgtttcttaaaagacaaatctttaaatgaacacaagaaagaatttaatttaacaattttctgagatcaggttccaac

SEQ ID NO: 239615 - DNA, 464 bp, Homo sapiens
tgaggtttccccagaagcagatgccactatgcttccagttgacagcttgcaaagccgtgagccaataaatctcatttcttataaattacccagtctcgggtatttctttacagcaatgcaagaacggtctgacatagccttatactatcttcacgtgttaaaagaggacgggattgggccgggcgtggtggctcacactcttaatcccaacagtttgggaggccaaggtgggcagatcacctgaggttgggagttcacaaccagcctgaccaacatggtgaaaccccgtctctactaaaaaatacaaaattagccggacatggtggtgcatgcctgtaatcccagctactcggatggctgaggcagaagaatcgcttgaacctgggaggcagaggttgcagtgagccaagatggcaccattgcactcactccaggctggggcaacaagagcgaaactccatctt

SEQ ID NO: 239616 - DNA, 401 bp, Homo sapiens
cgtgagaacctctgcaagtcaggttcccatgattgtataggatgtgttacggcagggatctgaaagctgatgatttcatcactagctggaagcatcaggatcgaaacgatgacagttgcaaaatgttcatcaagtgagagctgcgtcctcgcgagaccgaaacgccgcctctagcacctgaaacacaagccctcagaggagcagatgattccctcaggatttaagaaaattgaggacttcagttttcgaagccgcattatttcacattgctgatacctctagcgcctgaaacacaagcgctcagaggagcaaatgattccctcaggatttaagaaaatgaggacttcagttttcgaagcagcattatttcacattgctgatacttttaggcaaaaaaaaaa

SEQ ID NO: 239617 - DNA, 441 bp, Homo sapiens
ctcacttctgggattttactcatgctgaattgccagcctacttgagtacattccttcccaactccaattggccaaactttgtccagtgcctcctcctccaggaggcctacccagattttctccacatctctccctcccttgacaccttcagcagagggtcagctgcacatctgagtacttagtaaatactcagtaaatgaagtcatttctggatgaatgaataaaaaaatcatacatacacataaatctaacaagcactgagatggtcgaatttttgtttttaatattgatttaaatataacagctcccaggggctcctctcctctgttccatcacatatgaagtctctcacttgcaagcaagaaccagcctgaaaacgttggttttgtgtgctctgttaaaaaaagaaagaaaaattctatgcaaattgctttaaaattt

SEQ ID NO: 239618 - DNA, 437 bp, Homo sapiens
tgacgagtccccttgttgagcccaacattaactctttagctgctgggtcgtgaagctgtcctggggaggggtccgggtggcagtgggacactcagagggcctggggcagccactgtactaacacatgcttaaggatttcagtgttttaataagtggtacggctatcctggtgtgtactggctgaaaagcagccctgggaacaaattgttattggaagttaaagattctccaattaggcaggttttcacaagttatatacccatttgttcatattggatcagcaaagattctatctgaaggcagagttctggactagaggccgggggtggtggctcacacctgtaatcccagcactttgggaggccgaggcgggcagatcatttgaggtcaggagttcgagaccagcctggccaacatggcaaaaccccatctctact

SEQ ID NO: 239619 - DNA, 375 bp, Homo sapiens
atagaaatgatggtaatcttacagggagggttaatcagatacatgagaaatcacatctattccttgataaagtacaagttactcagaaatcaatcacagactccagtgtcaaatacctagtacacaacaagacgtgctgcagatttgaacagttttgtctgctgagagcattgatttgtgggttctataatacatgcacaatagtaaacaacataaatataagaagtagatatacagtaatgatttactttttctaggaggagagtgactaatttctcagacttcagtgctgctacaaaaacactgctgggatttggtatgttttcagggaactacacagtgagacacacagttaagcacttggagacattgctc

SEQ ID NO: 239620 - DNA, 700 bp, Homo sapiens
  misc_feature (649)..(649): n is a, c, g, or t
gtttgtcacaactctctgctgtatgtgctcatttcatccatccatccatccatcccccttagtcgaattgaaggaatgcagtctttggagataaaccaacatggcttcaaattctgggtttgtcacttattagcaatgggattatatttctttatctgcaaaatggaggcatttatgtaagatacctggcacattgttaagtactcaatagtaattattatattcattatattataaggatatattaatcttaaattccttcattctcagaacatgttctttctctgggaccttgctctaaaactgaaatggtgcattcattatctattgctgtgtaacaaatttccccaaaactaagcagcttaaaacaaaaacatctatgatcttacaccatttttgagggttaggaatctgagtgtgacttagctgggtggttctggcttaggctttttcatgaggctacaatcaagctgttgggcagagccgcagaccctgagtacttgactggggctgacagatccacttccaagctcactcacatggctgatggcaggtgactccgattgcttaccatgtgggcgtctccctaggcattcccaaagcaaagggggagtgaggagactaaggcagacaccgtagtcttctattntcaatttgcacaagcctgtgacattgtgggagaggaccaccaaggatttgt

SEQ ID NO: 239621 - DNA, 147 bp, Homo sapiens
aaaaaaatttttttttaaatatctgcctaacattcaatgatggatatgatttaggtcaagacataaagaagaacgaatcttttaattcatcctttattacatttacggcatgtgaacctgactttagagttttaggcacctttaaca

SEQ ID NO: 239622 - DNA, 387 bp, Homo sapiens
ccattttggccaggctggtcttgaacccctggactcaagtgatctgcttcggcttgccaaagtgctgggattacaggcatgagtcaacgtgcctggccaaagctcatttctttttaaactactcatttatctttcaatgtagacatgaaatctgcactataattttcattttcaggtcaaaatgtaatcatcttaatccctcatattcaaacaattattccatcagcatcagttttatgaattgagagatgttttcccaagtaaaaatgttctggatttctgtaggaatccgtgtggaaatgaaaccatttgccctgtgccacgcagcacaggactgtcccttctcatgttgatgagatgcagagcagccccgttctggaagattcc

SEQ ID NO: 239623 - DNA, 327 bp, Homo sapiens
tcaagaaacacttctttatttatttttattattttttgtttacctctagctgcaaatctcatgatttatttatttttagaaattagtttgttattactggttaatacatgtccaagatcaaaccttcatatagaaccatagggctgtaacggtgaataaggtaagtttcttggcatacctgttcctcagtccccccatcctggagcagcctgctcataggccccttgtgggcctttccaggtggggtcttcccaggcttgcaggagaaccatatgcttttgtcccttctctcaaatgttggcagactgtaaatgtctttgccccctg

SEQ ID NO: 239624 - DNA, 588 bp, Homo sapiens
gatcacgtctctgtgtcctgtgtctcactctatctagtcacctgttgagtgctggctgaatgtaaagcatgatggaaaatatcaggaggtactaagaagccccaaaaggagtttctctgtggtgtcaactagactgagatgttcctcagatgctctgaagctggcagagctcattaggcacaacagtgggaggtagcagactgggtagtgatagaatcagtgaggagaatgtcccatcatccatgctaaaacttggggatgtttctgaagtcaactactgcatttatgcaaataaccaagtacttttctttcaataactgacagttcaatatgtcctagagagttggcctgaaaaaaagaatattggggttctggggctaagaggaacccagagctcagttagctgctggagacagtcacagttttggagaattaggggtaggttattagttacatctgtttattggactagaaaatgttaaacctgggagggctgtcagagctcagtcagtctgacctcctcacatacaggtgaggagtcttcagcccaggaaggtaaggcaacatgcatgtagttacacagcaaat

SEQ ID NO: 239625 - DNA, 512 bp, Homo sapiens
ctcatcttgttctttgccttctcttctttaagactagggaattggttattggataatgctcccaagtctggccaataataactcaagagtaccctgaatcaacatctatggcttttccctaaaccctgatcttagggccatccatttgtattttgaaatgatcaagctatcctttactccagctgaaaacttacttacctgatacttcatcaggtctgctcacaggtgtatcaaagagagacggtacctttggtgaaaccattgtttagctggttttcacttcatccagttaccagccaatcaaaagtttttccaccgatcatattttcataccattgattgtattaacctagtttaaatcaaatctaaaatatgtgtgcttattacaattattgaatggttgcatgtgagggttgttgggttttgtaaaacaggaagcttatttttaaaatttttaaagtggtgaaaagtaggcttctctaaaaattagttttaacagtgtgtttgcaaaa

SEQ ID NO: 239626 - DNA, 235 bp, Homo sapiens
actgagaataatttccttgttggtcaatctgcaatcagacatctgtgtatttttagtatttcaaaataaaaagcaaaaagtaataacaataaaatccatgttatatatataacatgcatgtagtgtagtagatactatatgtaataactatgtatgtgaagtatataatacatttttcttagtattaacaaaattttaattgacaaataaaaattgtatatatttgtggtgcaca

SEQ ID NO: 239627 - DNA, 314 bp, Homo sapiens
agggtgtgtggcatggggaactggcccctaggcccttctcagaattcccagtacagttacgtgaatgttccttctgctcaggtttcctggggatgcctaggctggggcctcaggggctgagtctgggcaagaacccagcccctcctccccccgggagaagcttccagctgtttagattcatccctcaattaaaaaacattgcccccctgtgccaggtttcacccagagccacgtacaagctagcccagtgggtctcagcctttcggatttctcacatcactaacatttcaaaaaaataaaaaaatttaggatct

SEQ ID NO: 239628 - DNA, 1082 bp, Homo sapiens
atagctatcaacagaagactggttaaataacttagagcacatcaatgctatgtaaccacttaaaacactatgctaaatctatatgtgttgctatgaaaagagttctatggtttatcaacaagtgaaaaagtaggatgcaaaacaaaatgtgaactccgatcctatctgtataaattttttaaaaggatacaaatatatatatctagaaggatacacaagtatgttaacagtggtcacatctggggaacaggctgggaagaagaggggtgggactttttctttcatacccttctaaaccatttaaattatttaccatgtgattagttagatggcatgtaattacttttatgaatgaatgaattgttgctctactgtttggcttttttttttcctttttgttgtttctaacaccaacatagactaagatgaagtacagttaacttgggttggccaagacggctaactgaatcaatcctctcatatccctgtttttcattcaaagactatgtccttatctcaaatatttggcagcttgcacataaatatgcctccttcccacccccaaaaaactaactaacacaccctataagtaacatcaacctttccctcaaattttatttgttaaaccttcaaagggtacatgagagaggcaagtcttacctggggtcagccaattaaatctgctttttatctacggtttatcactaactgaacatacagctcaaagtacaaagttaattactacttttgcaaggagaaactgaaaatgctgatgggtgagcagcaggacaattcttgtatttctaatgtcttactctcattgatcatatcagccctcacagaagactatcttgcctaaagttaccattcctcattccagcatccctttatcattttatcctgtcctttctacagcaaaaagaggtattaaaaaaactatctttacctgcagtctcttaattctagcaaattaatatccatttctatatatatgaagattctgctgttttctccttttagctaaccccttccaaatttatatttatagtttctctctacttttataaattatactaggctac

SEQ ID NO: 239629 - DNA, 601 bp, Homo sapiens
  misc_feature (408)..(408): n is a, c, g, or t
  misc_feature (413)..(413): n is a, c, g, or t
aataatagagtgacaccattgttctgttctttgtacatttaaataagtcatggccagaaatctgctgtggcctcattaccttactgtttatatgtgtgatacaaagccgacggtagggagtagagttatcttgaatgtcagctcaccttcctaggaaaggtaacttatcctagaaagtgatttatttagaaagttttcatttttagacttctgaccatatgccttaactacacgtgcaaagcctgtgttcctgcaactgcccttttacacttcctcaggcgtaccctgtatatgacctgtcagttttgttcaagcaatgcatgtttagattagcagttctcagagggtttccttgaccgttagcattagtgtcacctgggaaatgcagattctcagacactcctctcntgtgntcctcccctctccctttctctatctctcactctttatagcttccctcacgccgcacactctgtttctcaccacctcccctcttcacctctcacctgcgcctcctctctactacttctctgtcttctccctcctctcttttctctcttcacactccttatcctgtctcctatccttttcgcaccttccc

SEQ ID NO: 239630 - DNA, 1713 bp, Homo sapiens
gtacagacggggtttctccgtgttggtcgggctgatctcaagctcctgacctcgggtgatccacccgcctccgcctccctgggtgctaggattgcaggcgtgagccaccgcgcctccggcccaatttagtaaccagaaaggaatagatcggcctggcgtggtagctcatgcttgtgatcccagcactgtggacggccgagcgcggcgatcgattgagcctaggacttccagaccggcctgggcaacgtggtgaaacactgtcttttttttttttttttttttttgagtggagtttcgctcgttttgcaggctggagtgcagtggcgtggtctcgactcaccgcggcctccacctcccgggtttaggtggttctcctgcctcagcctcctgagtgtctgggattgcaggcatgagccaccatgccagctaattttggttttatttttttggtacagacggggtttctccgtgttggtcaggctgatctcgagctcctgacctcgagtgatacgcccgcctccgcctccctgggtgctgggattgcaggcgtgagccaccgcgcccccggtccaatttagtaaccagaaaggaatagatctgcctggcgtggtgcctcccccttgtgatcccaggactttggaaggccgagtgtggcagatcgcttgagcctaggagttccagaccgcctgggcaacatggtgaaacccggtctctgttttgagacggagtttcacccttgttgtccaggctggagtgcaatggtgtgatctttgcccaccgcaacctcggcctcccggatttaggtgattctcctgcctgggcctccctagtagctgaggcaagaaaatcgcttgaacccaagaggcagaggtcgcagtgagccgagatcatgccattgcactccagcctgggactgtcccctgacaggcagtgcgacgaggtcaggcccgcgcccgccgagtcctagggccgctgccgccgacggccatggaggacgagcagctcgacagcctggagggctgggcgccggtccggcaaggcctcttcgccgatcccgagaggcaccggctgcgcttcctggtggcgtggaatggcgcggagggcaagttagctgtgacttgtcacgacctcaccgcgcagcagccgcagcggcgcgagggggcccggctggggctggagcccaaacccaaggccgctgtggtgcattggccgggaaacgaacccgggcctcccgcgtggcccccccccctggcatggctttggaatgtacagaatcctcagtgattattggttatctgattattattactataatagaagcctggcttgctgctgcccgtcattgacttactaaatacctgtgaaaggaaagtcagcaaaaaaaaaaaaaaaatcagattccacaaaatgagttggaatatattatgtagaattgaaaggttcactgaagtataagtttagcaataagcacaacaggggtagtccccacaaaattagaagcttcctgaggtgggagcatctagttgcttgctactgatgtccaatgctaagactgagctgagtattcgtggagtgggatgggttgaaatggcccagaatagttgcagcgattgcactgtaattaaaaatgtctaattggagctataggaaggcaagcagagactggcttcttcagcacactcatacaactgggctagctccaacattaaaact

SEQ ID NO: 239631 - DNA, 187 bp, Homo sapiens
ccttatctcctgttcttagaccttggcctctcttcctcagtgtactgaatcagcttttgctataattttggtgactcatattggccctgatcattattggaatcccgtaagtttcatattctgctccaagaaacatttggataaattgagaaaaactaatagcctttcatggtaataacagtctact

SEQ ID NO: 239632 - DNA, 336 bp, Homo sapiens
gacgtccctaaccgccaagggctcatcaagatcctgccttgattcattggatctgtgcaagattagcaaatgtctaccctaattttagacccactcctaaaaactcactcttgggagctatgtttggaatggggaccctcttcctctggtattatgttttcaaaaaacttatccaagaaggaaaattggatcaaacgtttaacatctcatattaaatctggcaatgacaactgcatgtattcttgcttaaataaacggtctatcaattttttgttgttgttgttgttgttttttaaggattgtgggccgggtacagtgactcacgcctgtaatccc

SEQ ID NO: 239633 - DNA, 261 bp, Homo sapiens
gtggggtggttccataatcacccaggacctcctcttctatcttgttgctctgccttccccaatattcagtttccacctcatggtccaagatagctgctgaagctccagccgccacatttgtgtttgagtcagtagcagagggacaggggcaaggaacattgttgacaccacttggatcactttctatggggcaaactggtcactcagctactgatagcctcagggaagactggacaatatagtctttatcccaggtagcca

SEQ ID NO: 239634 - DNA, 712 bp, Homo sapiens
ccgacatctcgtattctgtgagcatctctagagggtacacttgcactggtggaacctgcaggctaaaggacaggcccactatatgtttactgtgtatgccaaacttccctcccatctactacctcccactcttgcaagcattggatatactattaatttttagaaatataagaagtgaaaaggtcttcactttaacctgaatggctttaccataggatcaagactaccttttcatgttcattagtcatatgtaaatactcattcaatgcttgtcaggggagaagatcttctctccctgacaaagaaaaaccaaatatgtaggggttatctgccttgcctaagaaatggtgctgtgtggaatttccttgtttaagaagagatacgtgttagaagaattggcttctgattctctttgctgtgtcttgctgtgtaattcaagttggctgcacagcaatttaatgaattagaacaagaaccaaaagattattgaaagtggctgatggccataatctagataattcctactgtgtccccatccatctgccactttaaaatgaaaatagcaaggcaaaagaaagataattggaaggcattatggtgtcttgcaccctcattcagccattctacaaatatctattaggtaccttccatctgtcaggcactgggaatatgggaaagaataaaagtcaaattcctgtccccatggagttgt

SEQ ID NO: 239635 - DNA, 1937 bp, Homo sapiens
aaaaaataagaggaggaagaagaaacagaaaaagaaagaggagaaaggaaaaatatgtaacagagactatatgtgatctgtgaagctttaagtatttactgtctggctcttcacagaaacagtttacagaccccaccaaagtctaaagacccctcaggcacggcctcagtcctcttctgactcacacgctccctcctaaaacaagaaaagctctccaagtctttaccaaggctttgtcgatttaaatatgtgtgtgtgtttgtgtgtgattttttaaaaattgaattataaatagatttgaatcaccagttctcatggttgtggcatttgagatttaccagtggaagaacagtggaatattggtgcgcacataagtcagcgtggccagctacaggcgaaaaatcagtcagcagaattgtaaatggtatttctgttaaccctttgacttggttggaggtactatcacgcaagtatctgctgaacttgtttctctttgcgaagaacgaaatgtgagcaaaaatagatcaaacatgcctgtgaaatacaaatatactttcatctactgaaagcctaaccaaaatttttttaaaaggttctacttaaacaattaactttagaattagatagttatttaaaaaaaataataataatgacttaaccaattgtcctcccttcctgtggatattagctaagatttggtctttatccacaggagatgtatgagggtcatcattccttcaggttatgttttaaaacgctttcaatctccatgctccaaaacatccacttaccgtttcccggtgaattttccaaaacttagctctgatcctacctaccaattcccttgctttgaaattcttagacctatatgacctgccaaattgatctaatcaacattaaggaagaaatgaaaacaaattaccaaacatccctttttgtgttaattaattaatataaaagtcatggggaaatgaccagttgtacagctgtatattattcaacatactgcgctatataattctctgtgtcacaggacagttttcatacttgccttgagtccattggtaaattcagcacactaacaaactgattattcctccaacggtgaaatatttcccctttgctaccaagaagtgatttgacagaacattcaggtgattcatcagaaataaggcttatgaggtcagtttatgtctttaattctcaacctattccaaaatataactgggatcaacatttaatgttcattttcagtggtgcctgtggcttacataggcaggtaactaattttgtcttccccatgatgactctgaccccgagagcacacagaattgtcctgtgtccataggattcatctccagctcataatgcaaaccagttctaaggataaacagtaaagtcaaacatgtcatacttgttaatttcttctctttctttgcaaaaaagttcatatgtaaaaataaataacccaaattctgtaatattatagacatccagacgttaccattaagtgagtggcttgatttataaaaaatgagaacataaaatggataagtagaattttagcgagaaggtaatctcgaagcatatgagctcatcctgcatagtgtggacttgaggactcgctcctgggatccttactgctgtcaaccttggatgttcagggaaggaaacttgtgtgcaaacagtatcctagctaggtcagaggaggttataggaaagtaatattgatataccctcactcagcaggaaacaaacaattagttctgtactttttggaggtttaatcatctgagacttactaagggggcccaccattgacgggagagcaggagaacttgtatgtgatccagggatgcattgaatggttaattaggttacaaaacttattcccaaatggaatgtgttgaattaactctgaatatccctaaaactac

SEQ ID NO: 239636 - DNA, 370 bp, Homo sapiens
tgctgggattacaggtgtgagccaccgcacctggctacttaaatgtgatttatactatgaatatgctttcaaatccattttctgcatataaacttcaaacaaacctacttctaattttttgtgattttcatacctgtagtttacaaatgatgtttaagatagactggctggctgttaaggcagggcctggaggagtggggtgatactaaaatttacaaattcaggaatgtcattttatctgttcaattaacccttatttgattctgcaagattcctaaacacagaaaagaatggctgtaacctgaaatttgggcttatcaagttaaggcttggaagtagaatggccaagtgaataaaaataccaaatcca

SEQ ID NO: 239637 - DNA, 327 bp, Homo sapiens
atatatattagaatggatttcacactgggttttactcccattatgtgatgcataaaaaagtaaacaacaataaaacagttaaattaatgagcttggttggttttcaaaacatgttaggcccaatatgttagagaattaatatagggattttaaaaatgtgttaaactcaacatgttcttactaataacaggggatttctgatatcaaggaccagttaatgtggttaatattttgtattagaaggaaagggaagagatgtgctgggcaaaagaggaaaatatagattttttaaaaataaatagaaatctgagctaatattaataaggg

SEQ ID NO: 239638 - DNA, 355 bp, Homo sapiens
attgatgctctttagcctagattctcaaattgtatgttggtaaggactgtttttcccacatgttgagaatggatacttttgaaaaacataataacattgttgcagtttctcaagaactaccctccatatctgtacttttcttgggctggcaagaaatagttcatggtcagtctttaaagaatattactacagtgctttgataaagaaaattaaattatggtgaggtaaatgacatttaaaataagtgcttttttcctttgaaaagaccaccgtttagttcatcatgtgagtatgagcctaggcacggggatgtgacagtgaacaaatcacaggccttgctcctcagcagttcatt

SEQ ID NO: 239639 - DNA, 527 bp, Homo sapiens
aaagaggctatgattaaaagcaaaaaaaaaaggaaaagaaacaaaatccacatttaatgattccacatggtacattttatcttttccaataccgtcctccaaaatgcagtgggatagagatttttgttgttgttgggtttttttttttcctcctctgaaaatggcttgtttctcattagaaagagtcatttgagaatgatactatcaaaatctgtcagggtaggtcctgcagaatattccagatgttcccctacaatctcttgcaaacaaatgattaaatgtagtactggtagatttttagacaaaaagaaattttaaatagctctcataaaattacattgtttgtaatgataagatgtattttaaaagttccattcttctagaaaccttgaactttccatcgttatttttcagttaatcttccagaatatcctttctgtccctgctctgtgaagttgaacgcttggttcaacttaggcttggtagctaatgtattgccacctgaattgtgcctatttaatactaga

SEQ ID NO: 239640 - DNA, 264 bp, Homo sapiens
cagttttatcttcctttcaaacccttaaaccttttatttcttataaatattattgcactggctaggacctccagtacaatattgaatagaagtggtaaagtagatatctttgccttgttcctgctcttagaagataagtctttaatattttaccattaagtttgatgctgactataggttttttgtgtatgccttttgtcaaatagaagaagttacattctatttctaattatctgagacttattaaaatgaatgggtacttca

SEQ ID NO: 239641 - DNA, 2033 bp, Homo sapiens
agcatcgagtcggccttgttgtataaaattgagttgttggcatgtggttgtggtgagcagaagcagttattatacattacttggtaaaattcatattcatatcttgtcataaattttaaacaggtcttctttcattttcctttacagaaaactgtaatactgcatatgcattttcaaactatgcatatttcttcttcattccatgtggaagtttttattcagcctttcagtaaattttacttagcttgtcccatggatgccgtaggtgtaaggaatatgatagtgaacaagacagacagagctcctcccctcagggagctttgccatgatacacgatgatgacaatgataaaaggagcaaataatgatttgggacctgattccaaagggatatttctgcgacacttacaatgaaattccaacctggcaccatctttttcactgcagaatgcatggaggtggttgcatcatgtcatttcgacatgcatttaaatgtaatgaaaggcacaagtagtgattgcaaacactacaataagttgcttgttgactctcttactgtcttccttcttatctccctttcttcctttgtctcattctcagttttcagagcttagtcattatttcgtaatcctctcctaaaatgaaatctggagctctaaggacaggaggcacaggttgtgtttgaacagcatcatcgtgctttatgaaggggattggaggggagattctgccccacagtatggtcaggtctcgctccaggcagcactgactacattggtgctggttgggtaactgtggctcggcaggtcactctccctctttccacctccgttttctcattattagtagaagtcgaaatagcatggttttctaaggcctctgccaatctacaattctgtgattcatatgttcctaaacacttgagttactttttctcaataaatggaaatatattttccaatgaggctggaaatacattttccaattatcctctcccctggtttataacatatcatcaatgtgttgggacttctaacactgcttctgctgtaagcccatcaagaggttaattacctttgaagaatgaggaactgctggaaaagaactgtaaaaccttcaagagaactttggagttaatccctctggtaataggaatcaatgtcactcacacatctagttgccagtggaggaggaataacagcactgggccaagtagacttgaaggaaggcaggttgctgatagagtggagagctgaagattctgaatcaagctcatcatgactctcttcctcctctttgaggctacccaatcagagcaaaaacagtattttaaaaaacctcaactggatgagcctgatgcagtggtgtgctcatgcagtcccagccaaagggtcacttgagcagaggagttcaaggccaacttgggcaacatagtgagaccccgtctctaagacaaataataaacatcaaaattaaaattaaaaaaaacccaacccagtgttcccttcagaatcctgagtggtttgtttcatcttcctctattctggcttgtgtcatcttcctctcttgtaatggataaaaactccaaatgaagacaaaaatgaggaatttgtcaaaaaaattgaattgccaacaaaagccatctttggttgatcaaacggtacagacgtttcagttagacaagagggctaagtttctgagacccattgtacaggattattaatattattcatttttagccctcataataaggtattataaatgtcaagattgctaaaagaatacgtttttaaatgtcttcattataaaaaataagtatgtgaggtgatggacatattaatcagcttaatataatcattttatagtatatgtagctatatcaaaacatcacattataacccataactacatgcaattattatttgtcaattaaaaatacaaatctaggccaaggtgggaggatcccttgagcccaggagtttgacagcagcttgggcaacatagggagactccatctctacaaaaaaaaaaaaa

SEQ ID NO: 239642 - DNA, 1978 bp, Homo sapiens
agcatcgagtcggccttgttgtataaaattgagttgttggcatgtggttgtggtgagcagaagcagttattatacattacttggtaaaattcatattcatatcttgtcataaattttaaacaggtcttctttcattttcctttacagaaaactgtaatactgcatatgcattttcaaactatgcatatttcttcttcattccatgtggaagtttttattcagcctttcagtaaattttacttagcttgtcccatggatgccgtaggtgtaaggaatatgatagtgaacaagacagacagagctcctcccctcagggagctttgccatgatacacgatgatgacaatgataaaaggagcaaataatgatttgggacctgattccaaagggatatttctgcgacacttacaatgaaattccaacctggcaccatctttttcactgcagaatgcatggaggtggttgcatcatgtcatttcgacatgcatttaaatgtaatgaaaggcacaagtagtgattgcaaacactacaataagttgcttgttgactctcttactgtcttccttcttatctccctttcttcctttgtctcattctcagttttcagagcttagtcattatttcgtaatcctctcatcatcgtgctttatgaaggggattggaggggagattctgccccacagtatggtcaggtctcgctccaggcagcactgactacattggtgctggttgggtaactgtggctcggcaggtcactctccctctttccacctccgttttctcattattagtagaagtcgaaatagcatggttttctaaggcctctgccaatctacaattctgtgattcatatgttcctaaacacttgagttactttttctcaataaatggaaatatattttccaatgaggctggaaatacattttccaattatcctctcccctggtttataacatatcatcaatgtgttgggacttctaacactgcttctgctgtaagcccatcaagaggttaattacctttgaagaatgaggaactgctggaaaagaactgtaaaaccttcaagagaactttggagttaatccctctggtaataggaatcaatgtcactcacacatctagttgccagtggaggaggaataacagcactgggccaagtagacttgaaggaaggcaggttgctgatagagtggagagctgaagattctgaatcaagctcatcatgactctcttcctcctctttgaggctacccaatcagagcaaaaacagtattttaaaaaacctcaactggatgagcctgatgcagtggtgtgctcatgcagtcccagccaaagggtcacttgagcagaggagttcaaggccaacttgggcaacatagtgagaccccgtctctaagacaaataataaacatcaaaattaaaattaaaaaaaacccaacccagtgttcccttcagaatcctgagtggtttgtttcatcttcctctattctggcttgtgtcatcttcctctcttgtaatggataaaaactccaaatgaagacaaaaatgaggaatttgtcaaaaaaattgaattgccaacaaaagccatctttggttgatcaaacggtacagacgtttcagttagacaagagggctaagtttctgagacccattgtacaggattattaatattattcatttttagccctcataataaggtattataaatgtcaagattgctaaaagaatacgtttttaaatgtcttcattataaaaaataagtatgtgaggtgatggacatattaatcagcttaatataatcattttatagtatatgtagctatatcaaaacatcacattataacccataactacatgcaattattatttgtcaattaaaaatacaaatctaggccaaggtgggaggatcccttgagcccaggagtttgacagcagcttgggcaacatagggagactccatctctacaaaaaaaaaaaaa

SEQ ID NO: 239643 - DNA, 466 bp, Homo sapiens
catcgtcatagctgactcttgaggatccacggacggcctgctatgccccagcaatcagagcctccaggcccaggaggatgaaaagaacatggagacgagaggctccaaatggagtagccctctgccagctcacatccctctttcaggggctgcagcttggacatcccaagactggccaggttacagcccacaggaggcgaggagtgctcccctttacctcaggaagtccgatgtccgccccagctgtcttctgccccagggaaagcagtgaaggaggagactgcaagcatcgggatgcccaggccccaaggaggccctcttcctgcagatccgagaaggactggacacctttctgggactgcagcaccagggtggctacgcctcccggctggatcaggattcctgtcatccatctgctggccctttggaccactcggccactggcatgctttccaagtctgtaccc

SEQ ID NO: 239644 - DNA, 431 bp, Homo sapiens
catcgtcatagctgactcttgaggatccacggacggcctgctatgccccagcaatcagagcctccaggcccaggaggatgaaaagaacatggagacgagaggctccaaatggagtagccctctgccagctcacatccctctttcaggggctgcagcttggacatcccaagactggccaggttacaggcaaggaggatatatttgcttttgttcattgtgttcctggtggaaacctgggacttgctcaggagaatggggaggataggccaatgagtcagaggcttgggtttgagaacaggtgtggggaagggaaagggaactagtctgatatgcatcattttgcactccaggactatggagtgttagcctctgaaggaggaaatggtattttccatctgtgtagtctccaaggaaaatgtaatgagttaacc

SEQ ID NO: 239645 - DNA, 429 bp, Homo sapiens
aagtgttgggggagggttttagagctgctttttgattaggaaattttaagacaatttttcttggtccaagaattttgcagatagcctacaatattcagatgccaacttattgcacggttttacttccattccttttgtcactagggagacaatttattactcaaactaattatgatggctggtaccaaaggttacttttatgcagattatgttacatgaccgtttagtccataattttatactccaacattccacctccacatttgcaaaattcaggcaaaggagaaggaacaagaaaataaaatttaagttacctgaaatttatttatggttccattcgaccctgcacaggtacttaccaacctatttgcttcattagaagaacactgacacttgccatgcccaggcccttctgattggtataatgtc

SEQ ID NO: 239646 - DNA, 422 bp, Homo sapiens
ggttcaactttctgctcacttctgttttacgtgacctgttacgcagtgaatacttcaaatgaagtgaattattattaattttttaattattttattttattttattattattatactttaagttttagggtacatgtgcacaatgtgcaggttagttacatatgtatacatgtgccatgctggtgtgctgcacccattaactcgtcatttagaagtgaattattaatgagaatgtttggctgaaagatagcttggaagataatctactctaactccttcatttatgaatgaaaattgtttctgtgactatacagcaaattagtggtttaagttggaatcgtctgattcccaacccagttctctttcctttatagcacactgttaactgtatcaataaaactgagtcatgaagacattatggt

SEQ ID NO: 239647 - DNA, 552 bp, Homo sapiens
ctgaactggttagttgcagttaaaggcatgctttgcacctgttaccaggcaggctcctatttcaacagggatgtggaccctgctccccattttaatatcttaacctaacttactaactgttcagtctacttagagatgtttgccacacctagttgaaactgaagccagaaatgcctcatcaccattataaattgaggggagtaggaagtggagggtgcatgtgggccttcaatatgctgtagttgcttagtcagcacagaaaattgcaagggtagtggggtctcagccgcatgttgaaccattccatccctgtactgaggtttctattggaaactgtaattgtagtttaatggctcacttctggcctttcacaaggcatctatcctcatgaataaactgtgtttgtgtgtagggggattgagggccaggttatagtagcagttgaaatgtttagtagggccaactttatggttctatttatgaatgcttccagaccaaccaccccaaaacttttgacctgaggaataaattagttttgaattaaaaaaaaaa

SEQ ID NO: 239648 - DNA, 370 bp, Homo sapiens
tgtgtgtgagcattacgagaaccattaaactggaaataaaattatctagcaatggaaaattgggaaaagaaatcatgaagtatttacattataggatattatacagctattaaaatagatgaggtgtcacccctgaggtatgaactcagaaggatataaaattttataaactccgatttttctttaaagacacacacacacactctgacacatacacataaaaatatattagcatgtcaagagatctcactgtgcatgttatcatacacatcagtctttttgtcttttttaagacatggtttcactctgtcatcccaactggagtgtagcggggtgtgatcacagctcactgcagcctcaacatcccagg

SEQ ID NO: 239649 - DNA, 512 bp, Homo sapiens
cccaaagaaacttgcttttcttgttaacaaaaccatcttcatacccttaacagctgcctgaattgctgggacaaactgttttttgcccaaacaaaataattccccaaattggtaacttgaatgttacgtctggatggctggctggctgttaaaagatcatccataccctctcttctcttccttccccaaacttggtacttctgctggggtctccccaccaacctcagatctgtttaatgggtcagggaacccaattatttctcataacaataagcaacacttgctgtttgctttgtgttagacactgttctaagtgcattacatgcattaacaaacttaactttgacatcaaccaacactgtgaggtcggtagcattccttgttatcttcaagatacagacaggaaaactgaggcatcagaaggtagaattacttgctccaggtcacatgaacagggatggcagagttagagttccaatccagattggctggccccagagcctgtgccctta

SEQ ID NO: 239650 - DNA, 443 bp, Homo sapiens
ctgctgttatgacatggccatttcattctccacaacaagagaagcagccgcggcttcagtcaccgccctccagcagcgtaagaggataaaagtgcgacttgccctaaaacctaaacgtctcttctggatctccagaaaaaaagtgctgctctaggccgggcgcagtggctcacgcctgtaatcctagcactttggcaggccgaggcgggcggatcatctgaggtgaggacttcgagaccagcctagccaaaatggtcaaagcccgcctctactaaaaatacaaaaattagccgagcgtggtggcacgtgcctgtagtcccagctgcatgggaggctgaggccggagaatcacttgaaccctggaggcagaggttgcagcgagccaagaccgtgccactgcacttcagcccaggtgacagagggagacgccctctcacaaaaaa

SEQ ID NO: 239651 - DNA, 351 bp, Homo sapiens
aaatgcatgcacccatagtgaggggtggggcagatttctttccatccctcctctaaaccctgatatctctccagttccctcttttccaagcttagacaggcaaaggagctaaggcagctgaaatgctctgcataaaataatgggagaaatttaggatcagagtgggtgtttgcccttgagaggaatagctgagagaaaagaggtgaaaaacaccttttcaagcatcacggttatgtggctgagaagctttcaagaacagaaaaggccactaagtatttttaaggagtttgccctgttgcactgtaaattctctccatcttttcaaacttttaataaagtctgtcaaaaacc

SEQ ID NO: 239652 - DNA, 410 bp, Homo sapiens
ttcatttttatcttcctcacttttgcacttaatcaaaaaacactattttatgtgactgctttttctctgagccaaaaaaattaaaatacactcatttctattgtgaatatcaacagtttctttactaactccatcattctctgattggaagttactaagttagagtaagtggaatgatgatttggtattttgtaggcatagtcttaatatattttagtaatattataaactaataagagcaagatacatttctattttgttatgaaatcatttgattatgtagtttcacttaaaatgttttgtgaaatgtttatattttgaacaaaggaatgtatttccatagcaaaaatagctaaaaatggcacagacatgtattatataaaatatattgcagatataacttagatcta

SEQ ID NO: 239653 - DNA, 509 bp, Homo sapiens
cagttcacatttaccattgtcatcactgtgatcatcatcattactgtgaatcgttctcatcaaacagcattcatttggttctctgcttacaaaagatgccgtattatctttctatgtttctcttaaacatgtggaaaataatgcttttggagaaattgggatattgggaggataaacgagcttctgaaggtgttttccattgtgtgccatagatgagctctgaaaagtcaagtatacattgaagttttgtaaatcgaatcaattttaaatgcactagagaactcaaaatttaaaagaaccttgtagtgagtctgtgttgcaaggactccatttgaaacacaggtattcagtcccagattcaatagtttcataaatttgtatttttctaagataggctgttcttaaattgattatgtgttttacactttttcagggaaaagtcattatgaatccaaaatcgtctttgttaatgtgaatgtaataaaatctagttattttcattgccacat

SEQ ID NO: 239654 - DNA, 357 bp, Homo sapiens
taaggaaatcacttaaaaatatattatgaggccagttgtggtagctcctctagccctttgagaggctaaggcaagatggtgaattgaggccaggagtttgagaaaaacctgggcaatagcaagtccccattttctacaaaaataaataaatgaataaaatttgcttggtgaggtggtgtacacctgtagtccaagctactcaggaggctgaagcaagaggatggcttgagctcaggaatttgaggctgcagtgagcaatgattgtgccattgctctccagcttggtcaacccggtttaaaagaaatatatatgtatattaatatagtaaatatagtgaaaaaatatatacatcgtga

SEQ ID NO: 239655 - DNA, 424 bp, Homo sapiens
tcagatgggcttgcttcacacaggatgctcccctcatttgggaataacttctccagggtttggcttggcccttttcctagggaggtgaacatgaggcagggtagtgggacagtgtatggcctgcatgactgcagctggctttgaagccacaactgatgctcatggtcttcttcatctactatccattctagagtaccctcagtctcagccaccatgtctgccgttctcagtgacctggctggtcgagtaacagacctttatccctgaggattgtttctgagcccatggtccccgtgcccttctcagactgtggaaattgcatgtgtccatttaccataaaaattgggcagggaattattaggagacattcaaatggatcacctgggtgccaaatatatccttctctgttcacagtgtgtaagaa

SEQ ID NO: 239656 - DNA, 354 bp, Homo sapiens
aaacaaagaaagtaatatggacattacttttgaagactagcccgtgagctctctttccgtaagatatcatcaacctgcctccctccatcagcttcactacagccattatcatgtctttctgtggtttcttcagtaaacttgtaactggtttccccatttctgttcttggtctcccctacaatccattctcaaaccagcagcctgcatttttaaaaaattatgctggccaagtgtggtggctcacacctgtaatcctcggaggctgaggcaggagaatcgcctgagccccagagtttgagaccgagacgagcataagcaacatagggagatcctgtctccataaaaaaaatcaaa

SEQ ID NO: 239657 - DNA, 546 bp, Homo sapiens
gaaattaccatttgctccgatgcctatagctcagtattaagcagacagcaggtagatgaacatgtacgaggggtctgtgctcacaggctttgtaacatcatcattctttctgggctgtctctcttttccagatgcctatgatttggtatttctcctggccagagagtagcactggaaacattgaacacaaagtattctaacccttattgctcaatgtgtttttccagagcagcccaaaaggttatgctgggtttcatgagctgcagaggatgactgactggtgccacctagaaagacaaacagcagaaactgcagagcttggactgagctcagacaaaaatctctgctgcttgtacccagcttgaatattatggccaacacttgaagaatagaaagcatcacttaaaacattttaattatccccacatgtaacatgggccctaaatgttctgaactgaaaacctcactatgtagttgaaggtcaatgacacaagtttcagatattaaaggtttatcactgtttcctgtcttcctattaaaaaaaat

SEQ ID NO: 239658 - DNA, 682 bp, Homo sapiens
tgctccgatgctgcggccgccaccagactggtgagcttcttgcctcatctcgcaccatttgaggctgtccaggagtaaggatctgaactacccccataaagtaggcagtctccatcctgccaccttggtccttctcaggctccagttctgtggcttctgatctgtgatgtgaggcttcccaagattggagccagcactgtgcacagaagagagcaggattagagaatgggatgcttctgatcctaggtcccttcagtaaggcttccacgactggcaagtctcctctggctgggccagacccccaggggagccaggcaccccgctgtgtgtgagacagaaaggagtgtcttctggcgagtggcacattctgctctgtcaacagcaaccagtgcaatttatgacaggcttcactggagcgtgttccaggatggagtatatttctacttggcctgcttgaggagtttaagcatagtggagacctgggcacaggaaacttacaagtgtggtggaacacaggggatccccatattcccacctttccttcatctccagaatgttatctgtcagctttgcttgtccaggctagttaggagcccctgagtcaatttccggcccaggaatgccatactttatagaatctgtgggacaaggggccctggaaatttctgaagtctgttttgga

SEQ ID NO: 239659 - DNA, 665 bp, Homo sapiens
gattaaaaaataaagggagaaaagttgtggtttgctacctttctagtggaggcatgccttgcatgtggtagatgataattagacatttgttgaactaaatgtgtgattatggctccccaaaacttcatcccagggaaatgatgataatgtgaataagaggctttcctccagtgggatacctagatgataagtagaagcctatatcctgtttttactcgattgagactttatccataccccttggaagttgtttaatttacctacacccgggctctttacctgcatgttgaaaacagtttggaatggacccaaagaaagttgttactaaggcctttcttttttctctcccagccagtcctctggaatgaggtgttcagttggcctagggttattcatttcttgtttccttcagcaaatatttttttgagggtctgttatgtgccaggcactctgctgggatttggaatacagagttgaacaaaagagcgataggacctatattccctgagcttttattgaccagtggactgtgacttttgatgtaattttatttttgagagagggtcttgctctgtcacccaggctggagtgcaatgcagtgagccgagaccacgccattgcactccagcagccagggtgacagtgagagtccgtctcaaaaagaa

SEQ ID NO: 239660 - DNA, 396 bp, Homo sapiens
cattcagttctaagtatgaattttttggcgagtatttattcctcttgattttctaaattcctcagttaacattgttatgccttctgtaaagttaaggcctgtgtgtgtgtatatctctgtatgtaatagagagatagcatggattaggggaaaaaaaagttgtatttgcatttgttgtttctgattcacagagctaggagtgcagtgttcatgtggagtccacagagctggaatatcagtaggcagttgctgtaagcacatgttcaattattaaaatagtcaacattttatgtctgatagccatagcgaggtcatgacattaatttatccaaagtattgtgggcaactgtctagaaaaataaatagcataaaggacacagatgccagagaactaaa

SEQ ID NO: 239661 - DNA, 336 bp, Homo sapiens
catcttcaatgggctagtctactggagtatacttcttccatcacttctagacagttgtggaataaatgcccatccttagatggaaagagggtggtagggttctaattattacacacctttaaaattatatgggagttatcaataagcattacctgtaactagagggtcctgcccggggattgccattctgcctccctttcttttatgagagtttgggtatggtgaggagtccagatggttaagggctgtccaaaggttagcttctctgtctccttcaggaggagggctgtagctgccactgaccagaggcaagatggcttgcctttagcaaccagg

SEQ ID NO: 239662 - DNA, 418 bp, Homo sapiens
atttaccaaaaaaatgctatactttcctctaaaccaatatttggacatataaatattttccaactgggttcagtttttgatatggccaaagataatgatatgttatttcaagactgtaagtcaaaataaaattgatttgaaatggtctgaattaatgagatgccttccatcctgtaagtttcaacattgtcatctcaagtgataagataatgatggaccgtttcttaccaaatattttattaattaactcacgaagcttggcctgttcagtcagtatagacactatgttccggtgccttggatgtgattagcaagatgtgattcctttaaataatgagctcaaaacacatattaaatttagaagtggtaagcttacaggaaaaagaaagatctgctgggagtgaataaaaggaaaaag

SEQ ID NO: 239663 - DNA, 416 bp, Homo sapiens
tgtaattatgactttgtactaagttatgcctccgtatgatgagctcttgtgtctctgaggtattgtcacatgggatttttagctttctggcctggctcagttttcctttggtggtagtaaatggggttattaacatacctagcataggattcctactctaggtgggattctactaataattcatattttgctcccagctgatggaatgtgtgttctcaaatatttcgtagacttctgatttattaaaatacttatttttgtagtagtagtcagctttatttaaaaaggaggtaaaattagccaaatatgatggctcatacctgtaattccagcactttgggagtttgaggcaggaggatcgcttgaggccaggagttcacaagcagcctgggcaacatagacctcatttctacaaa

SEQ ID NO: 239664 - DNA, 217 bp, Homo sapiens
cattaaaatgatgctaaattcattaaaacaatatatgtatagccaggaaaataaaacattagaagaaaatataataaaatattagtaatgtgtctctggggctaagttggtaattggtttcatcttcaaatatttttgtcctttccgaatactctataattataaattgacaaaaaagacatttttaatattacctctttgccttttcagaaccctt

SEQ ID NO: 239665 - DNA, 204 bp, Homo sapiens
aaaaaaaaaaaaaaaaaatattcccaggttgctccttgggatttttgcaggaggccaaaaatgggagcaggcctagcacagtgtctatctcattgcataaaagcttgaattgtttgtttgttctgtctttggtggggacagtgtgcccaagaaaaggaagaacatttcccaaactcagaaaaaagaaagcaaaggcatttggga

SEQ ID NO: 239666 - DNA, 425 bp, Homo sapiens
ttccctaggcttctccttccatcacattcaacaaagatgcgattgaagcattcactgtaatattggctttccctacacttgcacactctgctattctcctagatgactctcagactaccaatgcctccttcactattcttgctctagacagataatcttgtttctaattctctagaaaaatggaaacagagactttccacagattctcacaaccacatctatcccccaccagcatctgcaccacagattctgcctctgtgtacattagcttagataaacatccattttcttttgtcttttcaaggacattcttccagcaatttatctttctctctgctacatcatcaattttctctctatactgaatcattccttacttgggagatacaggcattcagttattttccccatctaaacaaaagtga

SEQ ID NO: 239667 - DNA, 600 bp, Homo sapiens
ctatgtatttggcatacactttgcccttaaagagcttataacaatataaaaataagacaaatactcaaaaaagtttaagataatactacatatgactaaaagaaagatggaatgtgttatgaaagatcagagaagaaagaacttatatccagctgagaaaatccttaaagagtgggcagaatttgctcagttgacgagaggaaataatatttcagccagagtgagagatataagaaaaggctttgcataggaaaggattaggaataacccagttcttgtttgtttacaggtggatggaaagccgatttccagtctttatgataacgccgatgttccacttgggaaagatactgtacaacaatgaaagtagccctttcttttgtctttcaaagaatgtatttttaacaaacagcctctgtgtgatccttttgaccacacaatttgtagagttaacgctgaaattttcattagcaacaatgaaagcacacacaggcacaatattaatatagattaatatcagcctattttggtcagaaaggctcatttaaatgtttaagagacagaagtcccaaattgtagtaatttcttccactagcagga

SEQ ID NO: 239668 - DNA, 540 bp, Homo sapiens
tcaaaaaaaaaaaaaaaaagaagaagaaaaagaaaggtgtttctttattgtcttatcgtctttcctggcatctcttacagctaggtgtacctatgtgactaatgtccaaccaatggaaagtaagtggaagcgttaggtgcgatttcataaagggagagtggtactcttttttgcttcttccacctcatgacagctcaaatgcagacataatggcaagactcaagccgccatattggagtgtggggtaaaagccactcactgaggacagcagaactggatagacgtctcctgagtccttgataattatggaggcaccacgctagccttggacagcctatctctggaatgtgtgtgaagtttgtgtttcataatgttgctgtaattttgggtgctctattactcaagagtgaatctaatcctcgctaaatcagaggtgtcacacgtcgtgccactactcattaatttggggcattagatttactttcaaattgttgttattctaaatagcataacatgaacctctttatgtaaaaaactcaa

SEQ ID NO: 239669 - DNA, 497 bp, Homo sapiens
tgtgaaagtcacctgtgaaaatcccgtaagagacctcacacttaatagtgaaaatctggatgctttcctcataaggtcagaaacaagtcaaaaatgtctgctcttggcttttctattcaacattgtatgtgaggtactagtcagagcagttgggaaagaaagagaattaaaaagcatctagattgtgaaaaacgatgcaaaactatctctacagcacatgttaatgtatatagaaaatcctaagtgatccactaaaaaacgatcagaactaataagtgagttcgtcaaggctgcaggacacatcagtgcacacaaatcagcaggatttctatacacttgcaatgaacaatccaaaaattaagaaatttcatttccaatagcatcaaaaaataattaggaataaatttaagaaaaatatgcaagacgtgtacactgaaaactacaaatgttgttaaaaatttttttaaatgtctaaataaatgaaaaaacagctcaaa

SEQ ID NO: 239670 - DNA, 405 bp, Homo sapiens
tgcagatactgaattgtctgaataaaaacagaaatatgaaattaactgaaattaaatagaagtaaagtggtaggaagaaaacaataaatagtaaaaaatcattgaaaggacttaataaaattgataaaagacttaaagaatttgagaaggctcaaataattttctagattaaataagggaaaaccattatggtttttacagatattaaacagataatgaaaccatattatgaatacttttatatctatatgagatagaaaattcttgaatatgcaaattaccaaattgcaatacaacaaacagaaatctgagtaacctctataaatataaactttgtaaatatggatgaaatgtctgtatgtgctaaagaaattgactttcctacataaactttcctacaaaaac

SEQ ID NO: 239671 - DNA, 439 bp, Homo sapiens
cgcccatgatcagctggttacaaaactcgaggaataagaagtttaatatttattggtctgcaaatccggagaccttgcggcctcactggtcctccttccctctgagctatctccacacccagccttcgatcagaaggagatttagaagcagagctgcccgcagcgaatacttttaatgcccgggccgggaagaaagcgggttaggatctgatcccgctgagtagaggacccaggagcctcccgccccgcgcgctctgtagcgcgggggcgcgctgcgcgctgcgcctgggcggctggcgggggcggcgtgggcgcggtgatgcaggtgtgacacccgccggcgcctgcctccgcccggatcgcccagctccgcgttagccggagctgcacgcggggctgccggggcggacgctgctctgcctgcatccggaggcggccg

SEQ ID NO: 239672 - DNA, 673 bp, Homo sapiens
ggtggggccccccacagacactgtccacctcctgtacctctggagttcaagactgagccttctcatgttctttatcctgcatatcagcacctgacaaatagaagggtagacaaacaagagtgatgcaggacaggcaagccctaaaattggggcttagcccaggagggttcatggcttcacccagaaagaattccagcaagcagcagtggtggtagccagcaagccgcagtgcacagagcagcagaggtactgctccttgtggagcagggctacccagaggcagtgtgcccagaagagcaacgcaggggcagggctgcactcatatggacatctacttttaattatatgcaaattaaggggtggattatgcagagatttccaggatgagggtagtaacttccaggtcatcaggtcgttgccacgaaaagggatggtaactcctaggttttgccatggcaatggtaaactgacatggcacactggcaggcatgtcatggaaagctgcttctgcccccctacctgttttagctagtccttaatttggttccatgtccgagccccgcctcctacctcaagaggactgaatcaaatgctctaaatcacttggttaattggcccaatgatagtaaataaattctatctccttatgcagaaggaagcccagatctttgac

SEQ ID NO: 239673 - DNA, 415 bp, Homo sapiens
caaaataaggttgggagaggcatacagctaacatatagctattaaaccatattacagaattagtcacaaaataacacagctctaaggagtgacatttgctttggtagtgaacgtggttccttaagtcactgagaaacaatatttattttattgcttttcacactcaggagtagcattttcatttattatgtggaaatttagctgagcttaaaagcctgatggccacaaagacttttataaggtggtacatctgtagagtgaagggggaaagaagatgcattgacagtaatttagttatttagtacagtcagctgaactaacacttaaatgagaattttgaggagtatattacttaagcctaaagataacattttaatggcttcctattgtgccaagtgcacttcttctgaaatct

SEQ ID NO: 239674 - DNA, 492 bp, Homo sapiens
ttaccacccagccgctgcgcaacgcgtgcttcccgcacagcaactgcgcagctccaatcagcctggaaccgctaaacggcttcggtctgagggctaatggaggttaaagagcaccgagtatccgacttacgtgcaccgaacttacagatctctcgccctgttctccctgctctaccctaccgaagccagttcccatcgcgaagtgcaccctcacctcttcccccaagcgacccccctcacacgcattcccttcaaattctcccggcatttgggccgctttgatgatcagatggtagagccctgattacaaatttattcccggccgctctgtccgtctttatctccgctattagggacatctgggagtgattagtgccgcacccgcgcccggccgcgctcgcctatcttgccgcggcggggccggagcctcgctgacgtcagggcagacggctcggagccatcccagccgagttgggtgtaatcggcggccgc

SEQ ID NO: 239675 - DNA, 326 bp, Homo sapiens
gagctggagtctcgctctatcacccaggctggagtgcagtggtgcaatcttggctcactgcaagctctacctcccaggttcacaccattctcctgcttcagcctcccgagtagctgggactacaggtgcctgccaccacacctggctaatttttttgtatttttagtagagacagtgtttcaccatgttagccaggatggtcttgatctcctgatctcatgatctgccttcctcggccccccaaagtgctgggattacaggcacgagctgctgcatccagctgagtgtgtttttaaatttccacatacttgtgtattttccttttt

SEQ ID NO: 239676 - DNA, 412 bp, Homo sapiens
acagacatagcagagctgacttttcagctcagcatcccacgagcctgagatcaaagtttgggctgggctgggctcctgtctggagcttggggtcttccttgaacctcacacagttgttggcagaattcagtttctgtggttgtagggcccaagccatctttctcccactggctgtcaaccaggggtcgcccccagctcctagaggctgcccaaagttccttgccatgtggatccctccacaggtcccagtctctctgaattcttctgtccttgacctctagatctaaatttaaagggctctgatgacgaggtcaggcccacacagttcatatctttgattaactcaaagtcaactgattagttaccttaatcacatctgcaaaatccctcttgccacgtagcctaccataac

SEQ ID NO: 239677 - DNA, 1830 bp, Homo sapiens
  misc_feature (1768)..(1768): n is a, c, g, or t
taaactatggccaaacagaaagctcagcaggccatgtcatggagatagaccatgtagacataggccaggctggtagcttcaccttacctggccttagtttcttcacccataaaataggtcatatcacgcctgctgtagtcacttctgaagggttcatctgtatggacactgatttaatgactgtaaagttgtaggtaaaatgtcagctcattagtacgactgacactttgtgtgtcccaagcatattcctggccctgggggaatgcaaggttgttatagcttaaagtaggacttcaatgagctgacattccaggtgcctgggagggctgctgcagtggggtctgaggagggctggggatgagtagagagggggcacttaagagagggaagtgggctggggagagtagaagggaaagctgaccttgaaagctgcagttaggtaggcattggcattccttccacagtattttttcaggcactgctctaaactctggggatgcaaaagtgagcaaagcagacatctctgccctcctagaatttacattctagggggaaaggagacggataataaaccagctaaaaaataaatctttgttcagatggtgataagggctagagagaaaaataaatcaggaaagatggatgggacctgaagctcaccaaatttgagtctccctgcctctcccaaatatatattgaatgaattcaaatttaagttcagggcctaggaaggggagcattcaggaacactttttttttttttttttgagatgaagtcttcttctgtcacctaggctggagtgtagtgacatgatctcggttcactgcaacctctgcctcccgggttcaagcgatcctcctgcctcagcctcccaagtagctggaattacaggcgtgaggcactgcatggcctctggggcagttttaaataaagtgagaaggcatcagtgcagtggagacttagaggtgagagggagccatggctccctgggggaagccccctgggggaagagtgttccaggcaggggaacagcaagcagaaaaggtcctggggcaggtgtgatcgggaacagcaaagaagccagcacgggccgggcacagtggagcgcacctgtaatcccagctactcaggaggccaaggcaggaggattgcttgagcctaggagtttgatatcagcctgggcaacatatcaagacctcatctctattaacaaattaaaagaaaaaagaggctaggcgtcgtggctcatgcctgtaatcccagcactttgggaggcctaggcaagtggatcacctgaggtcgggagttcgagatcagcctggccaacatggtgaaaccccatctctactaaaaatacaaaaattagctgggcatggtggtgggacgtctgtaatcccagctacttgggagactgaggcacgagaatggcttgaaccccagaggcggaggttgcagtgagccgagatcatgctactgcatgccagcctgggtgacaaagcgagactccgtctcaaaaaaaaaagaaaaaagaaagaaaaaagaagctagggctgggcgcggtggctcatgcctgtaatcccagcgctttgggaggccgaggtgggcagatcacaaggtcaggagttcaagaccagcctggccaacatggtgaaaccccatctctactaaaaatacaaaaattagctgggcgtggtggtgggaagcctgtaatcccagctacttgggaggctgaggcataagaatcgcctgaacccgggaggcagaggntgcagtgagctgagatcgcgccactgccctccagcctgggcgacagaatgagactccatctc

SEQ ID NO: 239678 - DNA, 415 bp, Homo sapiens
agtgggcttttggggtggggggtgggggtctgtggttttttgttttgtaagtgggaagaggtgtgattcctgtatttaggtaatgagtagcagttcttctctccctggtatatttatccttcttcctccttttgattatttacatcacatagcgttaattgctgaaatgaaaggatatgggtctgtgtaattgaaacatttgcttttatttgcagtaatcatttgctacttgtgatcccatttgagatatttaatgctaatctgtgctttgccttggctttctgctttgtgttgttctgtcttgcttttatgttttttgttgtcttgcaatccctcatttcttcgtttgttttgtgtttttttttctccctcatgcttgtcgttgtctgcacttggctttgattgcaaaaaaaaa

SEQ ID NO: 239679 - DNA, 327 bp, Homo sapiens
aaccctggaatctatcctccccaaccccaactcaccgggcccggggacccttgtgacttccttctatccctctatatcttctccctctgcaggcccagcctggggccggagccctgccttctcccacagagtccactgagcggccatctctggattcctggagtccttgatcttgtcgtcactgcttttagcattgaggtcctcaccttgggttttttctcaagcaccactgggaaactgtgttctagagagtaagaaatgtctaggacagccttgttatgagaagcatgtttctgtaggcaaaagtgacccttttcaaatggagca

SEQ ID NO: 239680 - DNA, 833 bp, Homo sapiens
aagtgcttatatgattacctataaactatcatagttaaatgactaaataccctgcataaggtaaaatgattattttattcctatagattgaaattgcccaactttttattagagaataatagattagagggcatgttggctcatacctgtaagcccaatgctttgggaggctgaagcgggaggatcccttgaggccaggagttgaagatcagcttgggcaacatagcaagaccacatctctacaaaaaaatttaaaataaaatgtttatccaagcatagtggcactcactcacctgtagtactagctgctgaggaagctgaggcctggagttcaaactgcacaacgctgcacttcaacctatgtgacaaagtgagatcctatctctaaaataattaattcagtttttataattagggaacatttaaattcagattataagtaaaaaatggaataaacagtcctgttacctgatatggtttggatctccatccctacccaaatcttatgttgaaatgtaatccccaatgctggaggtggggcctggtgggagatgattggatcatggtggtggtttctcatggtttaacaccatcgtcccctggtgctgtcgccgtgatgatgaattctcacgagatctggttggtttaaaagtgtgtggcacctcccccttctctcttgctcctgctcctaccatgtgagatgccttggtccccctttgccttccgccatgattcagagttctctgaggcctccccagaagcagatgctgccatgctttctgtacagcctgcagaaccgtaagccaattaaacctcttttcttatacattacc

SEQ ID NO: 239681 - DNA, 636 bp, Homo sapiens
atgaatgaaaaaaattacatctttagaaaaagagttattagaaaaaagccttggcagcgtcggggggaagtgacagcacagaagagaccagagaatagcttcctggaggagaccctgcactttaaccatgctgtctggatgggtacagtgccctcttctgcaaagagttcacttctatgctttttctgtggttccatttcatagaaagatttggggcgatgtttcttttcccttaactttttattttaaaaacttgcaaacacagaaaagttgataaaatcatacagtgaacatctgtattctattcaactggattcactagttcacattttgtcatatttgtgttctcttttccacatatggaagattgtatatttgccctttttccccctgaatcatttcaaagtaagttgccagtatcatagcatttcactgttaagtacttttgcagatatctcctaagaaccaggatattctcctatataatcacaataccattaatccacccaaaacatttaacatcagtacactaatgatacctactgtatagattataatcagcttccttgcagtaatctgtttagaagacttgcatcctgtcactgtccactgattaaattttgaactcttaacttg

SEQ ID NO: 239682 - DNA, 647 bp, Homo sapiens
acctactcaggaataactaaaactctttcttttatccagtatatagaaatgagattttgcatttccgaattaggacagcctagatacagatgacatatgtataaagggtagaatttggaattctgtaattgctagaccaagacgacattgtttccatgcatttcctttgcatagcactgaggagggttgtctatggtgctcaaccccctgcttgccaagaaagcattgctttattatagaatgatggcatattacaacccaaagtgaaagactgtcctcattggtgtgtgttgtataaattgtttgcctaaggcctttatctacacaaaaagcaaacaatttgcttggttagttttatatgcctctttgaagtggttaacttggaatgaataaactgctagcaagttaaatcagtacctccactagataaatacttgtttgataacggcaaaatcacatctctactcatcatcctttaacctgctgttaagtgtactaccatgggattagcggtggagttcatggatccatggggaccatgagctcccagtattccccgtacaggaacaatactgggactgcaaaatggccagtgggtgactgccagattacttcttttaaggaggtttttaaaaacacattatccc

SEQ ID NO: 239683 - DNA, 342 bp, Homo sapiens
ggcaagggggaagcttgccacttcagtttcaatcaaaagaaaagctttgtcttataattttcaaacttcattttgctattttttgtttctcttttgctcactggtagattttttggtaacccatacccactgttaaagtgagaagcagaaaaaagaaactgtggatctgatgatttttttaaaaaactgctttcttctccaatgagaatcttatttttgaaaaaaaaaatgactaacatctccccataggagatacattcaagaaaggagaaataagtttaagagatctattgtacaacatggtgactaaagttaataatagtgtcatgaattcctggggta

SEQ ID NO: 239684 - DNA, 431 bp, Homo sapiens
gagcagaaagactgtcttatttagttttactcaatgcttaccaagctgaatttctaaaagcctagagagatgaacaattcagtacaattccttgaataatatacaggagggaaagtaaaagtgtattcggggaatggcaagttgtagagtttagctgaagcattcatggagaagagcaatgggaaacaaatctggaaaaatagccaggaacaagttttggaaaagagcatgtatgatagtttaaagagtgggttttatctaatgggaaatagaaatagatagaaggcagggctttgaaaagactacgaggaggtaggaatggattagagaagagataagctagttatagagaagtatagtgaaattatatttcaaaggtccatggcttgaggttataagggcttaattttaatttgtggtactgttaaaaa

SEQ ID NO: 239685 - DNA, 1478 bp, Homo sapiens
taacaatactgtatttttcagacttggaatgtggaaatttagcaatttgtacaaaatatatacagtttcaatagcaaaattaaatttattgctttactctattttagaaaatcaaatgactgtaagttgttcagctgaaatgctgttatgtatttaattacaacttggtgcagatacagtatattctcatcaactggaaggttattttgcaaaattccttcaatttcactcagtagctctttttttcttaatttgcaaagtctgctatagctatccaaattaaggtaccctttaatatgtactccttaatctggtaaatgtgatcagttaaaattgtcatctagatagcaataaagagtgatatgcttagagatagataatggattatttaaaacctgaatggtttatagagaagtcattataaattcccctcattttgcaggtgtaacagataaccagagaagctgtgtgactcgtacaaatttattcagtgtaataatatagtaaattcatgttaacagttggattaaatcctagctctctcttattccagtactatatcacttttaaaatcctgagcagtatgtagtaagagtatatcacagaatctttcattcttaaagagtttgcattggatagaattaagtattttaagtttaacatatttgaaaaatgccccccatacattgttattccaatagtaaggagcagggaaatatagcatcatttgctaaatagaggagatagatcttgaactgttattttttatataattaaaactgctattaaatgtgttgtcagtatttaacatttagttactgtctcattaatatttaattttgaggatgtacttgcatactgttgaagttgagtgctgttttgctgttaatgctgctgctttgccaatgaagaatgaaataaatttatctgaatgtatcaataactttaaaatggaatgctgcacttttaaaatatggtagattattgacatttgcaagaagaatgtattgaggtctttggaaatgcccaaattctttgccacctataattaaaaattgtctgaattttctcctcagtataaaggagtgaatgccctacttagtgtaattgtatcaagtgaagtcaaacatcaacaaaagaacagtaaagtctcattgcaaagcagatactgggcctcaagggtgggcttaggcttaaactagattatctgctttcatatactaatgttttcatttcaaaatcatgtgtccccaaaatattgcaacttactgaatattttagatctcttgggttacttaaatatgtgtgaaaaaatcaacattgcatctgcaaatcccagtgtttactgtatatgcaattgatttatcctgtttgtgcttaatataagtgttcctgagatgttaacatttcaatattctctgattcctattaacatatagatatataaaattaaatgtttttggttaaaatatattaat

SEQ ID NO: 239686 - DNA, 387 bp, Homo sapiens
atcacctgtggacttgctggaattgcagaatctcagaccttactccagacctactgaagtcggtatcggcattttcacaagaccctcaggtgattcgaaatatacattatatttatttttaaatttctttctttctctctttctctctctctctctctctctctctttctgaaagagtctgggtgacagagtgaaactccatctcaaaacaacaacaacaaaaaccaaaaaacaacaaaaaaataagtaaaggaaataaattcctttacctacccagtcacccaagcaggtcccagagtgccctttccttttccctcctcctcccgcctaccttggcaagctgtgttccttccaaattctaaataaatcaccaaatgaatgaagaca

SEQ ID NO: 239687 - DNA, 451 bp, Homo sapiens
cctgtatatatgtatttatttttgggaaattttctctaaggaagattttttttctctcccttatttatttggtcatctgtttctatcattctggattcgtgaataattattaatttgttaattatacataatcccacatcttttttttggagctattgcttactttctggtacaaggtagtataggcttatcttgtattctccctgcaccagccttacttttagccattttaataaggagcccgggtactttttattgaaaaatacatttagaaaccatggtctgagcactgagtgcccttttagttactgaggtagcactgattctgtacctcctaaacagaaagctagaaaatatatgtatgcatagtaatgtttggatctatttaattatttttacatacacatgtatgtagctatgtgtccattaaagtaaacatgaatgtacagtg

SEQ ID NO: 239688 - DNA, 728 bp, Homo sapiens
gtcttgaactcctgacctcatgatccaccctcctcggcctcccaaagtgctgggattacaggcatgggccactgcgcccggccaataatttttcttttttttgtgctaatcatactacattttctttagaataaaagatcacatacttcagtttgccattcgcagtctggccccattgtgccattctagacttacctcctgccactccccaccagctttgttttgtcttagccacacaaaataatctagcgtctctaaccagtcaaacattttaccttgtgccttggctcactctgtgccttttctccagaatatctttctgtgtacttttctcccatccttttacctttaaacctgctgctatggtttggatgttgtttggcccctccaaaactcatgttgtagttcaattgccaatgtaatagtgttgggagatggtacttttaagaggtaattaggttgctaagatggattaacatctttctcttgacactgagactgggttctcctgggaatggttagttcccaagagagtgagttgttataaaacaatgctgcctcttctattttgcgctttttgtttgcacaaactcggtccccttctgtttctctacgatgttttgatgcagcatgaggcagtcatgagaacccaccagatacagctgcctgatcctgaatttcccagccaacagaaccaagtgctaaataaaactctttttaataagtta

SEQ ID NO: 239689 - DNA, 264 bp, Homo sapiens
ggggttgagatggtcagttttatattcattcctgaaaactgaagattacttttgccaaggactgttgataggaacttaactggaggctttaaaaattaaagaagaaaaacaaaacactgttaggaattttgttacagaataaatgttaatgttttttaaatgttaaaaatgagtcaaagtccaaactcttcctctctattttactttatgtaaatcaaatgaaagggaatggtttttattaaataaacttttttttaaattaga

SEQ ID NO: 239690 - DNA, 378 bp, Homo sapiens
aaggaaggtggtttctgggtaaaaatcatatgaaggagcatttagtttcattttcagtgtttttcttctgtagcttttcataaggaatggttaaataattgtaagttttactgtgtatagtgtattcacaccacagacacacacagatcatttgagttcatctacttaaaattcttttagaaaccaagtcacagcgaagttaatgtcacagtctaagttaacatagcttgtttgtacagagttgggactgagaaaatatcttgtttcaatgcattgccagaatcctgtagcattttgtaagcagattaatttcttcaaataaatattttaattggctctctgcttgcttgtttttttttaacagaaatatatctacct

SEQ ID NO: 239691 - DNA, 520 bp, Homo sapiens
gccgacagaagcggatgtgatgttaaatctgtgagtctctaaggagaatatattggctgctcttaggaaagcattggctttacttgtactcttgaattacagactttctacaaggttttcatttatttgaaattgccaatatatcaatttcaggtttttttttaataatgaaactgaaattataattttatagtaagggaaaatgctagctggtttctgttagaaaatgattttttggcgggacatggtggctcacatctgtaatctcagcactttgggaggccgaggcaggctgatcacaaggtcaggagatcgaaaccatcctggccaacatggtgaaaccccgtctctactaaaaaatacaaaaattagccaggcgtggtggtaggggcctgtaatcccagctacttgggaggctgaggcaggagaatcgcttgaacctgggagatggaggtggcagtgtgctgagattgcgccactgcactccagcctggtgacagagaaaggctccatctcaaaa

SEQ ID NO: 239692 - DNA, 460 bp, Homo sapiens
gccctgggaacacatatactctctgtgcaaggctgtgaagggtcatatgcctttgttcaatagctatggaaagtatgttgtgaaactttactggatggtaagtccattttcgtgtgcataaaaactcatgagtctttcatattgaaatatacttgtcctggcatggtggctcatgcctgtaatcgcagcactttgggaggcaaaggccaaggcagtggatcacctgagatcaggagttcgcaaccagcctgggcaacatggtgaaatgctgttgctactaaaaagacaaaaaattagctgggtacggtggtgggtgcctgtaatcccacctactccggaggctgatgtgggagaattgcttgaacccgggaggcagaggttgagtgagttaaggtctcaccattgcactccagcctgggcaacaagagcaaaactccaaaaaaaaaaaaagaaagaaaga

SEQ ID NO: 239693 - DNA, 441 bp, Homo sapiens
atgttgcccaggctggtctccaactcctgggctcaaacgatcctcctgctttggcttcccaaagtgctgggattataggcatgagcccctgtgcctggtccatctttattttaatgaatcggcttaagcatttatggggttggggggacaaggtcaaaatctgcagggcaggacggcaggctggagacctaggttacagtggatgttgcagctcaagcctagagtccttctgccagaggccctccaggccttcgactgattggacgaggcccacccatacgttggagggtgatctgctttactcaaagtctactgattttggcctggcagagtgactcacacctgtaatcccagcattttatggggctgaggcaaaaggattgctaaagcccaggagttcaagaccagcctgggcaacacagtaagactccatctctacta

SEQ ID NO: 239694 - DNA, 269 bp, Homo sapiens
cgagtttcagggggaaaaaaagaaaactgccttctccaccgctgcttcacagcaggaggcccgggtcacagtactggcattctggcactggtggctgcacttctgggctgaaattagacagcatgctttttaaattgcagctgcttctgactaagctgcatgagggtaagtcatcttgcctcaaagagaagagaaaattgccccctttgacccactggattctttaggcaaccagagactttgcagaggtatggggatgtttttccatg

SEQ ID NO: 239695 - DNA, 781 bp, Homo sapiens
aggtttggataagatcttgacatagattatctcatttaatcttctcagtaatcctatgagattaggtggtggtattcccatttttcagataaagaaaataaggctcagaaaaataaggtaacttggccaggcacagtggctcatgcctgtaatcccagcactttgggaggctgaagggtgtggatcacttgaggtcaggagttctagaccagcctggccaacatggtgaaacccgtctctacaaaaaatacaaaaattagccaggtatgttgtcacacacctgtaatcccagctactcgggaggctaaggcacgagaatcgcttgaatccgggaggcggaggttgtagtaagctgagattgtgccactgcactccagcatgggcgacagagcgagacttcatctcaaaaaaaaaaaaaaattaagttaacttgcctaaagagatacagccagtaagaggcaaagtcactgtttaaactcagacttcctacagatttctcagctctgtcccttactcgctgtctctgccaatattgccctggtttagacttcattgactttcacctaaactattacccaagcctccctctaccttctttctctgatccaacccccttaaatctgttcctatatccctgccagagtgatctgcctaaaaatcaaatctcactttttactttttatgattctgaatttctgaagctttgaaagttctgtgttaacttttgtaatgtaacaagtgtttttatagtcagagtacacatcgcaactggttcctcccc

SEQ ID NO: 239696 - DNA, 269 bp, Homo sapiens
agaggatcttcaaagcaggccgagagaattaaaaaaataatggaattagagaagccacgcggagagcaggacggcggcttcggcagctcaggatccacccccttaaatctgttcctatatccctgccagagtgatctgcctaaaaatcaaatctcactttttactttttatgattctgaatttctgaagctttgaaagttctgtgttaacttttgtaatgtaacaagtgtttttatagtcagagtacacatcgcaactggttcctcccc

SEQ ID NO: 239697 - DNA, 501 bp, Homo sapiens
ctattatcagacgttaataccccaccctcaataattgacagaacaagtaggcagaaaatcaataagaataataaagtagacttcagcaattttatcaatcaacttgacccgattgacatttacaggacattgcatcttacaatagcagaaaatttttcttgagaaaatggagaaacaactcaattttgtttcttgagaaataacttgagaaaaatttttagctgttcaaacaaaaatcatagtacgggatttataatatatgtaaaagtaaagtgggttaagagtttttcgcaagtacacatggaacatttatagagatggactacattatagaccatttaaaaagtctcaaattcaaaacatttgtcacataaagtatgttgtctggccacaacggaattaaattagaaatcaatagcagaaactagaaaagagaaaaactcaaagtaagcagaagaaaaggaataataaaggtcaaagtgggacttaatgaaattttta

SEQ ID NO: 239698 - DNA, 401 bp, Homo sapiens
cagagtgttgatgtactaggcatgtatcttaacattgtgccttacatcatgtaagtgtccagtcagttgcaatatttctcttcaaattcatagatgtctttcagtattcaagttcttaaaagtgttgtgggccaggcccacgcttgttatcccagcactttaggaggccaaggcgggcgaatcacgaggtcaagagatcgagaccatcctggccaacatggtgaaaccccgtttctactaaaaatacaaaaattagctgggtgtggtggtgcatgcctgtagtcccagctactcgggaggccgaggcaggagaatcgcttgaacccgggaggcagaggttgcagtgaaccgagattgcaccactgcactccagcctgggtgagaaagtgagactgcgtctc

SEQ ID NO: 239699 - DNA, 435 bp, Homo sapiens
ttctgttgagggaggcttattgtaaacacatgaaaatataatgtaattatatggtttggagttgtgtccccaccaaatctcatgttgaattgtaatccccagtgttggaggtggggcatggtgggaggtgattggatcatggggttggatttctcatgaatggtttagcaccatcccccctgtactgtccttgtgatagtgagttctcactatcatcattttaaacgatgagatcccatcgtttaaaagtgtgtggtacctccccaccctctattttgttcctgctgccatcatgtgagacacctcacttctcctttgccttccaccgtgattggaagattcctgagacctccgcagaagctgagtagatgccagcatcatgcttcctgtacaacctgttggaaccgtgagccaattaaacctcttttttaatat

SEQ ID NO: 239700 - DNA, 432 bp, Homo sapiens
gctgtttaaggaaatacaaatgagtggaagaaaaggaaagctttttctgggaattaaagagtaaatcaggttttgttttattttgctttgttttaagagttctatacaatataaatagaaaatgggtgagtccccatagtcacttgtttggctctaaatcttatccattctattattactcctgagaaagctttgtagttgtcatgttactcatgttttaatgactgagaagagttttttcattggtacttttaaaaaatttaaataaatacaaattgatttttgtgtttggtaaactatgttttctagggtggtgtttttaaatgtagtttaatttttaactctgttttaatttgtattctcaaccactagttagcagaaaataaaatatctgtaagtcagataataaaaaacttaaatgaactgtaaaaa

SEQ ID NO: 239701 - DNA, 229 bp, Homo sapiens
caaagctagtcaatggtgataaaaacagaaaagtttttatctctgggatagaaattgattggaaaggagcatgaggacactttcttgagtgatggaaattttttttataatcatttcagttactgttgcactggtgtatgcaattgtcaaaatgtaccaggatgtttttgtattaatacttgtgttttactctcaattataccttaataaaaagtgttactaaaaatta

SEQ ID NO: 239702 - DNA, 504 bp, Homo sapiens
ggaagaatggttaaaagaagtggcaaaatgaattactccacaaacaaggaaaaccatgaatacaagagtatttgttaaaagcaaacacaaaagccaaacacatgacaaacagtatctgtaatattaaattaaatggtgaataaatataaaataatcaagtaaaacaaaaaagtagacaatgttgataaaatacttgcagtgcattagaaacagagccaagccacggtatggtgaggaccgattttgcttttctgtttaataatgggcctgtgaaaattccagagaaagtcttgcattagcatgaagatgcaaagcagcccctccttcctgcagtccatatactcagccctcaagacaggcagaagggaaactcctaggcacccaagcccagggactgatgagaagtgggagacctctgggcaggagacaggaggagtggttcttcctctccaaggggtcctgggctctgggacccagcgagggatggaagccagtcagcccggc

SEQ ID NO: 239703 - DNA, 313 bp, Homo sapiens
ctgcaattttgcatttgggcctgagagaagaattaatttcctagataccgtttctctcctttagggaggaccaaaagccctgcatagtggtttcttgcagcaacaacaaaatgcctttttaaatgtgcaacggaggtgtatgtaattgctaatccacagccacaccgttatctctacctgtgaccaaataacaataaaataattgactttgtagcatatatgttaccgaaaatggggacattattaaaataaattcagctttctttcccccaatgaactctctttaaccattaaagagatttgttatgagtct

SEQ ID NO: 239704 - DNA, 369 bp, Homo sapiens
gttgcagtgagctgagattgtgccactgcactccagcctgagcaacagagcaagactccacctcaaaaaaaaaagaaccaataatgtttcaaataaaagtcataaaaacgttatcttcaagaccaggtgctgtggctcatgcctgtaatcccagcactttgggaggctgaggcgagctgatcacttgaggacaggaatttgagaccagcctggccaacatggtgaaaccctgtctctactaaaaatacaaaaattagccagcatggtggtgggcacctgtaatccctgctactccagaggctgaggttgcagtgagctgagattgtgccactgcactccagcctgagcaacagagcaagactccacctc

SEQ ID NO: 239705 - DNA, 432 bp, Homo sapiens
gcttgaagtatcctttcatggtagagagagagtggcagcagctggccagtgaattccatagtttgcaatttagatgtctttggtgatggcactgggtgttccggtgaactttctgagcagactgagtaggaggcacaaggactatccgtacatcatctgctgtgatttctctgaagtttatatcaagtcttccagcgtcagcttttggggctttggggaaatggcaggttttagttctttgtcatgccaactcagggggtaggagaaaactggaaatgttagcttggagcgtcgtagccagatattggaggaaaggagaggaactgagaacccgcaagcgtgcgccgtagttttccacgggagcatcatttctctgtaccgttgcttctctcttgattctcagttacaaaataagtctggtttcattagaaa

SEQ ID NO: 239706 - DNA, 528 bp, Homo sapiens
ttaaagacagtctcgctctgtctccaggctggagtgcactggtgcgatgttggctccctgcaacctctgcctcctgggttcaagtgattcttctgcttcagcctcctgagtagctgggactataggcatgtgccaccacgcccagctaatttttgtattttaatacaaaaataataatacaaaacaataataaaacatgtagcctaccacacacatagaacacccataggcacacatagaacacacacacaaatacataggcacatctacacatgcacatacacatggctaccacacgtgaacacctgcacacagacatgcatgccccacgtgtgtgtacacaggcacgcccagcctgcatgcaaatggacacatatgtacacatgtgaacacccccacaaatgtgaacacattcacctgcacacatacatgcacacatgtctgcattcatacatgaatatgcacatgcacactgacatccacatgtgtgcacacatgtacacccttatccccttctgtttcataatg

SEQ ID NO: 239707 - DNA, 546 bp, Homo sapiens
aaatttagacagctttgagatgtgttgtacgccatctcccagatgtccccgacaagtctcagtcccagttgccaacaatggtaacttgctcatgagcgtatcggcttccttcccttctgtgcctcacttcactatttttcctctgtgcttcctgggttcacctccctaataaatttcttgcactcaaatctttatctctgggtctgtttcttggggaatgtaaactaagacaaaggcattttacaatcttttcccacctggttctttccattaagcatcctgaacctcctaccatgaactcatctttcattggccaaaggcataatgctctgatattttatatccttctaacagcctttccctctgctggaatgcctttctatgcctgtacaactggctactctgctttcaagacttgggtcaaatgcctctctgaagcaagttgtcttcccagcctaggtcagatacacattcttctgtgttcccatgcaaggtccatatatttctattgtggtggactatttccaaagatggtcacaataatct

SEQ ID NO: 239708 - DNA, 568 bp, Homo sapiens
agacatttgggatgccacattccagaaaactgtcataataaatattcaaatttataatgtctatgatgtgactggctccccctagagttgtgcagtgtacagcctgcccaaccatatgggagagtcctgtcttggtcagtttccatctcattgcatctctttgcattaagaacttcccccttgtggggggcactactctcagttgcaaccttaaattgcagtattgattattgtctctttaccctcccatggtgtatatagagactctgtctggctttatctatgtttggatccccaggacctagagtagtgctttgttcatacaaatcatttagtcaatgcttgaaaagcttttgcttctacactgctctcaaagtctccctcaaagagctctttctctgtgtgtctttcctgacctccctatgctccctggacccaggatgttccaattgtaacacatatcacaaagtatggccattgcctgttttctttcccctattttattttaacccacccatcccctaacacaccagtaaactctaagctcctttagaggagggggcatgcc

SEQ ID NO: 239709 - DNA, 514 bp, Homo sapiens
agacatttgggatgccacattccagaaaactgtcataataaatattcaaatttataatgtctatgatgtgactggctccccctagagttgtgcagtgtacagcctgcccaaccatatgggagagtcctgtcttggtcagtttccatctcattgcatctctttgcattaagaacttcccccttgtggggggcactactctcagttgcaaccttaaattgcagtattgattattgtctctttaccctcccatggtgtatatagagactctgtctggctttatctatgtttggatccccaggacctagagtagtgctttgttcatacaaatcatttagtcaatgcttgtgtgtgtctttcctgacctccctatgctccctggacccaggatgttccaattgtaacacatatcacaaagtatggccattgcctgttttctttcccctattttattttaacccacccatcccctaacacaccagtaaactctaagctcctttagaggagggggcatgcc

SEQ ID NO: 239710 - DNA, 93 bp, Homo sapiens
tcttgctcttcccctttcctgaactccctttccttagctctttgcatgatttatttcagattatactagagactgcagattttaattcctttt

SEQ ID NO: 239711 - DNA, 651 bp, Homo sapiens
cagaaagggaacctgaaagcccactcccccatcagaaggcattacagggttccctgggacccctgcaggtgcttgggaaacaggcagataaggcacttaggagacattgtgggtcaggagtgaccctatgggtcaggctttgaggatggaagcagccagcccttggcatagtgttctcagacagactcagcccaggagcgggtcgtgaaatcaatttggtggggtgtgacctgcattttaaataggaaattagaatcacatcacccttggtaagggtaagttttggtttgtgtgtgctaggtcatgatgtcaaaagtacttctgactgttggtcacattaaaaaaactgaggcagggtgcgatggctaactcttgtaatcccagagctctggaaggctgaggctgaaggatggtttgagctcaggagtttgagaccagcctgggcaacatggtgatacctcctctctacaaaagataaaaacaaaattagccaggcaaggtggcagtggtgcttgcctgtggtcccagctactcagaaggctgaggtgtaagaatcacttgaacccgggaggcggaggttgcagtgagctgagatggcaccactgcactccagcctggaagacagaatgagacttggtcccctcccccacc

SEQ ID NO: 239712 - DNA, 506 bp, Homo sapiens
gtgattatgaggaaaaatggggaatgtctgagtgggtgaaggaaaaaaaaagtgcaagatattactagaaaaacctgactgcacacacaatcctatcccctacgcaggagaaagaccgagtgctagcacccggggtgtgaaagcctgcaccaagggacccaggaaccaggcgtgcctccatttctcactcgatttgtttacaatgaacggacggcgccggagtccctccgccctcagctcaggcccggttcccaccgcccgacgctggctggccgaggcaggggcgcggcgggggatttcgggcagggcggtgaagcagggcctgctctacagggggcttttcttcgccgcggtttcttcccctgtcgctgcccggcccccacctcctctctcctcccgcgcgcgctctgcccgccgcccacgcgcggaagcccgcggccggggagggggcgccgtctcccggcatgctcggcggcggtgccggtcacgtgacgggaaggcggccg

SEQ ID NO: 239713 - DNA, 273 bp, Homo sapiens
gattggaaaatggtttaaccaaaaagagaaaagaaaaaaaaaagccaaggaagtaaaacaccttatttaccaaatccagtgacaaatttctgtctcactgtttcattattttaacttcacctaaaccatagttttaagtaggtggagggatgagaaaaatcttagttcagcaccttgtagaccttcaatatgtgtgttttaaatgatttactgaaattatagcacatggtttgaggatgtttatttcatgtgaacccatattttaggcattag

SEQ ID NO: 239714 - DNA, 482 bp, Homo sapiens
tatgttctagtaacccattgtaagtcgaaaatactgtgagtcaaaaatgcatttactaaccctgctaaacccactgtgaagctgaaaaatcataaggcaaacattgtaagttgggaactgtctgtaataattaccaaatccaatcccattgctttctatctcttcttaacagtctgataatcctaaagtaaatgatttaaaggatttggacatcctttcaaaggtctttcatctttctcttgtgagtatctagttgctttagagaaataacttgagaagaggaatttttctaatctttggagaagacctcatcaaaaactgtcctaattaagactatccagaacagaacagacccgggggctgatctgtggtaatttccaggagaagttctcaggccatcaggcttcggataaagaaaagagaggaggcagagatagtgggtgatggagtgagagaccttgtggaaatgtgaggaaagagag

SEQ ID NO: 239715 - DNA, 410 bp, Homo sapiens
gcgccccagccccgctcaggccgcgcccctgccacctctggccacacgggctgagacgtctggctcctgcacagcgcacttcccgctgcccttctccactggctgctcaggccctgcctcgccagcacggcatccgcgggggatccctacctgtcctttagggcttgcctcataggtcaaacgtcacctcccagggaggtatggcctgccccctggccaggtgggccccttccacgctcgcctgcaacaccacccacccaccttgataactgcttgtaaaggttgtactgctttcccccttgagactgcaaaccttcaagggcaggaaatgggtctgttttcctggcaaaataatgaagttggcttaaggttttgctgaataaaatgagtgacagacaaaagtagccaaa

SEQ ID NO: 239716 - DNA, 598 bp, Homo sapiens
tccccaaacctaaaagtaaaactttctaccactggggcttcagatacttttaatactacttatttgaatttcattatttttattatagtttattattgtcttcatagctgagtactcttaaaattactgtttattataagtgaatgtcttacagaacaaactcaaagtcaatgcttcttttgcatgtgaataatcaagctatttttttgtcatcattactttagtaagtaacattattttatatgaagaatagagtgtatatacataaacccatgtgccagctgccattgcactgcctcacattttcctttagatgtttgagcatagttttaatgactgtttgaaatctctgtctcctagttccaaatatgggtcatcttggagttggtcttcattggtgccttttctcttcagtatgagtcataattttcctgtttctctatatgcctagtaaattagaattttattctagatgatgaataatgtgtggcagagattctggattctgttacattccatcaaagagtattgatattttgtatatacatttacaaatgtacatgtacacaataataaaaataatttttttctcagacct

SEQ ID NO: 239717 - DNA, 581 bp, Homo sapiens
taatagttgtcattacaactttaacatattcttatgtttctggccagtatatcctgaacaagcccagaatgctgaaatccgatcacccctctctgttacttaggtttgctttcagttctaccttgtctgtaatcccacccctttagaaaacattccatcattgtttcatgttgttttacttttacaaacatatttatcaacttcacatctgcctcttcaatctcactccttccttcttggttcaattttcttctttctgaatggcaggcgattcctttgttcagtgagggtctatgattaacaaactcagaccctgagtttactagcatgaatctttatatattttaattatcattatctaataaacatatgtaagtagttaaaaatttaaatagtgctaaaagtagtagtctcctgttcctcacttccccagacataacaatttccaactgttttttcttcctgagctattccgtatggtatttaactccaagtttctaaatagtatgcttataatactctcttaattcattaatttacaatactattaactgtatattatagtagcagactgagcgctc

SEQ ID NO: 239718 - DNA, 445 bp, Homo sapiens
gtcaggatcagatattttaaagaagcatcttaacagtccttcatgccttataagttaaaattcctctcacaggaacgtaagcagagaaatcttattttctgagacaggcttcttccctctcgctgaactctaaatactgtattcccctttcactcaaaggccccagacgatgccattctcattataacataacttatggaaagctcagatctattgttggaaaaaatgcaaagtgtgtgtgttcatgcacacacgtgtttgagaaaagcctttccatttctgaaatcccaagagtcatttttatgcaagattatctgttaggaaaaaacccacttttttggtcatggtacattataatcatttctagaaaggagagcgtctaatttttgccatttttggcatgcagagatgactgacttcatagaaaccacactatcctgcttcc

SEQ ID NO: 239719 - DNA, 1603 bp, Homo sapiens
  misc_feature (152)..(152): n is a, c, g, or t
aaagacggagtttcactcttgttgcccaggctggagtgcaatggcgggatctcggctcactgcaacctcagcctccctggttcgagcgattctcctgcctcagcctcctgagtagctaggatcacaggcgcccaccacactcggctaatttntttgtatttttagtagagacaggagcttggattctcagtctcctctccctgaaaatgatcctctccaccccaactcatactgtggctttggccttatctcgtttgcagatacctcttccctggaaacatggtttttctcccccttcagggatttaggtgtgatctcccctaacccaggcagtccttgatctcccgcctccatctccctgtcttttgcatagacaaaaggctccagccctccagcagcccccgcttgctcccaagactcttgttgtcctgcttcaccgtccccacagtaaccaggccctgctgccgtcaatggaggcgagggggcgggagacagcagtgacgtcaaagcggaagaagggggcggggcgaagctgcctcggaatgtggggcagggaggctggagagactggagaggcagcggtttgggaggcggccagcccgagagggcggcggccagcgcacttgggaacatcatgttctcttggctggtggcccaggacatgcacccagcctgggcgcctcccccaacaaaacgacagccgtcctgtcccaaagccagggattcctggagagaggattagtaggaagggggccccctccccacacctccccccaccacgcctggctctcttttcaggactcccatctgcccgctcctcagcttgttcctgcagctctggcttttcctctctcccaaactgtacacatctgctggcctggtaccaaagacccagggcggagaagttggaggtcctgtctctgggagagaacacgacgcacctttgctaccttccagaagccccttcagagcctgaatctcttattatgacagcgggcggggggaaagggagaggggcgcggacagggaggagaaggggcctaggatgaaaaaatcaaactgggacagagcaagtggcccagtctagggcctggatcctgggagagggctagaagggaggaatgagggaatttggactgctgcctgaagaccaaaagagccaggaagagagaaatgggacgccatcaaaacttgcagaaaaacttgagaatatgagactagttcccagccacagcattcacataaatctctcaccataacccaggcattatgctaagcactttatattatcttatttcatccccagaacaaccccgtgagataggtattattatccccattccatgggggataactaaggcacggaagttactaaacttgtccagtgcctcataacatggtctcaagctcttaacaaatggagcccaggattcaaaaatctgaactctaataatggcttgtcattctggtttcttacccttgaggaacctgtgaggtgttaaccaacctgtaagctgcattccagcactggcaaacctggcctctcaaatatccagccaattctaagtttggtgccaggaacacagactccatccaacccctt

SEQ ID NO: 239720 - DNA, 1508 bp, Homo sapiens
  misc_feature (152)..(152): n is a, c, g, or t
aaagacggagtttcactcttgttgcccaggctggagtgcaatggcgggatctcggctcactgcaacctcagcctccctggttcgagcgattctcctgcctcagcctcctgagtagctaggatcacaggcgcccaccacactcggctaatttntttgtatttttagtagagacaggagcttggattctcagtctcctctccctgaaaatgatcctctccaccccaactcatactgtggctttggccttatctcgtttgcagatacctcttccctggaaacatggtttttctcccccttcagggatttaggtgtgatctcccctaacccaggcagtccttgatctcccgcctccatctccctgtcttttgcatagacaaaaggctccagccctccagcagcccccgcttgctcccaagactcttgttgtcctgcttcaccgtccccacagtaaccaggccctgctgccgtcaatggaggcgagggggcgggagacagcagtgacgtcaaagcggaagaagggggcggggcgaagctgcctcggaatgtggggcagggaggctggagagactggagaggcagcggtttgggaggcggccagcccgagagggcggcggccagcgcacttgggaacatcatgttctcttggctggtggcccaggacatgcacccagcctgggcgcctcccccaacaaaacgacagccgtcctgtcccaaagccagggattcctggagagaggattagtaggaagggggccccctccccacacctccccccaccacgcctggctctcttttcaggactcccatctgcccgctcctcagcttgttcctgcagctctggcttttcctctctcccaaactgtacacatctgctggcctggtaccaaagacccagggcggagaagttggaggtcctgtctctgggagagaacacgacgcacctttgctaccttccagaagccccttcagagcctgaatctcttattatgacagcgggcggggggaaagggagaggggcgcggacagggaggagaaggggcctaggatgaaaaaatcaaactgggacagagcaagtggcccagtctagggcctggatcctgggagagggctagaagggaggaatgagggaatttggactgctgcctgaagaccaaaagagccaggaagagagaaatgggacgccatcaaaacttgcagaaaaacttgagaatatgagactagttcccagccacagcattcacataaatctctcaccataacccaggcattatgctaagcactttatgaaaaaaacaaaaaaaacaaaaaaaaaaaacaaaaccaaaacaaaaaacaacaaacccaaaaaaaaagaaaaaaacacacaaggggagcccgcgaagacgcaccaacgcgcgacacaaagcacaccacgaaaagagaagagccagacacgcgggcagcagcccaaagcacggggggggcgggaactcacaacagcagacgggaggacaccacggaccccgcag

SEQ ID NO: 239721 - DNA, 467 bp, Homo sapiens
gaaaaagaacaaattggaagacttacacaacgtgattttcagacttactataaagctccagtaatcatgataatgtagtactgatgtaaggatagacatatagatcaatgaaacaaaaaaagaaagtttaataaaacatccacacttacacaatcaattgattttaaaaaaattttttaggcttttattttttgtaagagatggggtctccctatgttgcccaggctagagtgcagtggctattcacacgtgcaatcatagtgcattacagcctgggctcaaaccatcctcctgcctcaggctcccaagtagctaagactgcaggcatgcatatagtcaattgatttttgaaggaaatactaatacaattcaatgggaaaaggaaaatgtcttctgcaaatgatgccagataactgtttacctgtatggggaaaaactgtgaactttaactcttaccttataccaca

SEQ ID NO: 239722 - DNA, 590 bp, Homo sapiens
ggtgttaattacaattcattcaacaaatatttcttgagcctgtgtgccaggcaccattccaaggtctgttagcagcctcattctctagaggcagagtatataacaataggacttgttgtagcctcaggccaagatgaattatgaaaaaaatattaaacttggtcttttggcatggaatgaattttgatacaatactggtcaagttctgtgacttccataattgcagagtgggtctgcagttgaattgaacaagattttgcctgaagtagaagtatcattgccatgattttatttcagttttgttttcctcaaaatagaatttgctgaacttttagaaggaaaaaatgtttcttctatagacctcatcaagcttgttaaataaaattattacctgcttgctctgaggttccaaactattcagatacccctaatgatcatctccccatgaattgtgaaactggtttggctctgatatatgattattgacatttgtgtagcattgtacacagactgattttatgtggcataaaagatttcacaaagactttaaaattatgtcattttacttgatgggtgtgtgttcaattaaa

SEQ ID NO: 239723 - DNA, 1194 bp, Homo sapiens
  misc_feature (831)..(832): n is a, c, g, or t
  misc_feature (864)..(864): n is a, c, g, or t
  misc_feature (872)..(872): n is a, c, g, or t
  misc_feature (874)..(874): n is a, c, g, or t
  misc_feature (880)..(881): n is a, c, g, or t
  misc_feature (883)..(883): n is a, c, g, or t
  misc_feature (1046)..(1046): n is a, c, g, or t
ctctgattggctgggacggctgtgggtggggagaagccgggaggactgggtgcgcctgcagggatcggaagccggttggggtgtgagaggttttctcgctctagggagattcttcaagcaatcactatgtcaacagacacaggtgtttcccttccttcatatgaggaagatcagggatcaaaactcattcgaaaagctaaagaggcaccattcgtacccgttggaatagcgggttttgcagcaattgttgcatatggattatataaactgaagagcaggggaaatactaaaatgtccattcatctgatccacatgcgtgtggcagcccaaggctttgttgtaggagcaatgactgttggtatgggctattccatgtatcgggaattctgggcaaaacctaagccttagaagaagagatgctgtcttggtcttgttggaggagcttgctttagttagatgtcttattattaaagttacctattattgttggaaataaactaatttgtatgggtttagatggtaacatggcattttgaatattggcttcctttcttgcaggcttgatttgcttggtgaccgaattactagtgactagtttactaactaggtcattcaaggaagtcaagttaacttaaacatgtcacctaaatgcacttgatggtgttgaaatgtccaccttcttaaatttttaagatgaacttagttctaaagaagataacaggccaatcctgaaggtactccctgtttggctgcgagaatgtcagatattctgggatgtcgctaagagtcctatttgccccaggtaaattcaacttttaggctggcctgttnngtggactgggctggtctcgttagaactctgtnccacagtngnttgganntntcacgttggttaaggttcccaaagtggacaatatactattgcatgtggttaaacccaaatccagaaagggtttaaaccacatagaagtggtgctaagtgaggatttcttacaaggcacttcccgatgtgtatacgtgagaaatcactgaagggatgctgcganttaagttatgtggagaggcgaacatataatcaggcagatgacatgtgtagggaaagacataaaatgtctcttgcgacgaggacagttgtgtcagacagagaactccaacgcagggtaatatagccgggttgaatgagtgtggtgagta

SEQ ID NO: 239724 - DNA, 1075 bp, Homo sapiens
  misc_feature (712)..(713): n is a, c, g, or t
  misc_feature (745)..(745): n is a, c, g, or t
  misc_feature (753)..(753): n is a, c, g, or t
  misc_feature (755)..(755): n is a, c, g, or t
  misc_feature (761)..(762): n is a, c, g, or t
  misc_feature (764)..(764): n is a, c, g, or t
  misc_feature (927)..(927): n is a, c, g, or t
ctctgattggctgggacggctgtgggtggggagaagccgggaggactgggtgcgcctgcagggatcggaagccggttggggtgtgagaggttttctcgctctaggaatagcgggttttgcagcaattgttgcatatggattatataaactgaagagcaggggaaatactaaaatgtccattcatctgatccacatgcgtgtggcagcccaaggctttgttgtaggagcaatgactgttggtatgggctattccatgtatcgggaattctgggcaaaacctaagccttagaagaagagatgctgtcttggtcttgttggaggagcttgctttagttagatgtcttattattaaagttacctattattgttggaaataaactaatttgtatgggtttagatggtaacatggcattttgaatattggcttcctttcttgcaggcttgatttgcttggtgaccgaattactagtgactagtttactaactaggtcattcaaggaagtcaagttaacttaaacatgtcacctaaatgcacttgatggtgttgaaatgtccaccttcttaaatttttaagatgaacttagttctaaagaagataacaggccaatcctgaaggtactccctgtttggctgcgagaatgtcagatattctgggatgtcgctaagagtcctatttgccccaggtaaattcaacttttaggctggcctgttnngtggactgggctggtctcgttagaactctgtnccacagtngnttgganntntcacgttggttaaggttcccaaagtggacaatatactattgcatgtggttaaacccaaatccagaaagggtttaaaccacatagaagtggtgctaagtgaggatttcttacaaggcacttcccgatgtgtatacgtgagaaatcactgaagggatgctgcganttaagttatgtggagaggcgaacatataatcaggcagatgacatgtgtagggaaagacataaaatgtctcttgcgacgaggacagttgtgtcagacagagaactccaacgcagggtaatatagccgggttgaatgagtgtggtgagta

SEQ ID NO: 239725 - DNA, 1219 bp, Homo sapiens
  misc_feature (856)..(857): n is a, c, g, or t
  misc_feature (889)..(889): n is a, c, g, or t
  misc_feature (897)..(897): n is a, c, g, or t
  misc_feature (899)..(899): n is a, c, g, or t
  misc_feature (905)..(906): n is a, c, g, or t
  misc_feature (908)..(908): n is a, c, g, or t
  misc_feature (1071)..(1071): n is a, c, g, or t
ctctgattggctgggacggctgtgggtggggagaagccgggaggactgggtgcgcctgcagggatcggaagccggttggggtgtgagaggttttctcgctctaggaacctcatagaaattctttctcagggagattcttcaagcaatcactatgtcaacagacacaggtgtttcccttccttcatatgaggaagatcagggatcaaaactcattcgaaaagctaaagaggcaccattcgtacccgttggaatagcgggttttgcagcaattgttgcatatggattatataaactgaagagcaggggaaatactaaaatgtccattcatctgatccacatgcgtgtggcagcccaaggctttgttgtaggagcaatgactgttggtatgggctattccatgtatcgggaattctgggcaaaacctaagccttagaagaagagatgctgtcttggtcttgttggaggagcttgctttagttagatgtcttattattaaagttacctattattgttggaaataaactaatttgtatgggtttagatggtaacatggcattttgaatattggcttcctttcttgcaggcttgatttgcttggtgaccgaattactagtgactagtttactaactaggtcattcaaggaagtcaagttaacttaaacatgtcacctaaatgcacttgatggtgttgaaatgtccaccttcttaaatttttaagatgaacttagttctaaagaagataacaggccaatcctgaaggtactccctgtttggctgcgagaatgtcagatattctgggatgtcgctaagagtcctatttgccccaggtaaattcaacttttaggctggcctgttnngtggactgggctggtctcgttagaactctgtnccacagtngnttgganntntcacgttggttaaggttcccaaagtggacaatatactattgcatgtggttaaacccaaatccagaaagggtttaaaccacatagaagtggtgctaagtgaggatttcttacaaggcacttcccgatgtgtatacgtgagaaatcactgaagggatgctgcganttaagttatgtggagaggcgaacatataatcaggcagatgacatgtgtagggaaagacataaaatgtctcttgcgacgaggacagttgtgtcagacagagaactccaacgcagggtaatatagccgggttgaatgagtgtggtgagta

SEQ ID NO: 239726 - DNA, 610 bp, Homo sapiens
aactgagacattcagaaaaatacaacaacaaataatgcagatgcagaaaaagaagagaaaggatcataaggtataaacttatatttaagaagctgagtgaactccaaagaggataaaaacattggaatttataccaatatacattaaaataaaactactttaaaaaaagaaaaaaataccttgaaagcaactagacaaaaactatgcttttcctcgaggggatcaacaattcaaatgatgctgagtttttcatctataaccatgtggcacggttttcaagtgttcaaagaactgtcaactccaaatttgatatccagtgacacgatcttttacaagtaaggggatcaatacagacattctcagagaaagggataccaagggaatttgtctccagtagacctatgcctaaagattaactaaaggaattcttcaaattaaaataaaacagataaaagaaagagcttgagactttaggatcctgaaaaaatagaaaaatagaatggataaacagaggagtcaatataacaggatatctttttcctcataagttttttcaattatgttcgatatttgaagcaagtgagtttaatatggagctcaatgtatgcag

SEQ ID NO: 239727 - DNA, 529 bp, Homo sapiens
cgccactgcagtgagactgtctgaaaaaaaaaagaaaaaaattaagagagatttaagaaaatcagggaaaatgttaatgttcatcttggaagtcggtaaatgggtattggtatttattttaatcacacatatacacatattttgttttaaaatgtttatgattaaattataaaaagttactaattaggctgaaaactttttatgaagttaaaagtagatcagccctatgacctatcagttgtactcccagtaaaaataagaacattgataacaaaatactgataacacagcagcatgaatgaatctctaaaaatgttgttaggttattttgttaacaatatattagtcacaaataagtacatatgtatatgtgattctatttatatgaagttcaagaataggcagaactaatctgtgctgataaaaactagaaagtagttgccttagggtatagggaactgactgaaaaagggtacaagggaactttcggagtgatggaaatggtctatatcttgtaacagaaaaaaga

SEQ ID NO: 239728 - DNA, 500 bp, Homo sapiens
cggccgccgacgccccggtccccgccgagctccccgccgccgccaaggaccggcccccatagcggctccgggccctcggatggcgtgacggcttgtggggcctgcggggtgcgctgcccccggacctgcggggggaggcggctgagctggcggcgctcgcgggcccagtgtttcttgcgcagttgatgatctttataatcagcctcgtcagctccatcttctgtggacatctgggcaaggtcgagccggacgctgtcacgctcgccgtcacggttggacgggggagtgcttccaggagtggggctcctacatccacctggttattcccagtatgttcatggtgtgcactgagcagtggacctttgagatcggaaacttccttgcaggactgattgatgtgatggagctcggcactcagggcatcatctgtgagctggcgtcagtggcctacatgatgtgcaccatgggaagggaggaaccaggcagcacaagtgagagag

SEQ ID NO: 239729 - DNA, 407 bp, Homo sapiens
ctgataagtatacaaaaggaagtgaggagcatggtatgtattttctctaagaaaatgttgatcatcttagagaagatttacatcaacatgaagagaccgatggtagaaatacagaattaaatgcacttcaggtgaaggttcagatgagtggaaaaaaacttgttattggaaactggaggaatggagatctttttcatatcatggcaggcagctcagctgaattgtatcatgcagtaaatgtaaagttactcactattttattttttgaaattaataagtattttataagaagctactttgagacaatgtaagtactgcatattgcttttccttaaatgttcatcagtaattttagcagcccccgatgtttccttgctggaataaaattattgtgatgatgactgtca

SEQ ID NO: 239730 - DNA, 505 bp, Homo sapiens
caagagacaacagtcaatctacaatccaaagtatgcctactatgaaactctctcccacctggagagtttcagccattttacaacctagttctgcccacaaaaggcaccagctccactgcccacagcagtggaggcaccaaatcaagctatgcagattcccatctgcattttcctctctgcatgccattcatgccaagtccccctttaaaagtgcctgcttccggccgggggcagtggctcacgcctgtaatcacagcactttgggaggccaaagcaggcagatcacctgacgtcaggagtttgagaccagcctgactaatatggtgaaaccccatctctactaaaaatacaataattagctgggcgtggtagtgggcacctatagtcccagctactcgggaggcggagacaggagaactgcttgaacccgggcagcggagggtgccgtgagccgagatcgtgccattgcactccagcctgggtgacaaaagcgagactccatctc

SEQ ID NO: 239731 - DNA, 1874 bp, Homo sapiens
  misc_feature (332)..(332): n is a, c, g, or t
  misc_feature (660)..(660): n is a, c, g, or t
gaaagagcatcaaaaattgaaatgttgaatttctcttggtctttaggaggggctggattctcattgtatttcagaagcacacattatcagattaatctgtacaagttgagagaaagagaaatacaaaagcaagccagcattttggattagctagctaacattcgtgcttaaaactaattgcatcattaagaacatttctgcttttcttagcaaccatatacatacttggaatatagtatacagatgctgctcattactgttatgaccaaaaggcatgtggctgtagatgatttcacttgttgcaaattatcttcttatccattagcatctcntaattaatggacaaggatctgaactgcagtgatactgggtggcttctattccatacagtgggcagtctgcacaaaactcatctaccatgatttttaccttttcatggtggttaaaactaaggatgtagccatctagcaaaaagccagaattttctcatagaatatgtgtgtatgtgtgtgtgtgtgtgttggaaattcctttatgcttgaggcaggcatggagtgattggatagaactctagcatgtagctccaaccctggttttgtttaataaaggccaagatatcctaacataacccttggatctctaatttaatggcctggattncctttcaaaggtttaacgccctggaaccctctgaaaaaccaagaaaatgtatcctattgggcactgcctgtccttttcacttgcaggcaagctgagtctttggtccttaaaggagagtctttactaatgacatcaaaatgtcagccaatgagcatcttgcaaggctgcttagaggccctggagggaatatctggttcatatagatttggttcttgaacttttctggttgctctggctcagggtttctcagccttggcactattgacatttgaagctgaatgattctttgctacagagctgtcctgggtattgcggggtatttagcagcacccctggcctcttcccactagatgcgagtagcactcctccagaccagtgtgacaacaaacaatgtctctagacactgctgaatatcctctggggatcaaaatcgccctaactgagaactgctgcgttagtgaggttgcccatagtaccccatgctggccatcaagagagtgcccacagaagtgtttacagctggcctaaactttgttggcgccttcgtttgattccaaaaccacgaggatccctctggagtcatgtaccccttacagtctgttcaaattttctatttctcttccattgaatccatatgaaatcctaagaattcaccttcaggtttagccattgatggatctcatccatttcccactttgttctttcagaatcttgtctgcttttaacgtaaattgtccatacaacagcccctgctcccaagactctcacaaatgcctgcagctttgttacttgtgctcgttcaaagcttacaaatgaccattttatggcctaaacctgggaagtgttaggcaaagtcagctacgatcttgttagcatttcctcactacgtgtttcaggattgctttaacaaaatctgattcctggacatgctgggtagatcatctattgagtagaaacatggaggagacaaagggtaaatggtacgtggtaacacagttggaacgtgtttctcaacttgtgttcttagcagccaagctctgcccctgactctgatcacaggcaaaggaataaagtctcatttcaatcctgagcttctcctaattcttgtggatcagagctgggattatgtccatagctaacctggagtttgccaacttttgcaaccccagtattctggtaattttgacaatgatctatatgaaatttatttgatt

SEQ ID NO: 239732 - DNA, 506 bp, Homo sapiens
agcggacgggcttcagcttcttagcctgggaaatgtgagggctagtgcagcgctgagcccagacccctcacacagcgctaccggcaacttgcttaacctagaggtggggggtgacgtccctgtcggccccgtcacctggggccccagcacctctccttggctttgcagacgatgttccacaggagcccgtgcccacgctgtggaacgagccggccgagctgccgtcgggagaaggccccgtggagagcaccagccccggccgggagcccgtggacaccggtcccccagcccccaccgtcgcgccaggacccgaggacagcaccgcgcaggagcggctggaccagggcggcgggtcgctggggcccggcgctatcgcggccatcgtgatcgccgccctgctggccacctgcgtggtgctggcgctcgtggtcgtcgcgctgagaaagttttctgcctcctgaagcgaataaaggggccgcgcccggccgcggcgcgactcggctgca

SEQ ID NO: 239733 - DNA, 773 bp, Homo sapiens
agcggacgggcttcagcttcttagcctgggaaatgtgagggctagtgcagcgctgagcccagacccctcacacagcgctaccggcaacttgcttaacctagaggtggggggtgacgtccctgtcggccccgtcacctggggccccagcacctctccttggctttgcagacgatgttccacaggagcccgtgcccacgctgtggaacgagccggccgagctgccgtcgggagaaggccccgtggagagcaccagccccggccgggagcccgtggacaccggtcccccagcccccaccgtcgcgccaggacccgaggacagcaccgcgcaggagcggctggaccagggcggcgggtcgctggggcccggcgctatcgcggccatcgtgatcgccgccctgctggccacctgcgtggtgctggcgctcgtggtcgtcgcgctgagaaagttttctgcctcctgaagcgaataaaggggccgcgcccggccgcggcgcgactcggctgcactcctcacgcgcctgtatgtccgcgcgtgcgtgtccgcgcatgcaggtgtgccagagcgtgagcgcgcgcaggcgagcgctcagggcgggggtgcgcgcggggccgagggtgggtgccgtgcacgcgcgcgggtccggaggcgcgcccgaattccccgcaggggcgccggggcgtgcgtgagcgcacagcatgtccgagcccgcctgcgtgtggcgtgcacctgagcgcgcgcagggccgcgcggctcggcgtccccgtgcaccacg

SEQ ID NO: 239734 - DNA, 524 bp, Homo sapiens
ggccaagagccgacctaccatccccatgttgagctttccagcgtttctggggcatcctgtctggttgccggggatggatggcccagggttggagtggtggtcaggggaggacaactggggtgggctggctgacgatgttccacaggagcccgtgcccacgctgtggaacgagccggccgagctgccgtcgggagaaggccccgtggagagcaccagccccggccgggagcccgtggacaccggtcccccagcccccaccgtcgcgccaggacccgaggacagcaccgcgcaggagcggctggaccagggcggcgggtcgctggggcccggcgctatcgcggccatcgtgatcgccgccctgctggccacctgcgtggtgctggcgctcgtggtcgtcgcgctgagaaagttttctgcctcctgaagcgaataaaggggccgcgcccggccgcggcgcgactcggctgcaaaaaaacaaacaacaaaaagaaaacacaaaaaaacaaagacacaaagaggggggc

SEQ ID NO: 239735 - DNA, 435 bp, Homo sapiens
agcgcttatatgcttgacactgagaattcaaaggtgaaacaagatggttctgtccttggtgttcatattcaatatttgtggaacaaatgagtgaaacatagaaggttattatttgctaagtctatgtatgtactattacctttaatattcacaacagccctttgagacagctgtgagaaattaggattatcagccgggcacagtggctcatgtcagtaatcccaacactttgggaagccaaggcaggtggatcacctgaggtcaggagtttgagaccagcctggtcaacatggtgaaacccagtctcaaatattagttgagcatggtggtacatgcctgtaatcccagctactcaggagaccgaggcaggagaattgctggaacccgggaggcagaggttgcagtgagctgagactgtgccattgcactccagcc

SEQ ID NO: 239736 - DNA, 398 bp, Homo sapiens
gctccccagggccgggggaccatgagttcacctctgtcatcagtgtcagcatgacaaaccccactggtgccgctcacagcaggatcccacatcccaggccagccccctctgccatgccacctacctcacagccagaggtgggaacagcaactctggggagaactgagggtgctgtggccaccgggtccctgaggctcacggaggagagtgaggcgaggagaaccatggagctgggccctgccttgggaaccaagcactcgccctttgcagctgcagagccgtcctgatgggcaggcgggggcggggtcgctgtgtagctgtgcagagagcgctccgaatgggggtctgtcaccagctcccaagctcgtgggttctcccaagattcttgtggcacatga

SEQ ID NO: 239737 - DNA, 312 bp, Homo sapiens
caggagaagggtgagtggacgagcggcagactaatcaggaaaagacctctcaggcaaaagagaaggtcgtagggtttggagatcggaggaacagtttggagtccttgtcctaccacatactggctcaatgaccttgggtgagtcgtgagccttctcaatgtcagaatttcctgacaagatcacgtgttgtggaaatgaacagaaatgccacattaaaagaacattgatcgttgttacctgaaaaaaaatctcacttcttcattacttctgtgttactcatcttgagtttagcagattcattacttcattaaa

SEQ ID NO: 239738 - DNA, 581 bp, Homo sapiens
tgacgctggcaggctctcaataggccagtgacagaaacactggtacaaagcccctcgctcagtttggctgggagaaaagcagccgaaagagtcagcatgagtgtgaggaagaaagaagaaaagaaggtgccttagaaagaagacaaagggcaactccagtctaagagtctcaaccaccgcatagaaaaatactttttggggcaacaaaatgggttgggagaaagaagtatttgacaggagtggaaggcgaggggcagctcttctgtgtcctaggcacatctccctaccctggagaacctgtcctgcttgtggcctgggaagagacttcaaatggcgccaccaacaacctgaatcaataattacctaaggcggcgtcctacacaggacaaagaaaggcagcgtttccgagagtccctgggataaggggttgcttctcccagctgcgcatctacatttttaatgttgtgatttactccgagggaagctttccacaagtaactaaaatcctaggatcccagagctgccttcttctctggtcaccagctaaagtaggggtcaaataaatatttccagatttttct

SEQ ID NO: 239739 - DNA, 656 bp, Homo sapiens
agagatggggtcttgctttgttgcccaggctggacttgaactcctcagctcaagcagtcctcccacctcagtctctcaagtagctgacactaatgttaacacctttcataaccacattatagggaattaaccttaatagtattaactatttagagaccttcttcagatttctccacttgaatcactaatgtccttttctgttccagaatcaagttttcatatcaccttagtatcctcccatctaggataattcctcagtttttctttgtctttcataaccttgatgaatactatttagttattgtatagaatgtgttcgatttgggtttgtctgatgttttcttctgataaattcaggttatatgtatttggcaagaataccacaaaagcagcattgtatcttctcagagcatcataccgggagatatgtgatgtcaatatgtattgttattcgtgatcttgtctttgatcacatagttaaggtacggtttcttccctacgaagttattactttctctctttcatggggatatactttgaggctatgcaaatattttttttctcagaatattaaccccagtaattttaggatctattgatgattcttgcctacaattaatactgtggtgtttgtcaactggtaatttctattttca

SEQ ID NO: 239740 - DNA, 345 bp, Homo sapiens
agcaataaccataaaaatgggcaaccagtagcccgtggggctgttctgcctatggagtggtggagatataggggtgaacaaaacaacatgttgcttgcagctgatgctgcagaggaagaaatagtcattaatgaagtcatcacatgatgaactgcaaattacagctaagtgctataaagtgggagtgcctgatgttgtgacagcaataataatagggggaattttggtgtgagttggctgaagatggagaaactgagcctcagagtggttaacaacttgcccaaggtcatacagctgggaaggagtgtacctgaaattaaaatcaaattgtctgattccttcata

SEQ ID NO: 239741 - DNA, 508 bp, Homo sapiens
gtgtctcagtttcttttacctgttaaataaggatgaaaatagtaccttcttagaaagttgcgaagataaaatgagttactataagacacactcacaatagctgctggctcagaatgttgagtattccagaacctgaaaaggtcacatggagctaaggaagtgagccatgtaacacgagagggaaaagcatttcaggcagagggaacatcagtgcaaacgccctggtgcagggatgagagggatcagtctgactgccacgtgggaacagggaggactgcggcttggaccaggatgatggaagtcattgagtccaacaggaaattgtggaactcctgagggctcagccgcccctggtctcttctccctgaggtctcagcttatgtagctttcccaggaaagcatgtgcaaccccagatgagattagagctgtctctctccacaagctcacaccaccttggatttctttttcatggtgtcatcacaattagaatgtattgtttatatcaag

SEQ ID NO: 239742 - DNA, 502 bp, Homo sapiens
tcgggtctgtcacgacgcctgaggaaaatcctccgtgacaggaatggggaggctggtgacactggggaggggccctttggccaccgcttccatcagagtctaggcaacttgaccggcatttcacccttccgctttacctccccaagagagcctgagatctgcccttggttagaaagaagaggctcgtttcgtcctagtttctgtggcactggccaccgagcagtttgcgactgtttcagtttttctggagtctttaatcagcccatattttagttgggctttggagatctgctgacttgtaagaataccaggaaaaaggctctcattgaaaatttatccacatctacactcgaaaaatataaatgggcatggattagagatccactttaatttgcatatatcatcagcaattcattgtgcatggttggcatgacttgttagatgctctccttggccgtggtggagaacgcgcgtttattttctattaaaacttcctgttaca

SEQ ID NO: 239743 - DNA, 590 bp, Homo sapiens
ctgcctgaaggtcaggcttaggtggcctggtcccagagttgctgtttctactaggacccgacctggtaaaaatagaagatacagggtagtgaggcagatttgaaaagaatgcagcatgtgcaaattcttactagctgtaatataaatgataaattaaaacatgcatttagtggaatgcactcccataaactattctagattgcatatttgtatacatccatctagtatattttttctgtgttaaataggtacatatttatccttttattccataaaggtaccacacatatacacttctggtagttttctttcttcattttctaactattttgtgagtatgttaaatatttattgcaccttcatttttaatgaatttatctcccagtgcgtagctatagcaatgcttttagataagtaaccttgcacattttcattattttcaatatttcactgttacataaaataagggtgaccatcaaggttgattttgacttgagaaccaaaagttctcactggaggcaccaggaaaaatatattatataccatattatatagaggtattactcttagtttttgcttatttaaatacc

SEQ ID NO: 239744 - DNA, 771 bp, Homo sapiens
aagcggccgcgcgcaccagccccacggtggccacgcagacgggcgcgtccgcgacgtccacgcgaggcaccagccccacgcgcagcgccgcgcctggagctcgcgggagccccccacggccgccgccgccgccgccgctgctgggcaccgtgtcgtcgcccagctcgtcgcccacccacctgtggaccggcgaggtgagcgcggccccacccccagcccgcgtccggcatcggaggaggtctccggagcagagccgaagctcgccggagaagaggagccccagcgccccggtttgcaaagcaggtgacaaaacacgacagccttcttcaagcccctccagtattatccgacgcacttcctccctggatactcttgctgcaccgtatcttgctggacactggcctcgggatagccatgggcaagctgcaccttgcatgagggacaaagctacacagacagagagtgcatgggctgaagaatactctgaaaagaagaaagggtctcacaagcgctcagcatcttggggcagtacagatcaacttaaggaggtcagaaaaatggttctaagatagtgggtgtggaaatatgatccttttgttggctatttccttgatattatgggcagcaaggatttgtcgttttccattgatttcttttttctttttggcttctgaaataacaaaaacaattattgtgttgatttaataaagatttcaatagggatatttatatatcacttacctgattatgtatgtttgtctttttttagga

SEQ ID NO: 239745 - DNA, 743 bp, Homo sapiens
tagacataatatagaagttaatattacaagctctggagtctcaggtttatttcttggctttgccgcttgtaacaccttaggcaacttacatgtgttaagtcagataaagcatatgaaagcacagtgcctagcacataagagcacaagaatgttagctattattagtgtgcctggtgcgtgctaataataactgacattattagctattatatgttagttaactatggtaactctagttattatatatagttaactttgttccataaatgctttatttgtagtataattataattatgtaaaaatactaattttttattagcaataaaaatgaagtatgccaaaatattaattgtaattaataccagttaagtaactggtgccaggagaattttgagtaatttgtgttaattatttttaatgtctaatttttttgtaatggaaatatgttttataatagaaaaatatggtagacattgttgtgaaatgatttttgttaaatacacctcccctcttttttcattacagacagagagtgcatgggctgaagaatactctgaaaagaagaaagggtctcacaagcgctcagcatcttggggcagtacagatcaacttaaggaggtcagaaaaatggttctaagatagtgggtgtggaaatatgatccttttgttggctatttccttgatattatgggcagcaaggatttgtcgttttccattgatttcttttttctttttggcttct

SEQ ID NO: 239746 - DNA, 239 bp, Homo sapiens
tgtatttcagtttgggaaatttctattaacatatcttcaagctcacccattcatttctcagagtgtcttagtctgaggggctcactaaaggtaatcttcatgtctgttacaatggttttcaattgctaggatttccttttgattccttcttacagtttgcatctctctgcttacattacccatctgttcttgcatgttgtctactttttccaagatgcttctccttctgtgggcttccc

SEQ ID NO: 239747 - DNA, 307 bp, Homo sapiens
ggcccttgggacataattagttctaaatgaagtcataagggtgggcccccattatgggattagtgcccttgtaagaagaggaagagacaccggagctcttcctactctccaccatgtgaggatacagcaagaacatagccatctacaagccaggaagaggatcctcaccaaaaattgaatatgctggcaccttgatcttaaactgctgagcctctgaaaatgtgtgaaataaatgtctattgtttaaacctccccatatgtggtcatttagtatagcaacctgagctaaagcagcagtgtttaatcc

SEQ ID NO: 239748 - DNA, 240 bp, Homo sapiens
attctccttcagagggaatgaagaaaaatattaaggcaagcatggagcagtgggaggtgcttggctgaaggccttcctgaggttctcctaagctcttcaatagcccagcttgtggactctccatccctgagtacttggcccaagacacaaactctggcatgctgtattgctccatgtgagctggggaacaaatacatgaaatatgcacggaataaaaggatagagattgttggctgacca

SEQ ID NO: 239749 - DNA, 350 bp, Homo sapiens
tggctttcccagtgctgaggactggggtcggccgctggggttgggtccgagagggtgtacctggaaggaagcaagaggggagcttccttccctcctcttccactgagacctgtgtgaggcgtcaccagggggagccaaagggccccaggtcagccactctgggcccctgacgactgccatcctactggttggaccagcttccccaccgaggcacagacgtggaggtgggcaggacggagtaggcagttggattcactctcaagaccctgtcaaatagccaaagatttggcttaaatcctcctttggcttattgttcctttttcctggagcaataagaatgatcagttaaa

SEQ ID NO: 239750 - DNA, 359 bp, Homo sapiens
aggaaataatcatatcttcagaagattctagggacttatttgtgattaaagacaaaagctccagagaccctaaggttatttacatgtcaaagtcccataggactaagtcccaaagtcccgatctcaaaaggtcattgctctctccactgccagcaaaccatcattgctttggggaaatcaaagtgccttcatcaggaaatgttgagggataatatgtgatgggacttgattgtcttgttagattggcagcttgcctttacctgggctgaacccagcatgcagaagggaaaagcactcacaaaagagaggtcctgagatttcttcatatcttgcagttagaagaaaacagttcagggtcc

SEQ ID NO: 239751 - DNA, 1391 bp, Homo sapiens
tcaacagatctaattgccctaagatgaagctgtgcctcctttttggtagaagcactgtttgaagaagttggtctttgaagagcctcggtgatattgtcagaggctttaggttcctgtcagaggcagctgtgctggagcttgaagagctgaaagtgtccccttggccatgggcccattcactgggggccagtgtggcactgtgggcttcccaacatggtcttccaagcttctggcctcttttgcatcctttgtgccaacaccagtctgtggatgagatcaatgtggctcagagtgtggtttccagagtacggtcctcaaactgttactggtctgggatgaggcaagaactgaaattgagtcagaaattttcaaagcaatcaaacactgcttcctcctttttattgtactccacaaaaccattagtctacaatagattggaaattttaaaagaattaaaatcaagtctggttctcctcactgagctcattggggaatccctggcctagggatttccctcttctcccgcccccaggcctcggaaaatgagctggtgtcagctgctgcccagaaggttacccagcgtgttctctctctcagggtccttcccttaaattctcaagtttgacatggaatagaagaatgtcgggcgtttcaaaaaaggattttgagatgctgcaaagctcactggatttagagtcaagagatgtgggctctagcgccagatttactacagacaggctgcctgaccttgggcaagtcacttatactttcttggcttcaccataatgggctgaactgaatgttctctaaggtgcctctcagccctaacataatatgattcttttcatgagaagagcaggacttgatccccccatcacttgggggcatccccaaggagccccctgttcttcctctgcaggcagccaaggctaattaggaatctgagagaatgagccaggaaaggggcagtacaggacatacattctcttcattgaaggtggtaccccctccccactgcacgatcctcaggaagaattcctttattgaaaccattattgaatagggtagatttaggcacgggaaatgtaaacagcaaatcagccactaaaagtgcgttaatgtcacgcctgtaatcccagcactttgggaagctgaggtgggcggatcatgagatcaagagatcgagaccatcctggccaacgtggttaaaccccaactccactgaaaataaaaaaaattagctgagcgtggtggtgtgtgcctgtagtcccagctactcgggaggctgaggcaggagaatcatttgaacccgggaggcggaggttgcagtgggccgaggttgtgccactgcactccagcctggccacagagtgagactctgtctcaaaaaa

SEQ ID NO: 239752 - DNA, 262 bp, Homo sapiens
ctgaagctgctgatatagctggggatcaccttctcattgcccttcagtgggaattcttcttcttcccaggccaattttagtgcgagtgtgtgtgtgaatgtgtgtgcacatgcctgcacacatgcatgcatgtgagactaagcattttgaaagggagtgatttttttcacaagctcaggaagagaactccctcagcctctctgccaacttgattatagtattttgtacaccttggaagcataaagaatttagccacatgact

SEQ ID NO: 239753 - DNA, 376 bp, Homo sapiens
tatctctatctttaataatgttcataattgtattgtttgtttgccagacgtctctgcaagggcagaataaaaggcacaggaaatacagaattgccctttttatttgatttaaaaactacttctgctcatgaagatatttctggctaaattctctttcccttttgctcctttgttttaattactttttaaattgtgaaattattttaaactcacatagaagacgcaacaagagtacagagcgttcccatgtacccttcaccagcttccccagtgataacatcttacataaccatagtgcaattaccaaaatcagaaatctgacactgtagaatattatttactaaactatagatcttattcacatttcaccctgaac

SEQ ID NO: 239754 - DNA, 528 bp, Homo sapiens
tacgtgtacgggaccaggcgttagtctcacttagggcgctggtgaagattcattcagtagctagtgttcttttatcatggaggagtttggagtttttcaaacgttatttgtggctttatgcataacttactttgactttatcagtcaatgcatcgcagtatgggaatgatttagccctctgtggaaatgcagtggctttttagaacaattaagcaggttattttaagagagaacaacatgttttccaaaacaataacttggtggaaacaaatagcaagagtgtttggcagacgttttttggatgtgctacaggctttcctcccttgttgcttatttttattgacaaacatccctaatgtgtgtcatgtctttctctgtctctccccttccctctctttttttctcaaattatgtaacttttgaggacagttacttctgtgataaactcttcaagtaagaccgttataagatagatttggaaattaaagccccagttgcatttcagtaactcatttcagttatttcgtc

SEQ ID NO: 239755 - DNA, 371 bp, Homo sapiens
agcgctccgcgagttcagcagaccccagcccaggctggaggattaccccggcctgtgcctcatactccgagcagggaaggttggcacaaggtagtcccgggagctgagcaggaaactgaggcaacgtgcgtgctgctcccagcttagcccctgaaatgagcggcgtacgggcctgatgctgactggggaggaggggcggctgcgggaaggaagacaggacagtccctccgtttcttctttatcccccaaatcttcagtgcctcccatccccgcagcgaaaggctcaggcgcgctctgatcctttaattcccgagactagatcttggtcgctgtgaattgaattttacgccccccttcccgcgccattcggt

SEQ ID NO: 239756 - DNA, 495 bp, Homo sapiens
agatctaagaatccattgccaaatccaaggtaatgaacatttactcctatgctttcttctaagagctttatggttttatattttattttatttgacccatttttagttaatttttacatatagtctgaggtgaggggtccaactacattctttcccatgtggaaaagttgtctctgtaccatctgttgaaaagacaattctttccacactggatggactttcactcttgctaaaactcagttcgctatgtatatgtgggtttatttctggactttcaattctattccattggtctgtgtgtctattcttatgccagtaccaactgctttgattgctatagatttataataaattttaaaatccagaagggtgaatcctccacctttttttttcttctacattgtttgctgtaagaacatttagattgctagccataagaactgtaatttgcaacacagttattacctaggcttcactaacttattccccaataga

SEQ ID NO: 239757 - DNA, 330 bp, Homo sapiens
cattttctttagttttacttaaatggatattatttcaagatcttcattaagcaagtaatttagtaaaaaacttacagaatccataaaaagaaagcaaatctcaaatttgtagttaagagtaataagtgttaagattagggaaggaaaaactgtttcagaactggtttgaatgaaaacatagctgatgttgccaaaaaatggctttttgtgagttgagtccatttccatcatgactctaatatcattaagattgaatcattcatttcctcactattatatctagacagattggaaatttaccagaaatggaaattattaaaagtctgactg

SEQ ID NO: 239758 - DNA, 2381 bp, Homo sapiens
  misc_feature (922)..(922): n is a, c, g, or t
  misc_feature (2021)..(2021): n is a, c, g, or t
  misc_feature (2061)..(2061): n is a, c, g, or t
cgatgaattcagccgaatcccaagaaccatatcgagccctgctgctacccaagccagtgtccccgacgacagcagttcccggaggtgcagcgcgcctggggcgagcccgaaggagaggcatcctgacagccgccagcgggagagaggtggaggccccaagaagccgtggaaatgcggggactgcgggaaggccttcagctactgttccgcgttcatcttacaccagagaatccacaccggggagaagccatttgcgtgccccgagtgcggcaaggccttcagccagagcgtgcacctgaccctgcaccagcgcacgcacacgggcgagaagccctacgcctgccacgagtgcggcaaggccttcagccagggctcgtacctggcgtcccactggcgcacgcacacgggcgagaagccgcaccgctgcgccgactgcggcaaggccttcacgcgcgtcacgcacctgacccagcaccggcgcgtgcacacgggcgagcggccctacgcgtgcgcccagtgcgccaaggcgttccgcaaccgctcgtccctgatagagcaccagcgcatccacaccggtgagaagccctacgagtgctccgcgtgcgccaaggccttccgcttctcctcagcgctcatccgccaccagcgcatccacacggaggagaagccctaccgctgcggccagtgcgccaaggccttcgcgcagatcgcgcacctgacccagcaccggcgcgtgcacacgggcgagaagccctacacgtgccaggactgcggcgcgctcttcagccagagcgcctctctggccgagcaccggcgcatccacacaggcgagaagccctacgcgtgcggccagtgcgccaaggccttcacccaggtgtcgcacctgacgcagcaccagcgcacgcacaccggagagcggccntacccctgccacgactgcggcaagcgcttcagcaaccgctcccacctcctccagcaccgcctcgtgcacaccggtgagcggccctacaggtgcctgcaatgcggggccgccttcagccacgtgtcctcgcttatagagcaccagaagatccacaccggagagcggccctacaagtgcggcgagtgcggcaaagctttcagccagggctcctcgctcgccctgcaccagcgcacgcacacgggcgagcggccctacacctgccccgagtgcggcaaggccttcagcaaccgctcctacctgatccagcaccacatcgtgcacaccggggagaagccctacgagtgcagcggctgcgggaaggccttcagcttctcctccgcgctcatccgacaccagaggacgcatgcagacagttcgggacgcctttgcccagctcccacgcctgactcaacacctgggctctcacagggaggagaaacctgtcaacaggggtgccctggcagaaacccgcgtggaccagcagaagattaagagctgagggcctcctttccaacctcacaatgctatgggggagatactgtgttatccccgacgcttcctgtgaggaaaccgaggctcagagaagcttgttaacttgcctgagggcacacagtggggaagacacagggctaagactgtacctcacatctgccagactcccctgcggtcttcctggtgcaaaattataaatggggcacgggcaagtagacctgcagaaacacctatggctggcctttaatttctttctttttttctttgagacagtgtctctctctgtcacccaggctagagtgcagtggagcgatctcggctcactgaaacttctgcctcccgggtacaagtgattctcctgcctcaacctcccgagtagttaaaattacaggagtctggctaatttttttttttttttttttctgagacggagtcttgctctgtcgcccaggctggagtgcagtgatgcaatctcggctcactgcaacctccgcctcccgggttcaagtgattcccctacctcagcctcccgagtagctgggactacaggcgcccggccaccacaccnggactagtttttttgtattttagtagaggcggggtttcancatgttggctaggatggtctcgatctcctgacttcgttatccacccgcctcggcctcccaaagtgctgggattacaggcatgagccaccgcgcccagcctaatttttgtatttttagtagaggcagggtttcaccatgttggccaggctgtctcgaactcctaacatcaggcgatctgcctgccttggcatcccaaagtgctgggactacaggcctgagctacggtgcctggccagctggccttttcattgttgattttattgagtaagcccttgctcagtaaatttaattgaattaaagtgaataaaaggtttggtttc

SEQ ID NO: 239759 - DNA, 556 bp, Homo sapiens
tccagctccttttatcacagtttcaggcccatagtgtctctgccaaccaccgctgtgcaaacgttcccacccctgtcagctcatccagtatgtccagcatcccactcggctgactcacaatattgactttctccttagctataccatctcctcctctctagcaacctcttcttttaagaacagcatgtaaactggctttatccttggcctagttaatggcagactcagcttatgtcgacttccattgtcagggggttttcctcctgtggacatcacgtacctgcccactccaagaacttctattgtactctttcagcccaagactccggattgtaaccaaaatgtctttgagtttgccccacgatttttaaatcagtttatatggtataattcctgtttcttttgtggattttgttttgaaggcggttgtccttcactggctgaatcatgtgactttattcctttgtaaaaatcttcccaaagaaagggtacctattccctgttccttttcccctgagacctcaggggattccacagatgcccttggcccttcctt

SEQ ID NO: 239760 - DNA, 2058 bp, Homo sapiens
  misc_feature (236)..(236): n is a, c, g, or t
  misc_feature (1397)..(1397): n is a, c, g, or t
  misc_feature (1803)..(1803): n is a, c, g, or t
tttaaaaatccagttatatggagaaacaagatcaatttattgtcaaaagacagaattattcctcttttgcatcaaccaggcttgacataactgtaatctcatggaaatgtctgctactgtaatcaagaatttgcatgtagaaggaatgcatcacagaatatatgacatcttgctatgtctactgtactaaagaattaaagaggtttgaaaataaatactgaaacaaatcagaaagnaacctcaattttattaaactaaaatatcatagctaggaacatctcaaattgagaataaagtttatataatatttcagagtcatatgaatgtcataaaataataaaaatgtaccatataattatttaaaaagcacaagtctataaattggaaacaatgaccagctaagagatgacaggtaggctgaaactcaacctatttccaaaccactaaagaagacataaatcaacttaaagggaaaattacatttgtaggtttataaacatatttttaaaaaccactcctataaagcaaaagatataaaaagaaaacttgagaaatgataaaaggataaaggataaaaaattaacaaagctatatgttaggccactttggttcatgcaattttcttttgtttctctctaaaatggtatatcaatttttatttttcacaaacttctttcaattaagaaagaaaatacatttgcacaggaaaaagcagtttttcatcaactttttctagtcagtgaacaaaaggctgagaagaaatcttttttttaaaaaatggttacattatagtataatgtatagattatataaatcatgcattatcttacagacatatataagaatgtatagggataaaatgtataaaatagaagaaccaaatgcttgcaacagaaaataaaagtgtaaagtttagttctttttctgtactataaaaaaaccagccatcctgaaggcctgtgccattcttaggccactttcaggcagattctgaaaagctggaaagtaaacacaggtgttttaaaactagagctgctgtcacggacaaccacaaacacccttaactctgatgtggcaacgcctctttcccgccctctgttttttaaagcaatacccgaaaagaaaatgtcaaatgtttcacctttcaacacctcagaataagtaagagcttaaagtgttgttctgtaatctctagcaaatagatcactttttcactacttttaaatgtagccaattaaatattaattacataagataaaaagtggaatttctttaaaaatttccaccaccccaaccttacacaccctccctcttccaccatattttacagcagtttctttagttcttaaagcaaaatcttttgtttgaccacatttagattatttcttctatcgtanagtttttacagaaaatatctgattttttcttggaaagtttaacgtacaactcagaaaaatgcagagctttaactgaaatatgtaattctcttttagaaaactgtatcctaataggtacctaagtaggagtagaaatcatttacagagaaaaatagaagacagaaagtaaaataattcccaaactgctacaaaacatggaactcaggttttggaatcaattcatatatggaatcaattttcaaacactgaaatatcaatctattacttataattgtataaaattgcccttaaaaaacagggataaaattcattaggaattgataagttacaacctaactagtaaatataagaactaaagaaaaattaattctttatatttcaccatatacatcaagaaacaggtacngttaagggaatggccaagtaagtatcaatcagttcccaaattaatcttggaggttattttgagaggtttagtcctaccctcagaatttcacaaataattcctttgtgcaatccatgtaagaaatgttctctgaaatcacacttgtttgtatatttgataattttttttaaaaaactggtagtttctttgtgctgtaagctttaaataaagagatgtctgcctttttaaataataaaataaaaattaatgaatagg

SEQ ID NO: 239761 - DNA, 444 bp, Homo sapiens
ctcttcttttcaggaggtgtctttgcagtagattctggagaaacaatgatcaggctctctggcagaacatctaaactgcctgttggatttctgtcttccttggcaacattatattttaactgtttccctgtagagtaaccagaaacttttgtttctctaaagtagtgctatgtgatggaaatagactaacttttttggaagaggtatttttaaaagtagatgtaaacaggtgaaattaattttaataatatatttcattcaccacagtatattcaaaatattattgcagcatgcaatcagtataagaatttataaatgaactatttccttttttgttgtaagtctttaaaacaaatttgctgtgtatttcacacttatagcacatattaattcagactagctacatttgaagagttcagtagttaccatattggatagttacca

SEQ ID NO: 239762 - DNA, 652 bp, Homo sapiens
gttcagaagccgaataaataaaaggtttagtttggagtaaatgtaatgtgtcacatttcccagtgttgtagtgcttgtcacttcttaggtgctctataaatgtttggttaaaagaaatgtagttaagttgaaagtctgagattaaaatgttttttttcttcctttcgtttcctttttttttttaagtagtctgtttaaaaaaatgaaagtatgttggaaactttagccttaaaagtttcttggtaatactagccaaatgcaaattttttggtatctttttagaaatactaattttaagtgctcagcattacattctactgcattttttaaaaaggtgcttttaacgttaaaaggaaaaagttactaaaataaatttctaacttcatacaagtacttcctgttattataagtatagcaaatctcagagaatttgctagtaattattagtactaaaaacttagcttatttcttacaactttatttcttatgtgatcagaatctatttaatgttgagtgtattaggcctaaattttgtttctttttctgtgtgttcccaatttctttcgttcttttttatttttctttttgatatagagtctcactatttcaccctggctggcacgatctgtaactgctgcctcctgggctcaaa

SEQ ID NO: 239763 - DNA, 379 bp, Homo sapiens
gcactataccaatctgaatgtaaatccaggatcataaaaacctatttggatccaacagctgaacagaagagttctaaacccacagatgatgtcatttgtttattttctttaattaatatacacttgtatatttattattttaaaatgaacccagggacctttcttccaaatcaggggtaagagtttccttcccagaacctacctggggaaacctggagagatgtatttaactcagaaaatattggttagccatgccaactgagaaaaaaacattagtcagctgtaacaacattgtcactgcaatgaaggcaaagaggaatttgaggtcattgtttaagagtgtggctgactgcaatacttgctactagaaaattaaaat

SEQ ID NO: 239764 - DNA, 508 bp, Homo sapiens
agattcactagcttctagttagggaagtaaggaatgcctaccagcatactgtatcatgatagctccctctctccttttcaaattatgggttaaaaaacatataaagctgaccactgtaaccatttttaagtgtacagtttgttaagtatattcacattgttgtgaaacagatttccagaactttttcatcttgcaaatttgaaactctgtatccattaaataagaattccctcggccgggcctggtggctcacgattgtaatcccagcacttcgggaggccgaggcaggcggatcacgaggttaggagattgagaccacagtgaaaccccgtctctactaaaaatacaaaaaattatccaggcgtggtggcgggcacctgtagtcccagctgctcagagaggctgaggctggagaatggcatgaacctgggaggcggagcttgcagtgagccgagatcacgctgctgcactccagcctaggcgacagagcaagactccatctcaaaaa

SEQ ID NO: 239765 - DNA, 166 bp, Homo sapiens
aggtatttttccctaatagcttttgcaacttgatagttaattgttaaaataatcactaaaatagccatcctacctatgactccataaagaaaatccatttgtataaaggaagattaagtgaataaataaataacttagcttaatagtaaattcacagctaatatca

SEQ ID NO: 239766 - DNA, 744 bp, Homo sapiens
  misc_feature (217)..(217): n is a, c, g, or t
  misc_feature (712)..(712): n is a, c, g, or t
cttggcacacagagaagactgccccaaagtctgcccccagcacctctggaagtcagcagagtcacagcaagtcagcagctatttttcctgagtagctcttctttcccaggatgggaaggttcctagcacttagcagtttccacatgccctggggatagggacttgctatggagcctccccttacaaaaggcaaaggtctggatggagcatgtggcanggaggccatagggtttaagttctgccaatatggggtggggcagccagaaaggcctagagaccctgacccagctgagaagggcccctggtcaccactcgaattcactagggcagagtgactggcatggtccatgtggctccaacaatccctgcatgccagggaatgagcgatccaaaagtggggactgaaaccagccccaggaagcagctacatcttaaacagacttttcattatgaaaagagttcaaattgctgggcgcggtggctcacgcctgtaatcctagcactttgggaggccgaggcaggcggatcacctgaggacaggagttcgagaccagcctgaccaacatggagaaactccatctctactaaaactacaaaactggccgggcatggttgctatttgggaggctgaggcaggagaatcacttgcaggagaatcacttgaatccaggaggcagaggttgcggtgagccaagatcacgccattgcactncaacctaggcaacaagagtgaaactccgtctc

SEQ ID NO: 239767 - DNA, 394 bp, Homo sapiens
tttagtcccagctactcaggaggctgaggcaggaggatcacttgagcccaggaagttgaggctgtagcaagctgtgatcacgccactgcataatttaaaaaaaatttttttaagaactaccacaagtcaataaaagacaaataacccaaaagaaaaatgtgcaaaagacttgaatatcacagctaataaactcatgaaaaggtgctcctattgttaaccagagaaatgcaaactaaaaccacaatgagataccactatattcctactacattaggaatttttaatttaattatttaaattttaaaattttaaatttagaagttgacaacagcaagtgttagagaagatctgaagaaatgggaactcacctatactgctggtgagtaccttaaac

SEQ ID NO: 239768 - DNA, 592 bp, Homo sapiens
ccccgcccatgtcctgctgattggtccattttacagagtgctgattggtccatttttacagaatgctgattggtgcatttataatcctctagctagatacagagcgctgattggtgcatttactatcctctggctagacagaaaagttctccaagtccccacctgacccagaagcccagttggcttcacctctcactgctactttctgtcaaccagagtcaaataattttttccaaccaaccaggcaactcacaaaatcagtgggtccccggggtataattttcaggcatcaggcttccagaggtcagaattctggccacccatgatattcttcctccagtgaggagccctccagacctgctccatagcgacggcaggacctgcctcccagcagagcagagatgagctagtcaggagcaggagaaatgatcttcagactctggggcccagcattccccaggtttcctgcaggtctcaaaatctatcttgaacaaacttgcttacatcatttatttttaaataaaaaagaaccactattgggagaaggtagtgcttgattttttcttcttggcagagttcattccatagcctg

SEQ ID NO: 239769 - DNA, 863 bp, Homo sapiens
cttctataggaaagcactttatttttcccctgtacactctccatttctttctgcctggaatgcaattgtcactattggcaaaacagtagctatcttgtgaccgtgagagagaaaatatggaaaggaaatccaaccagctcaggatgagaggaggaaaacacacagtgagactcggtccctgaggcctcttggagcagctgcaaaagttctggcctgccctcctagagactcctttcgtgagaaaaatgaacctcgtctgttttaggccagtcttggggagggcttcggctacttaacacactgtcctggctagtaagcaagagttgacagtttctactgtggtttgtctcactttttatctaggcagtaaaatgatcaatcttcaagagggtgacgccacagacatccccttccatccgcttctgtgccgatcagctgtggcatgagggctacagccccgacgcaggtgtaaacatccgtgtggctctgacactcctacacgagaatgcttcttggatttgccgtaaaacagactaaaagaacgacagttggctccttccggtgggttctcactctggctgacttcaagaattaagccggggatcttctcgtgaggagccctccagacctgctccatagcgacggcaggacctgcctcccagcagagcagagatgagctagtcaggagcaggagaaatgatcttcagactctggggcccagcattccccaggtttcctgcaggtctcaaaatctatcttgaacaaacttgcttacatcatttatttttaaataaaaaagaaccactattgggagaaggtagtgcttgattttttcttcttggcagagttcattccatagcctg

SEQ ID NO: 239770 - DNA, 1902 bp, Homo sapiens
  misc_feature (1308)..(1308): n is a, c, g, or t
gtttaagaaaggagcaggctggtccggctggaaaacagctacaatagcagcaagggttaagcagtggcagagtttagagagacagcacactccaaaagacaaggcagagtgagccgctagaaaaagaatgagccagcagccctgagagttctgtgttgaggtttttcttacatcagactctttaagtttgtgcttctgtcttaagtctctgcctttgtctttgtctggtttcccacttctgccttaagtctctgcctttcccccacctagttcccattccaggtttgtgggattctcccttactgtcatttgttacagaggtacaggctcagtgttggatatgaatccttcctaatcgtgctcattacaatcaccccagggaggtctcatagtggttaaatatgtacttactgcacctgcatgcctcttaggaatttcacctttgccctctttccttccctatcggcatgtagctagctaccttctgacagcttaactgcacagtgagcaattactgggcatcttaagggatgtccgagagtgttccttcctgcatacgtattttgcctcctctctgctcatatctagcatgcatgttttgggtggtctctggggtgtgagattttccagaccttcttttctcaggggcttccccctcctgttcatgtctagctatctgcctgtcctaacatttgcgctagtcttgccttccttcctttctcctttcttcccttccttctttcttcccagttgagctcctgtaatctctcaggagagtgcaaattaatttcattatgagaatttacatctttatttcaatgctgggaatatgaattgggaaaaagctctcattttgaactttcattttgtttcacattctttagaaaaggaggataaagcaggatttggaggcagaaccttagcttttcctttggtttttttaagtgctcccaggtattctccctctctaaaattatcagtgtccgtttttagacacaataggagaaagtggcttttaataaccagtgtctgacttcttagggcaggaagctgggtagattaattgaaacattctaaaactaaataaagttggtatcgggggtccagctgagcacacacaggtgttacatgcaagaccccctagtttgttgccgtatcagaaagtgattgtaccttcagctgaaagcatgagattgtccttagaactagagatagatcccatttgtatttgtttttcctgtttgaaagttacacttgaaatgtacgtagatgttatttgtctacagtaattttcttgtaaccatatcnttaaatctttgtcagatttgtattttctgctttcagtcagcaacacaatatttattcatttcagtactcacatatctcaagttcaactcaatatttcatttattgaagctaaataaaatggctacataatttaccagttattaatgtattctgattgtgccagccttcagtgtgaacctctggaaactaaataagatgtgtgacctatgttcttctatgttgtcttacagctgctgtagtaatagtagttaagatgtattaatgtaagaagtagaatattattacatacttagatgtcagtaatgtctaaatacttcatgagtcttgctatatttaataattgaaaatgccatagtggatattttgacacagatgtacagaatctcagaaaaggctagacttgggcaggactggggtatgggcctagaaattggacaggtgtggtgtgaaattgcaacccttgtacacactggccacaggacctcagggaagatgtcttatctgtgtaataagaatattacttaccttatggatattgtaatgataaagtcaatgaatatatgacaagtccttggaatataataaatactaaat

SEQ ID NO: 239771 - DNA, 503 bp, Homo sapiens
tggaatcagaggaactattgtagtttctactctgttagtacctctgtatgtgagctaatagcaactaactcaaggaagaggaacctgactttaatgcctgctgtgtgttgggcctgtgccagacactttatatttactccgaagcaacacagtgcagcaggtgttactcccatctgatcagtaagaaacccaagattccaatggcttaaggtagcttgtttgaaatatcacagccagtatacgatggaattgcactactcaactaggtctcttttacttaagtctgtgctcttcctattagaccggtagtttttcaaacttacgtaggagctttagggcttctgagttaagttccttgaagatttctgaacaagcagtaggaagtttcccgatttttcctttctttttcctctcccaacaactggtgcagctctactttttaaaatatatatcagattccaaatgggattttcatttgaagaagggtctatgccatctttaga

SEQ ID NO: 239772 - DNA, 454 bp, Homo sapiens
cgtaggaaagtgagagtaccacagaactgtgaaatatacataccatctgcaaggagcttataatattgtaaacaaggtgagacttgtttacattgaataactagggaacaatgttatgagagaatatatagaaagtataattcaagtatctaaagatgtgattaaggcatgtggaaatgaagttattgcttcaattaaatgtattatctctggaggacggcttgagttcaggagtttgagaccaggctgggcaacatggtgagaccccatctctaggaaaaaaaaaattagccaggtatggtggcatgtgcctctagtcccagctactcgggaggctgaggcaggaggattgcttaaggccaggagtttgaggctgcagcggggcataatcatgccattgtgctctagcctgggtgacagagctagaccctgtctcaaaataaaataaaataaa

SEQ ID NO: 239773 - DNA, 461 bp, Homo sapiens
caacagagttagaatcatccccttaggggtgatggggaagcaggcatattcttcttcagggctggaaaaatgtccttctgagctagacttcttcaggccaactgagactaatctatcagattaaacttactaaacattccaacaaaatcaaacctactatacttcccatgcctatacatacagggaaatataaaatgcctcccccagggacaatgcctaattcattccatactaagcacccaaatccaggtcttatcattttgttcttcaagcaaaaagaaaacaaatgcaaagctggagctccccatagtctgcatggagacataagaggaaaactggggccaggcacagtggctgacacctgcaataccagcacttggagaggttgagatggtagaattgcttgagccaaggagtttgaaaccagcctgagcagcacggcaagaccccatcttaacaaa

SEQ ID NO: 239774 - DNA, 1535 bp, Homo sapiens
acggtaatggtcttctctccttagtcctgatattgacaataaacatcaataggagaaatcaagaaaaatgaaaagcaaaagatgtctactatatacttaactacacttttcatccctattgattattgtaaataaggttaaaaaaaaaaagaggcgccaaatgtgaacaaaaccatgattgttattagtagagaacccagtctgtaaaatattttctggacaggagggaacacagggactatgccctacccactggctaccaactaaatgaggagagaccgtttcacattaccagaatccaggagcacactcagaagtaaaaggtgatattctgataatcagctgcagccatattactgaaatttgcttagttgtgatagtggctgttgttatggactgaagtgtgttcctccaatatcaatatgttgaagcccttatctccagtaccccaggatatggatatatttggagataagggctttacagaggtaatttagagtaaatgaagccattggcatgggccctaatacaatcttctgccagggtaaaagatgtaaaattctagtcccagtttcatctttatgtgactttgggtcaatctatgggagctgaaatcaatgccacaatttattgttagaaaagtcatgagaagtggactggaaatatctgaaaatctctgactgatgaaaagacagcttgtgttatcaaaaatccatctcgttaattaggtttagtgttcagttgaaaccaccttcaaaaaattttaaaactctgtctacaaaacagcatattcttatcttagctagtgagtccgtgtagataaggtgttttcaagcctcttctgtgatatactagccaagcaatggatggatcctcattcatgactaaagagacatttttggcaaagtgatctgagatgagctggtaaagttaggccgggggaccatgggatcctaacttcattattcaggaaattctgaaaaacaccaaccacagtgcaccccaagagttcatcacaacactctgagtttcctcaaatccagcacttttttttgttactgggtattggctgttgttatggggtgaattgtgttctccaaaaatgtgtatgttgaagccctaacctccagtactgcagaatgtggatatattaggagataagggctttaaagaggtaatttagagtaaatgaagccattggcatgagccctaatacaatctgaatagtgtcctaataagaagagaaaatttggggctggcaccatggctcatgcctgtaatgccagcacttcagaaggctgaggcgggtgaatcacttgagcccaggagttccagaccagcctgggcaacatggtgaaaccccgtctctacaaaaaatacaaaaatcacccaggatgacggcacacgcctgtattcccagctactcaggaggctgaggtaggagaatcacctgagcttggggaggttgaggctgcagtgagccaagatcatgccactgcactccagcctgggcacagggagtgagaccctctctc

SEQ ID NO: 239775 - DNA, 2627 bp, Homo sapiens
  misc_feature (1706)..(1706): n is a, c, g, or t
gttaatgacgtcacgttgtttcgcgggagaaattcgaaagtggattttgtgcaatttgacaggtggtataaatagttgaatatttcctattttctggacccagctggtttataacttcagaagaaataatggaaagccaagaatttattgttctatatactcatcaaaagatgaagaagtcaaaagtgtggcaagatggaattctgaagatcactcacttaggaaacaaagcaattttatatgatgacaaaggagcatgtttggagagtctgtttcttaaatgccttgaggtgaaacctggagatgacttagaaagtgatcgatacttaatcacagttgaagaggttaaagttgctggagccataggtattgttaagcagaatgtcaataaagaagcaccagagttaaattcaaggacatttatatcctctggccgatctcttggatgtcagccctctggcttaaaaaggaagtttactggttttcaaggaccacgtcaggttccaaagaaaatggttattatggaaagtggtgaatcagctgcatcacatgaggctaagaaaactggccctactattttttctccattctgcagcatgcctcctttgtttcctactgttggcaagaaagatgtaaataatatactggcagaccctgagaacattgtgacttacaagaacagggagagaaatgccatggatttttcttcggttttttctccatccttccagattaacccagaagtgctgtgtgaagaaaattatttttgctcacctgtcaattctggaaataagctttcagactctttactgaccaatgagcctgtgaaaagagatagtttggcatctcactattcaggagtttcacaaaacatcagaagcaaagcacagatattagctcttctgaagtccgaatcatctagttcatgtgaggaactaaattctgagatgacagagcattttcctcaaaaacaaccacaaggaagtttaaaaattgctactaaaccaaagtacctaattcaacaggaagagtgtgctgagatgaagagcacagaaaatttatactaccagcatcaatcagaaaataccatgagaaataaaagccggtgggccatgtatttatcctcacagagttcacctatacattcttctactgtagatgggaatgatacagaaaggaaacccaaggcccaggaagatgatgtaaattctaatttgaaagacctttcattacaaaaaattatacagttcgttgaaacgtatgctgaagagaggaaaaagtataatgtagaccagtcagtcggtaataatgatccatcctggaatcaggaagtaaaattagaaattccttcattcaatgaaagcagtagcttacaggttacttgtagcagtgcagaaaatgatggtatattatcagaatctgacattcaagaagataataaaataccttttaatcaaaatgacaaggggtgcattaaaggatcagttctcattaaagaaaatgctcaggaggtaaatacatgtggaacactggaaaaggagtatgaacaatcagagtcatctctgccagaactgaaacatctccaaattgaatctagtaataattctaggatctctgatgacattacagacatgatttctgaaagtaaaatggataatgaaagtcttaatagtattcatgaatctctgagtaatgtaacacaaccntttttggaggtaacttttaatctgaacaattttgagaccagtgacactgaggaggaatcacaggaaagcaacaaaatttcccaggattcagagagttgggtaaaggacattttggttaatgatggcaattcatgttttcaaaagaggtctgagaatacaaactgtgaagagattgagggtgaacatttgccattcttaacatctgttatgacttagacaaaaatgatgaacatgttttaccctcaacttctagtagtgacaacagtgtccaactattaaataccaatcagaatcactatgaatgtattgcacttgataaatcaaatacccacatttccaattctttgttttacccactgggaaaaaagcatcttatttccaaagacacagaagcacatatatctgaacctgaagatttgggaaagattagaagtccaccccctgaccatgttgaggttgaaactgccagagaaggcaaacaatactggaatcctagaaattcttcagaactttctggattagtaaataccatttctattttaaagtcgctatgtgaacacagtactgctttagacagcttggaaatattgaaaaagaaaaatactgtctttcagcaaggaactcaacagacgtatgagccagatagccctcctgaagtgaggaaaccatttattacagtagtttcaccaaagtctcctcatctgcacaaggattctcaacagatactaaaagaagatgaagttgaactaagtgaaccacttcagtctgtgcagttctcttcctcgggaagtaaagaagagactgcttttcaagctgttattcctaaacaaatagagagaaaaacctgtgaccctaaggtaaaatttgtgaagaacatcgatttatttaaccaactacattttcttttctgtttaaaacaaa

SEQ ID NO: 239776 - DNA, 2610 bp, Homo sapiens
  misc_feature (1689)..(1689): n is a, c, g, or t
taaaccaatacgatctcgacacgtaacttatacacataactctctctacatagagaagcaccagctggtttataacttcagaagaaataatggaaagccaagaatttattgttctatatactcatcaaaagatgaagaagtcaaaagtgtggcaagatggaattctgaagatcactcacttaggaaacaaacggacaaccaaacgcaacttttactactgatgaccaaacggacgcatgtcttggacgagtctgtatcttaaactgccttgaggtgaaacctggagatgacttagaaagtgatcgatacttaatcacagttgaagaggttaaagttgctggagccataggtattgttaagcagaatgtcaataaagaagcaccagagttaaattcaaggacatttatatcctctggccgatctcttggatgtcagccctctggcttaaaaaggaagtttactggttttcaaggaccacgtcaggttccaaagaaaatggttattatggaaagtggtgaatcagctgcatcacatgaggctaagaaaactggccctactattttttctccattctgcagcatgcctcctttgtttcctactgttggcaagaaagatgtaaataatatactggcagaccctgagaacattgtgacttacaagaacagggagagaaatgccatggatttttcttcggttttttctccatccttccagattaacccagaagtgctgtgtgaagaaaattatttttgctcacctgtcaattctggaaataagctttcagactctttactgaccaatgagcctgtgaaaagagatagtttggcatctcactattcaggagtttcacaaaacatcagaagcaaagcacagatattagctcttctgaagtccgaatcatctagttcatgtgaggaactaaattctgagatgacagagcattttcctcaaaaacaaccacaaggaagtttaaaaattgctactaaaccaaagtacctaattcaacaggaagagtgtgctgagatgaagagcacagaaaatttatactaccagcatcaatcagaaaataccatgagaaataaaagccggtgggccatgtatttatcctcacagagttcacctatacattcttctactgtagatgggaatgatacagaaaggaaacccaaggcccaggaagatgatgtaaattctaatttgaaagacctttcattacaaaaaattatacagttcgttgaaacgtatgctgaagagaggaaaaagtataatgtagaccagtcagtcggtaataatgatccatcctggaatcaggaagtaaaattagaaattccttcattcaatgaaagcagtagcttacaggttacttgtagcagtgcagaaaatgatggtatattatcagaatctgacattcaagaagataataaaataccttttaatcaaaatgacaaggggtgcattaaaggatcagttctcattaaagaaaatgctcaggaggtaaatacatgtggaacactggaaaaggagtatgaacaatcagagtcatctctgccagaactgaaacatctccaaattgaatctagtaataattctaggatctctgatgacattacagacatgatttctgaaagtaaaatggataatgaaagtcttaatagtattcatgaatctctgagtaatgtaacacaaccntttttggaggtaacttttaatctgaacaattttgagaccagtgacactgaggaggaatcacaggaaagcaacaaaatttcccaggattcagagagttgggtaaaggacattttggttaatgatggcaattcatgttttcaaaagaggtctgagaatacaaactgtgaagagattgagggtgaacatttgccattcttaacatctgttatgacttagacaaaaatgatgaacatgttttaccctcaacttctagtagtgacaacagtgtccaactattaaataccaatcagaatcactatgaatgtattgcacttgataaatcaaatacccacatttccaattctttgttttacccactgggaaaaaagcatcttatttccaaagacacagaagcacatatatctgaacctgaagatttgggaaagattagaagtccaccccctgaccatgttgaggttgaaactgccagagaaggcaaacaatactggaatcctagaaattcttcagaactttctggattagtaaataccatttctattttaaagtcgctatgtgaacacagtactgctttagacagcttggaaatattgaaaaagaaaaatactgtctttcagcaaggaactcaacagacgtatgagccagatagccctcctgaagtgaggaaaccatttattacagtagtttcaccaaagtctcctcatctgcacaaggattctcaacagatactaaaagaagatgaagttgaactaagtgaaccacttcagtctgtgcagttctcttcctcgggaagtaaagaagagactgcttttcaagctgttattcctaaacaaatagagagaaaaacctgtgaccctaaggtaaaatttgtgaagaacatcgatttatttaaccaactacattttcttttctgtttaaaacaaa

SEQ ID NO: 239777 - DNA, 2783 bp, Homo sapiens
  misc_feature (1862)..(1862): n is a, c, g, or t
gttaatgacgtcacgttgtttcgcgggagaaattcgaaagtggattttgtgcaatttgacaggtgaggtgaagtgtttctcgggatttcctaggaatgacttgagcgatttggggcgaagggacgaaagactctgctccttaagaagagaaccgggaaggatgctgtttggaaccaggattggggtggtcgcagtcacagctactcggactgcttgtagtggtataaatagttgaatatttcctattttctggacccagctggtttataacttcagaagaaataatggaaagccaagaatttattgttctatatactcatcaaaagatgaagaagtcaaaagtgtggcaagatggaattctgaagatcactcacttaggaaacaaagcaattttatatgatgacaaaggagcatgtttggagagtctgtttcttaaatgccttgaggtgaaacctggagatgacttagaaagtgatcgatacttaatcacagttgaagaggttaaagttgctggagccataggtattgttaagcagaatgtcaataaagaagcaccagagttaaattcaaggacatttatatcctctggccgatctcttggatgtcagccctctggcttaaaaaggaagtttactggttttcaaggaccacgtcaggttccaaagaaaatggttattatggaaagtggtgaatcagctgcatcacatgaggctaagaaaactggccctactattttttctccattctgcagcatgcctcctttgtttcctactgttggcaagaaagatgtaaataatatactggcagaccctgagaacattgtgacttacaagaacagggagagaaatgccatggatttttcttcggttttttctccatccttccagattaacccagaagtgctgtgtgaagaaaattatttttgctcacctgtcaattctggaaataagctttcagactctttactgaccaatgagcctgtgaaaagagatagtttggcatctcactattcaggagtttcacaaaacatcagaagcaaagcacagatattagctcttctgaagtccgaatcatctagttcatgtgaggaactaaattctgagatgacagagcattttcctcaaaaacaaccacaaggaagtttaaaaattgctactaaaccaaagtacctaattcaacaggaagagtgtgctgagatgaagagcacagaaaatttatactaccagcatcaatcagaaaataccatgagaaataaaagccggtgggccatgtatttatcctcacagagttcacctatacattcttctactgtagatgggaatgatacagaaaggaaacccaaggcccaggaagatgatgtaaattctaatttgaaagacctttcattacaaaaaattatacagttcgttgaaacgtatgctgaagagaggaaaaagtataatgtagaccagtcagtcggtaataatgatccatcctggaatcaggaagtaaaattagaaattccttcattcaatgaaagcagtagcttacaggttacttgtagcagtgcagaaaatgatggtatattatcagaatctgacattcaagaagataataaaataccttttaatcaaaatgacaaggggtgcattaaaggatcagttctcattaaagaaaatgctcaggaggtaaatacatgtggaacactggaaaaggagtatgaacaatcagagtcatctctgccagaactgaaacatctccaaattgaatctagtaataattctaggatctctgatgacattacagacatgatttctgaaagtaaaatggataatgaaagtcttaatagtattcatgaatctctgagtaatgtaacacaaccntttttggaggtaacttttaatctgaacaattttgagaccagtgacactgaggaggaatcacaggaaagcaacaaaatttcccaggattcagagagttgggtaaaggacattttggttaatgatggcaattcatgttttcaaaagaggtctgagaatacaaactgtgaagagattgagggtgaacatttgccattcttaacatctgttatgacttagacaaaaatgatgaacatgttttaccctcaacttctagtagtgacaacagtgtccaactattaaataccaatcagaatcactatgaatgtattgcacttgataaatcaaatacccacatttccaattctttgttttacccactgggaaaaaagcatcttatttccaaagacacagaagcacatatatctgaacctgaagatttgggaaagattagaagtccaccccctgaccatgttgaggttgaaactgccagagaaggcaaacaatactggaatcctagaaattcttcagaactttctggattagtaaataccatttctattttaaagtcgctatgtgaacacagtactgctttagacagcttggaaatattgaaaaagaaaaatactgtctttcagcaaggaactcaacagacgtatgagccagatagccctcctgaagtgaggaaaccatttattacagtagtttcaccaaagtctcctcatctgcacaaggattctcaacagatactaaaagaagatgaagttgaactaagtgaaccacttcagtctgtgcagttctcttcctcgggaagtaaagaagagactgcttttcaagctgttattcctaaacaaatagagagaaaaacctgtgaccctaaggtaaaatttgtgaagaacatcgatttatttaaccaactacattttcttttctgtttaaaacaaa

SEQ ID NO: 239778 - DNA, 851 bp, Homo sapiens
ctatgattttgctttacccccgaataaatctaaaggtataaacatgaatttacatattcctcatattcaaaaccagattgctgaaaacagtaatctattttcagaagatgctcaacctcagccttttattttgggaagtgacttagacaaaaatgatgaacatgttttaccctcaacttctagtagtgacaacagtgtccaactattaaataccaatcagaatcactatgaatgtattgcacttgataaatcaaatacccacatttccaattctttgttttacccactgggaaaaaagcatcttatttccaaagacacagaagcacatatatctgaacctgaagatttgggaaagattagaagtccaccccctgaccatgttgaggttgaaactgccagagaaggcaaacaatactggaatcctagaaattcttcagaactttctggattagtaaataccatttctattttaaagtcgctatgtgaacacagtactgctttagacagcttggaaatattgaaaaagaaaaatactgtctttcagcaaggaactcaacagacgtatgagccagatagccctcctgaagtgaggaaaccatttattacagtagtttcaccaaagtctcctcatctgcacaaggattctcaacagatactaaaagaagatgaagttgaactaagtgaaccacttcagtctgtgcagttctcttcctcgggaagtaaagaagagactgcttttcaagctgttattcctaaacaaatagagagaaaaacctgtgaccctaaggtaaaatttgtgaagaacatcgatttatttaaccaactacattttcttttctgtttaaaacaaa

SEQ ID NO: 239779 - DNA, 2740 bp, Homo sapiens
  misc_feature (1706)..(1706): n is a, c, g, or t
  misc_feature (2727)..(2727): n is a, c, g, or t
gttaatgacgtcacgttgtttcgcgggagaaattcgaaagtggattttgtgcaatttgacaggtggtataaatagttgaatatttcctattttctggacccagctggtttataacttcagaagaaataatggaaagccaagaatttattgttctatatactcatcaaaagatgaagaagtcaaaagtgtggcaagatggaattctgaagatcactcacttaggaaacaaagcaattttatatgatgacaaaggagcatgtttggagagtctgtttcttaaatgccttgaggtgaaacctggagatgacttagaaagtgatcgatacttaatcacagttgaagaggttaaagttgctggagccataggtattgttaagcagaatgtcaataaagaagcaccagagttaaattcaaggacatttatatcctctggccgatctcttggatgtcagccctctggcttaaaaaggaagtttactggttttcaaggaccacgtcaggttccaaagaaaatggttattatggaaagtggtgaatcagctgcatcacatgaggctaagaaaactggccctactattttttctccattctgcagcatgcctcctttgtttcctactgttggcaagaaagatgtaaataatatactggcagaccctgagaacattgtgacttacaagaacagggagagaaatgccatggatttttcttcggttttttctccatccttccagattaacccagaagtgctgtgtgaagaaaattatttttgctcacctgtcaattctggaaataagctttcagactctttactgaccaatgagcctgtgaaaagagatagtttggcatctcactattcaggagtttcacaaaacatcagaagcaaagcacagatattagctcttctgaagtccgaatcatctagttcatgtgaggaactaaattctgagatgacagagcattttcctcaaaaacaaccacaaggaagtttaaaaattgctactaaaccaaagtacctaattcaacaggaagagtgtgctgagatgaagagcacagaaaatttatactaccagcatcaatcagaaaataccatgagaaataaaagccggtgggccatgtatttatcctcacagagttcacctatacattcttctactgtagatgggaatgatacagaaaggaaacccaaggcccaggaagatgatgtaaattctaatttgaaagacctttcattacaaaaaattatacagttcgttgaaacgtatgctgaagagaggaaaaagtataatgtagaccagtcagtcggtaataatgatccatcctggaatcaggaagtaaaattagaaattccttcattcaatgaaagcagtagcttacaggttacttgtagcagtgcagaaaatgatggtatattatcagaatctgacattcaagaagataataaaataccttttaatcaaaatgacaaggggtgcattaaaggatcagttctcattaaagaaaatgctcaggaggtaaatacatgtggaacactggaaaaggagtatgaacaatcagagtcatctctgccagaactgaaacatctccaaattgaatctagtaataattctaggatctctgatgacattacagacatgatttctgaaagtaaaatggataatgaaagtcttaatagtattcatgaatctctgagtaatgtaacacaaccntttttggaggtaacttttaatctgaacaattttgagaccagtgacactgaggaggaatcacaggaaagcaacaaaatttcccaggattcagagagttgggtaaaggacattttggttaatgatggcaattcatgttttcaaaagaggtctgagaatacaaactgtgaagagattgagggtgaacatttgccattcttaacatctgttatgacttagacaaaaatgatgaacatgttttaccctcaacttctagtagtgacaacagtgtccaactattaaataccaatcagaatcactatgaatgtattgcacttgataaatcaaatacccacatttccaattctttgttttacccactgggaaaaaagcatcttatttccaaagacacagaagcacatatatctgaacctgaagatttgggaaagattagaagtccaccccctgaccatgttgaggttgaaactgccagagaaggcaaacaatactggaatcctagaaattcttcagaactttctggattagtaaataccatttctattttaaagtcgctatgtgaacacagtactgctttagacagcttggaaatattgaaaaagaaaaatactgtctttcagcaaggaactcaacagacgtatgagccagatagccctcctgaagtgaggaaaccatttattacagtagtttcaccaaagtctcctcatctgcacaaggattctcaacagatactaaaagaagatgaagttgaactaagtgaaccacttcagtctgtgcagacgggttcttgctctgtcacccagactagagtgcagtggcacagtcacagctcactgcagccttgacctccagcgctcgggccatcctcctgcttcagcctccaaaatacaaaaattacccgggcctggtggcacatgtctgtaatcccagctacttgggaagctaaggcaagagaatcgcttgaacctgggaggtggaggttgtagtgagtcaagatcatgccactgcattctagcctgggcaacanacgagactgtctc

SEQ ID NO: 239780 - DNA, 174 bp, Homo sapiens
taattttgtatctactaaccaacctctccccacccttccaagcccccgttacacactgttctactatttcccatgagctcaaaaaatgttttattcccacatatgaatgagaacatgcaatatttatctgtgcctgactttaaattttgataaaatcttatgataaagtacaat

SEQ ID NO: 239781 - DNA, 461 bp, Homo sapiens
gttcatgtgaggacttggccagttagaactggtaaattgaacattcctcactcagtacacttgtcaagttacaggcccattctaagtcatgctgcattaaataaacaatgctttaaaaaatgtccatctccatagacctcttatctaaaaatcacctatttcatatcaggtgaatgccatgcattttgtagaggctagagaataacttagcggtaggggagatggcataggagtcaatgcctctctggtgggctactttaaaaaaaatacaactttctccataacttttatgtccctatattttgtgttgtggtatttgtgagaggtactttgcatttataccttcaggagacttggttcagcatctagttaattatctacatgtaggtgcttaatatatgccatgccaccctttttgtctccctgtatcatattctatgctaataaaattattttcagca

SEQ ID NO: 239782 - DNA, 348 bp, Homo sapiens
aaaaaattgagccagaataaaattccagatgagtcctgaacagaagacaatgagaaacatatatagtatacatttcccttcctccaccctgcaatatatgtgtttatatatattttatatataaatgcctttgtgcttaatttatcaagaggtgatacactctagaaatgtaagcataaccaaaagtgattcattttgtagaaaacagtaacacttttcataacgatgccaccatctaaatattcatcaagagttcatcactaaaatccaccctttggagcaacatgtacaaaacagtattctgggaaagacacattacaacaaggaccacaggcaggacagatattc

SEQ ID NO: 239783 - DNA, 526 bp, Homo sapiens
gatattggaaagatagctaatctaccctgtgtggaaaagaatgaactttgcacaaagagaagttaggcctttgcttctgagagtattttaagcctttgtaatgtcctgcctgataagatggggttacctggcagcctaagaccatgccagatagtctatgctaacaatgtgattatggtggggctttaggccttgcaatatcaacccaacctctggaaggctggaagctaaggtggtcaatgggtggtcaaccatatctactggtagtcaaccatatctatgtaaccaagccccagttaaaaactctggacaccaaggcccaagtgagtttccctggctggcaatactctgtgcgtattgcccaaacatcattgctgggaggaattagcactgtctagagttccactgtgataggacaactagaagcttgcacttgcaactctcctggaccctgccccatcatgcctcttccctttgctgattttcatttcttacttttcactgtaataaaccataactgcgagta

SEQ ID NO: 239784 - DNA, 856 bp, Homo sapiens
ctttttgaaacataagtcagatcatatcattcccatactcctcctcaacagaaaaccctccaatggcttcagcatcaaggcccacattcacttctctgaccctctctcttacctgttttgctccatttcatcataattttctccttgtacttccttgaatacatcaaggcccttctatctcaggatgtttgcacttgctatttccttttctcaaaggctcatccctagatacttgcatgactggcttcctaatttcttgtaagcttttgctcagaagttactttaccaactgtcattgaggtcttccctgaacatcttaggtaagataacaagctcccctccttttctttcctcacttcttggtattccttatctcataactttttttttttttgagacggagtctcgcgtctcgctctgttgtccaggctggagtgcagtggtgcaatctcggctcactgcaacctccacctcctgggttcaagcgattctcctgcttcagcctcccgagtagctgggactacaggcaagtgccaccatacccagctaattttttgtatttttagtagagacggggtttcactgtgttaggatggtctcgatctcctgaccttgtgatccacccacctcggcctcccaaagtgctgggattataggtgtgagccagtgcgcccggcctctcataactttcttaattattctccatataccatctgaatactaatgtatttatttgtttatttctgaatgagactgatatccataaaaatgatctttccttgtatactctaactccctgctttctgggcgcttggcttctcaattaaaggctaatttaccagcttctcttgcatct

SEQ ID NO: 239785 - DNA, 522 bp, Homo sapiens
gaagcccagctgaaggttacttctaccccaaggccatgtcagcagaaagtggccaacaggacttgggcctgaaaaagctcagactgaattttaggagtgacatctgaaactgctggtttctcacaaggaataaaagctgtctgggaagctggagaggcagtgtgctgtctggagcagggacttgcaaatgggaacagtgaagagagacagcatctccttcctctgaagattctgttcagaatggataaaggttcagcatcctccctggatggggcagcttagcagacccagaggaaagcactgggaggaatgagaaagtagcgactagacaaaaatgaaaactctttaagaagcattgctgaagttacaggggaaaaagattaagacaactgaggttaagggcctgactccagatcacacagcaagggagatggcaaaatcaagatttcaacccaggaaacctgcctcccatgcctatgttaatcactacacccttcccacaataaataatcaaataagcta

SEQ ID NO: 239786 - DNA, 351 bp, Homo sapiens
ctactaaaaatacaaaaattagcctggcatggtggtgtgtgcttatagttctagctactcgggaggctgaggcaggagaatcacttgaaccggggaggcagaggttgcagtgagctgagattgtgtcactgcactccagcctgggtgacagagtgaaactctgtctcaaaaaaaaaaagattcaaattacttgggtgaggtggtaagtgcctatagtcctagacactcaggaggctgaggaatgaggattgcttgagtctaggaggttgacactgcagtaagctaggatcacatcactgtactctagtttgggcaacagaatgaggccctgtctctaaaaatatttttaag

SEQ ID NO: 239787 - DNA, 527 bp, Homo sapiens
ctgaatctgcccctagtaattactaataaggctagtaggagcattcttgttcaccttctgtgcatgcgctggactctaatttgaacctaggattagcactgcggcatcagaggctatgggggctgttcagctttcaaagataaagcagaaatgttttcaaagtggttgtaccaatctatactgccaccagtaccgaccacaattctctctaaatcctcgttattttcacacttcttactttttgctagtctacccagaataaataccatgtttttgtcttaatttgcattccgtaattactgataaggctgagcactttgaaatatgttattcattcatgttttctcttcctcttctaaggatgtgtgtgtgtgtgtacatatataaatgtatatataatgtatatatgtatatataatgaaacattcttttgttaattgtatgtgttgcagatatcttctccctgtttatagtgtgttttcaaataaaaaaattttttgacttattttgaaaaaatcaaccttaaa

SEQ ID NO: 239788 - DNA, 1178 bp, Homo sapiens
ctggctagaagtacagttttacatctcatgttaagtccagtgaatttttctcctttaagaagaagggaaaacatttcaaaattgggtctaacttatttagtctttctgtctctgcttctttcttgtaattgtgccaatagaatactccaatttttggtatttaaaaaactaatctttgtttccatactttttagtaaaaactgctttggatattttgaatatttttacttctaaaacatgggcttcatttaaatgatatatttaaaatatttctacaaaacatcttatttaaatatattaatccaaaatccgacacttcttcatcatggtcctggggaaggcatggagacaaaattcaatagtgctaagaatccaagtggagtcactggccataatacttcacttagctatttacataaactccagtgtcatgcaagtacaaccaatggactaactacagctggtcccaattgtacaacccaatctcagtgaactgggaagactcagcactgaccccagaccctccatcactgtagaaatacttacacagctacaagtgaaacctcttcactgatagccccttcgaaagggtgcattgttgccagactacagtctccctgcccactttccaaggaataggcaatgcacatatgggccagctgtaatgagttcattagttgtgcgtgcattacaaaggaggactcagagtctctcctccctgaatgtgaattgcaagtgccattgccctcagggatggatctgaacctggaaagccaccacacagaatgcatctggagcgaatgcactgtctgcaagctttgatacaatcatgcaatcaactaacttaatcccttgattttctaagttttcttaaaataatctaaaattccttgctgaaattctaatccagctctatggagcaagacttctttggtgcttaagaacagtctgatgggctggaagcaggttatttgaggtaacctcaatgtagataacaacattaaaaccttagttctccctagaattttgaactcttaaaatgatccctactacaactgttcagttaagtatgaaatttatgtgttgagagatatctaataaaagtatgtcttttcttcataatgatagtcacttatactataacattaaatatgcattctgaaaaaacaaaataaacc

SEQ ID NO: 239789 - DNA, 614 bp, Homo sapiens
tgcccactttccaaggaataggcaatgcacatatgggccagctgtaatgagttcattagttgtgcgtgcattacaaaggaggactcagagtctctcctccctgaatgtgaattgcaagtgccattgccctcagggatggatctgaacctggaaagccaccacacagaatgcatctggagcgaatgcactgtctgcaagctgaggctctgaggaacagacaactaataaattgatcaaaggcacttccattttctttgatacaatcatgcaatcaactaacttaatcccttgattttctaagttttcttaaaataatctaaaattccttgctgaaattctaatccagctctatggagcaagacttctttggtgcttaagaacagtctgatgggctggaagcaggttatttgaggtaacctcaatgtagataacaacattaaaaccttagttctccctagaattttgaactcttaaaatgatccctactacaactgttcagttaagtatgaaatttatgtgttgagagatatctaataaaagtatgtcttttcttcataatgatagtcacttatactataacattaaatatgcattctgaaaaaacaaaataaacc

SEQ ID NO: 239790 - DNA, 449 bp, Homo sapiens
ccaagtcaggacacggcaagaagatggccatctgtgaaccagaaagagagccctcagcagaactcaaccatgctggcacccggatcctggacttcccagcctccagactgtgagaaataagtctctgttgttcatgccaccctgtctatgggattgtgttacagcagcccaaacggactaagatgatggcactgatgtcgagtctgtgtgcagcatacccatattgtcctgtgttacagattatattttccaaagatggctgcaacaatatcttgcagcatcccacgtgtgctctccttacagggtaacgctgccatccctcccattaaaggggactcgaagtccactctcctcgaagacggagggcctctgtgacttccttgaccaagagagttggttgaaagtgatgctatgtgatttatgaggtcataaaaatacatatttctatc

SEQ ID NO: 239791 - DNA, 380 bp, Homo sapiens
gaaatgttccaggtctgtgaaatgtcaaatctgacaacagcttgacaaaaattaatcaagagaacaacttgacttaatggagagtgcacagtgttttttggctcagaacagtggctctccaagtgtggtactctaaaccaatagcatcagcactaactgggaacttgttagaatgcaaattctcaggctctatctcaggtctactgaactagacactggggggtacagcccagcaatccgtatttttaaaaagcccagccaggcatggtggctcacacctgtaatttccaacactttgagagaccaaggtgggacgattgcttgagcccaggagttctagagcagcctgggcaacacagggggaccctgtctctacaaaa

SEQ ID NO: 239792 - DNA, 509 bp, Homo sapiens
ggaggtacctgtgtttccttaaatgacacatggaattaaactaccaaaaattggtgtttaaatttaactcataaaatttgaaaaccattttaatacattcaaaattatttcaaaaattattatttgttaatataaaccactttagataatatatgtttctaatttgcttttttgagctataaatatttaatagagaatgtagttcttgtattggacaccttccagaattctgcaaagtctttcagtttgattcttaacaaggtggtgttggtttgttttttctgttaattttctgtgcttgactattgaaaacttagaattgggatgccaaagttacttcctacacaagaacatatagtttcatccttccaagaaatttgtagtttagagaaaataaaatttcaaccattcctttgtaaaacttatactgtgttgaaggtaaatatattatagtaattttcagttcaatatatgattatgtaatttgaataaaccaaatattgttaaca

SEQ ID NO: 239793 - DNA, 195 bp, Homo sapiens
gaatggcttcacagtatttgagtaaaaagagaagagtgttgggctcctgacagaagcttggagatttagaggaagagggggaatcaaaagaggaagatggtaagggagtaaagtagtggagagagggaggagtaagacccaggaaagcttattgttccagagaccaaaggaggaaggagtttaaggaggcaagga

SEQ ID NO: 239794 - DNA, 499 bp, Homo sapiens
tcaacagataattcaaataagtatatatgtgaacaataaatattagaaaacacagaaaccacaagaactaatgagatgcaaatattttaaaatcctgagaatttataataattggaaacaacaagatacaaaagatgaggacgtgattgcacatttggaacagacaatatgtgtgtgtttgtgtgtgcgcgtgtgtgtgtgaatgtgttcatgtgcacctcacaggagcacatctggagagtatgcaccatcctagggacagtagaccccttggaatcaaagggtgggagttggaccagtgagagtgcagattaatttcaatttatgaatgtactcatatattgtttaaaattcagtatttgggaatacaaatattttgataaaaatttgaacacaagatagttttgaactgattgtcaaagataatatgcacatattttcattaatttgaaaaagaattcattgtgttatattatgaaagaaataaaaaatttaattg

SEQ ID NO: 239795 - DNA, 972 bp, Homo sapiens
atcacagtgtacagtaaccacactaaccaagttgcagtgaataccacaattactaaagcagattctaataccacagtgaaaccagcttttccaagtggccttcaaaaacttggtgctcagactcctgtgactatatcagccaatcagattattttaaacaaagtatcacagacatctgatcttaaacttggcaatcagacccttaaaccagatggacagaagttaattttaacaactttgggcaagtctggttcaccaattgttttagcactaccccatagccaactaccccaggctcagaaagttacaactcaggcccagtcaggagatgctaagttaccaccgcagcaaattaaagtagttaccattggagggaggccagaggtgaaacctgtcattggtgtctcagcattgaccccaggaagtcaactgattaatactacaactcagccctctgtgttacagacccaacagttaaaaacagtacagattgctaagaagcctcgaacgccaacctctggtccagtaatcacgaagctgatctttgcaaaaccaattaatagtaaagcagttacaggacagacaactcaagtttcaccaccagtcattgcaggtagggttctttcacagtctactcccggaactccatcaaagaccataacaatatctgaaagtggtgttattggatcaactttaaattctacaacacagacaccaaataaaatagccatctcacctttgaaatcgccaaataaggcagtgaaatcaactgtgcagaccatcactgttggaggagtgagcacatcacagtttaagacaattattcctctggcaactgctcccaatgtccagcagattcaagtgcctggaagcaagtttcattatgtccgacttgttactgccacatcagccagtagctcaacccagccagttagtcagaatcccagtacaaacactcagcctcttcagcaa

SEQ ID NO: 239796 - DNA, 541 bp, Homo sapiens
tacagtgcctgatcaactttctagcgggagaacgatcatggaggtggtgccagctgagattgctaagaagcctcgaacgccaacctctggtccagtaatcacgaagctgatctttgcaaaaccaattaatagtaaagcagttacaggacagacaactcaagtttcaccaccagtcattgcaggtagggttctttcacagtctactcccggaactccatcaaagaccataacaatatctgaaagtggtgttattggatcaactttaaattctacaacacagacaccaaataaaatagccatctcacctttgaaatcgccaaataaggcagtgaaatcaactgtgcagaccatcactgttggaggagtgagcacatcacagtttaagacaattattcctctggcaactgctcccaatgtccagcagattcaagtgcctggaagcaagtttcattatgtccgacttgttactgccacatcagccagtagctcaacccagccagttagtcagaatcccagtacaaacactcagcctcttcagcaa

SEQ ID NO: 239797 - DNA, 734 bp, Homo sapiens
cagcatggcgcctggcacctagggaacaccagcagccaccgccacagcacccatccaccacgacaccaattacccgggcatagaagagccacaggagttagaacccacacttcggctcacagtccccaccctgctgccacaggagttagaacctacacttgggctcgcagacccccccgctgccactggtggttatgagacctttgggtgtcaccaccacattggaaatgagtttttttttaacctgtaaaactaggctgattttgaattccagggctagtcctgagaattaagtgagagaatacatgtaaagtcgtgtaactggagaagttatatgcacttgctgggtatgactacaggactggcatttacggattgtttatagaggtctgggcattgggttatggtttgggatttgactgtcacttgacagccacggccgctgtgaatgacagaaatgaggttcttgacccttccttaccggtcagctgtatgcagtgtggtggtattgtcctagatgttttgcataacagacctgtcatcatacagatgaggaaactgaggctcagaaaggctaagccgcttaaccagaagtcacatagctactaagaccaagttaggttttgaatctagacttctgactcctaagctcaccagatcttaacctacttggaacccactgcttggtagtgaattataataaaatattaactgtgtttctaaccaaatcagtg

SEQ ID NO: 239798 - DNA, 929 bp, Homo sapiens
ttaagatgggagagatgaagagtgttgtttctccttggtgacatccccaagcaacctcagatatgctcttccttggggcctctggttttgttgctaaattgtccttgttgagacagttgggggggtgtatatttcaggctgcatgccaaccaacacactgcccagggacgggatgggaaatgaaccacacacatctagttctcctggtcactgttgtactgctccatcctgaacaagagagtgtggaagagtgggtctacaggtaagccattataaccaaactaccctcacagtttagcctcacaagggatcctttatgctaagaagaatgcccagctgatggggattaacaagaaaagcagaggggaggggggtcgctggaagcccaagagaaggaaattttttaaaaaatacaagtttcctgtcctacacaagcagtatgaattttgttatcccaacgggagtcctgatggtaaaatctagtttcaaagtaggatggggaaatggatcaagccttaccatggcaaagctgggtgggacctcctaggcgtctgtgggaccttgggctctccggatactgtgtcttggtttggggactattttcattctgtctcaagcctaggtttgtagatgcccttggccatgatacttactagctgtgtgattcagtacagaggacaagccccactttattcggagttaacctatggtgcagtggccttagaaaaacttaagagtaaaaagctaccataaaaaatgctggttatatgtatgaccagacggtcaactcctccttcttctctctctttgctataacagcacctgttggcttctaagtgcacagagttctcacaacaatgtgccaaaaccgccacccttcccatcctggcacccacctccccccaccccaggagacctgcatatcagat

SEQ ID NO: 239799 - DNA, 398 bp, Homo sapiens
gaaaggcagacattacatgttctcacttatttgtgggatctaaaaatctaaacaattgaactcatgaacatagtaagtactagggggctgggggggggggagacagggcacgggtaatgggtacaaaaataggcagaaggaatgaataagacatactatttgacagcacaacagggggactctagtcaataattgtacatttaaaaataactaaaagaatctaattggattgtaacacaaaggaaacatgcttaaagggatggataaccactctccatgatgtgattagttcatgctgcatgcctgtatcaaaacatctcatgcaccccataaatatatatgtttattatatactcacaaaaatgcttgaaaataaaaataaaggaactactgaaggt

SEQ ID NO: 239800 - DNA, 312 bp, Homo sapiens
aacaagtgacagtgtttgacagaccttatatctcctttctatcacaccaaaatctctgtagtgagctcaggcaatgttttgacctgctggtgtgctgatgcacttcaggataaaaagaattggtccacattgtagcaataacttccaggaagaaacgagtggttgtggagctgataagtggtagcaggttgactccaaagcctagcgtcttaacctctatcatacaccgtttctcaatcaaaatggaagaaccattttaaacacattaaaccctagtggctttaaataaacacatggccaatgagttatcaa

SEQ ID NO: 239801 - DNA, 387 bp, Homo sapiens
ccacccacctaccccaccacttcaaacccgcctctctactttgtcacctgagtgaattgcaattctatcctgctgattgatcaagccaaacaccaatgagcaattcttgactctctcccgtaatctattaatacatgagatccattggcaatttctatcagttttaccttcaaaatttatccaaaatctgaacacttctcactttctgcactgccaccatcctggtgagcccaccatcccgccattgacattgccccctctcatctcaatgcaagaggtgggtttgaatggaggttcaaactcgcattagacctgtggtcctcacacatttggtctcagaatactttcttcccttagaagtgagcgactggagacccctaaaagctc

SEQ ID NO: 239802 - DNA, 382 bp, Homo sapiens
agcaatcctcccattttagccttccaagtagctgggattacaggcatgcaccaacacagccaattaaaaaaaaaattatagaagtgcagtcttgctacgttgcctaggctggtctctaacttctggccccaagcaatcctcctgtctcggcctcccaaagtgctgggattacaggtgtgagccatggtgcctagcctccccatcttgataaattagcaaatatggtccaacagaaattacacatgatttcaaataaataaaacttattatataagacctaattaattagtgaaggggtgattatcctcattgcttcaacatttagcagtagaatttggcctgttcttaaacctgcaaagaataaatggtgtttcacagtgga

SEQ ID NO: 239803 - DNA, 384 bp, Homo sapiens
gcatgtgttattcttttggctcattgaaactaaaggttccagagcaggcctttgtgggtctctggataggtcacaggcctctgctgtccagtgcctcttgcaccattctctactctgtaccacacagcccatttcaaacccccaaaccttttctgcctccgaaagagtttgtgggcatggtctttgacctaccactttgttgtcctaagaatctcttctgcatggacatttacctcatttaaatagactgattttgatccttgctctaaaattccctctgtatctgagatatgggcacttccctatttgatatgatatatgtccattagcataaggggaatcagctatgagatcctgagtataaaacaccagggatcggcttgg

SEQ ID NO: 239804 - DNA, 540 bp, Homo sapiens
ctgattcagtaggtccggggtgggtcccaaggatgtgcatttctagcaagttcccaggtcacatgatattcctcttctgaggaccacacctggagaactaggaaggtaagctgagtgaaagtaaagtcagtctatgcttctgctccctttcttcctgtttatgaggttataagaagtttgtgtctgattctcctctatgtccttccacaatgctaactcacccaacaagaatactagaagaacatcatttgctgtgtaaatgataaatagtctgtgagcatcagaagtgtttttaaataaatcaggcaatgaatcccatcaggctttgaatgagttctaaggagtttgccactattttcagtaggaaaatagacatccttcaaagaaaatgtatcctcaaattcagttgtgctactcattctaacagcatttttaaagcctttgcagttattcctctttattatttttaatgaagtcaagtcataaagtttgtggaacagggaaaaaaccttgagtctgttaggatagggtaatcagatt

SEQ ID NO: 239805 - DNA, 694 bp, Homo sapiens
cagaagcctgcagggccagacaggtaacttaatggaggggatggggccggatgtgcagttaatgagttggaggatccatgtccagtctaagaggcagccccctgttagtgccagctgagtcatgaagaactgtgaatcagtcagacttgatttttcaagcaaagggagatacccagatttttgtgtaagctcctccaaagttttttctttctttctttctttttttttaatgttggacaaccagtgaaaagcaaaacaaaactacagaccaaaacaaacgttgctgcctgctaccagtttgcaatttcttatgcattccatgaaactgactagttgacagtcttttcagattgacagtccatgaacaggaatttgctaatatttctaagactcagaccttggcagaaagatcggaaagcaaggtagaatttggagaccgggttttataattgtaagatctcacttttgtgaattgctgattagaattcacaaaagttagatccatggtgcagtgcctcttctctcatctctaagtttaggaagccctcagcaccttttgaactgtgtaacctgacaagaaagatgtctggggaattagcaagttctatttttgtttggtccagtgaaaattctggacaggccacaaacacattctagggagtctagaatagactcccttgagctcttttaattc

SEQ ID NO: 239806 - DNA, 599 bp, Homo sapiens
ttcaagaccagcctggccaacatggtggaaccctgtctctattaaaaatacaaaaattagctggatatggtggcaggtgcctgtaatcccaactactcgggaggctgaggcaggagaagcacttgaacctgggaggcagaggttgcacgtgagaccgagatcgtgtcactgcaactccacacctgggtgtcacagtgagaatctgtttccaaaaaagaaaaaaaaaaaaagagaatcccaggaaaaataaagagacccaaatgttaggtgttggaattaattatatgacaccctacaggtgtcagcctctgcatccctctctctttcaaactccatgcagagtatcttatgtattgagacttttaaaaaataaataaataagatccttatatgacagagatataatctaaaatcccttgaggacgtattctttgccattatttacaaaggtgactcttttttcttgatataaaatgtaaggctgggtgtggtggctcatgcctgtagtcgcagcattttgggaaggcaaggtgggaagatcacttgagcttgggtttgagaccagtccaggcaacatagagagatcccgtctctatggg

SEQ ID NO: 239807 - DNA, 654 bp, Homo sapiens
gacacaccaacaaaaagattagaaaacaaataggatgaactgttaaaatgacagtaatatacagcagctataaagcaaagtatggatgtcattaagtcacagaaatatgttttgaagttaatcaggagctaaaattataagctgcatagcaaggtcctgttagaaaggaaacagacaaaaggagaatgctggcaaagtgagatggagtctgagccgccaggcatccgagcctgattgaggccatggaggtgggtcatggcaccttgcccaagcacttctgctctaatgacatgagtacatgaagttctttgtgaaaaatagggccgattgtatttaacttaataacttgaattatattctttgtgtataacttttcagagaaggcagttttgctttggggactgaaaagcccgagttgtagtttcaatgtcaatttatttcatcaacactagaaactaatatattaactaaaataaagatgccaaaaaatgtatttcacgttacaatgtatctttagcactttcttaggaatgagtagattcatgacacaagattatctgatctagtaatatattctattcctatatttaatgtgttttagaggcaactaccatttaaggataataaagttgtttcttttggctccttaaaaaa

SEQ ID NO: 239808 - DNA, 427 bp, Homo sapiens
tcaggttttgtactcattgtggggaagtgaaaccaagaagtagttgtctccagtggttgaagtctcctattttcaagcgttccctgtcgtggatttggcacttgcagctcattcaaggcaaagtttcaagaatttaaaagtgtaggccgggcttagtggctcacgcctgtaatcccagcactttgggaggctgaggcgggtagatcacctgaggtcaggagtttgagaccagcctgaccaacaaggtgaaaccccgtccctactaaaaatacaaaaattagctgggcgtggtggtggacacctgtagtcccagctcctcgggaggcttagacaggagaattgcttgaacccaggaggcggaggttgcggtgagccaagatcacgccactgcactccagcctgggcgacagagcaaatactccgtctc

SEQ ID NO: 239809 - DNA, 317 bp, Homo sapiens
tacttcagtcttgtgaccagtaattttaagggaaagccaataataatgtttttaaaaagcctcacgccacccctggcggcatctcctcggtgtactttgctgttcagatccgcctgccttctgtgccagcctaacagcgcccggcctcagcccccattgtccctggagctggcgaggtgtccggttgcggagccggcggcgtctctggaaatgcatcctgcatccccgcatggataacagctgcagctatgtcagaattgcacaaagaggggagagtgtcattgtgtgccttttgacacatacattaagaccaaaaa

SEQ ID NO: 239810 - DNA, 475 bp, Homo sapiens
catgcccaccttactttcttattcattgcatttataccagggcaattgattccaatgaagggcattcactggtaactccatgaaagcgtcttattcttcttgcagtgtgggcttattcttccctggactagagtttctcaattccactgctactttcccagatctgttatgcccagaagatggagggctgccttccagaagagtggccacctcccaaagctactgcctatcaagtgatgatttaagaggtgccctgaatgaagtataattctgtagtgggctccatgtgccttttgtgggttcgagttccatgtcgtgcaaaagtgaaaacattcagcatttgtatagcaatgaagatgactctggagaaatcacactgtgttttccttttcctgcaaatgtctttctctgtttttacctccctgtaactgcaatacacagttctcgttacctaaataaactgagatatggtctg

SEQ ID NO: 239811 - DNA, 283 bp, Homo sapiens
gccaccatgcccagcctataaggtcttttattaaggcaggcttacaaccaaagtgatcctaaaaaaatttttaaagcctctaccaaaaagagggaggctcagcctgagagaagactcaccagggcagaagaggcgagccgtgaaagtggagagctcaaagggctcctgtaagtgctgcatactggtaccaagaattgccagctctgtccaaaactgatcctacttcaggtcctgcttccagacgctatttatgtcaccctaaataacagagaggctctctcta

SEQ ID NO: 239812 - DNA, 646 bp, Homo sapiens
gaaatggagttttgctctcgttgcccaggctggagtgcagtggtgcgatctcggctcagtgcaaccactgcctccggggttcaagtgatccgcccgcctcagcctcccaaggtgctgtgattacaggcgtgagccactgtgcccggcctgatttaatactttttaatggtatcatagctactttatgacatttttcttattactgttacgcaaattctgaatgaaacttttctaaaaagctgcacaacgggcccttctaaataataatgctaccttaattgttagtgtgcagctcaacagatccgaagtttccccatcaccctatagaaactgagcactattttttacatcccttttcaaaacaatagatgaggtaagaatttgaaaattcatagtttgttttcaatatgaataaaatttgtcccgtttttaagttgtattttcgtaatgaaaatcttagctatatcattttcttttttctctccttgttccaaactttcaggtttgtgtttaatgtctaagaaaggaaatactagaactttcaatttagttaaaaaacagtaacatcttaagtgtgataaaccaaacagaaatgtctctatgtttggcaaagtcacattccccagagatttactaaacagcaaca

SEQ ID NO: 239813 - DNA, 736 bp, Homo sapiens
atgtttatgtagttaaaattttaatatttgccaatcacaaaattctaaagaagtctgattgggctgctgcgttggatgtaaatgtgaaatcaccgtcatctgtttatttttgttcttttacttttctaattcaaagtaacaaagtgcacatgcattgtttttaccagaacatttttgaaatgaaattttgtgagaaattactgagaatgaggattttttcttttgaaatttcctaagatatatgataaacaattcttggtaattgattgctatatgtagaaccctaaattgtttcactgaattacaccagtgtgggttttataaaaaagtaaaggtagttttgcttctgcttttgaattctagtaaattatgttatgactaaagagtgacttgtcactaaaattgtcaacatgcattattgaatgttgtgtgctgttcatatggataaaaatgtcatgatctggatagatgtgtgggcacgttggactatgaagtaacctggccgttgttgtttcagaatcttagattgtcatatttatgtatttaactgttagtccttcagagagtttgataagtaacgtgaagggatagataccacaaatttgtagtagtttaacaagtttgtattagtttagctatatagggttttgtttttttgttgttgtcatatattgtttgttggaataaaaaatgttttatttaggtatgaattacttggaataaagtttaccaattt

SEQ ID NO: 239814 - DNA, 306 bp, Homo sapiens
atattttaacatttttatcatttcagctgttctcatgggtacagagtaatatcacattggttgtggttttaatttgaattttcttaatgactaattgaatttaaaatttttttgggctgtttggatattctcttgtgaaatatctgtgcatgatttttgttcatttttcttttgggaagtctcccttttgatttgtagttttctgtgcactttggatataatttttttttcagatacatgtattatgactatcctctcactctgtggtttgccttttcaattccttaataatacatttgataaaca

SEQ ID NO: 239815 - DNA, 436 bp, Homo sapiens
tactgtatacatggtgctttgccagacactgattgtccaaaggggagtcactgtgattcccagctccgaggtggactatatgtataggcacgaagagttagctcttcagacttctcatcactctccaaaggccttggattggtaggttgctttgtagcttccaaagcacttctatatatgttcagtctaagtgaaaggaagagcccagcacggtgagtgtgggaggaaatgtgaagagtgccctgagcatcaccaccacggatgagtcttgcctgaatcaattactgggatgagtgtcaaatggttttccaattccatcattccttctatgtctatttagttggcatcctactgcaagggagagctctcccttctcccccatgtagcgatctacttgtttatatttgtataaacccagattcttattttattccat

SEQ ID NO: 239816 - DNA, 477 bp, Homo sapiens
gagagagagagacaaagaggcagacagagataatcacttatttgtttattccacaaaaactgaacttcgtctatgtgaagcaaccctcttcctcattctaatctctaatcctttatctgcttagggctaaaacaccaaatcacttatgttaatactgaaaataaagaaaaagtaaatgggttctactaaacatatcactattataaataaatgtaaatgaatttaagtgtctgttaaaaggagctttatatatacttattcatatatacaacagattactcagccttagaaaggaaattctgatacatgctacaatatggatatactttaaggacatcatgcttcagtgaaataaactagtcacaaaattcataaatggtggttgctgggggctgagaagggggaactggggttgtgtaatgggtatagagcgtcagttctgcatggtaaagagttctggaggatggttgtacaaca

SEQ ID NO: 239817 - DNA, 497 bp, Homo sapiens
cagtgagttgggataaatgaaacgtggatctaccatagacgtctgtccgtcttactggataagcgagcacctttaccggggaagttagatggctggagtcagctggcaaatacagaagcaggaaacattacactgaagctcagaaaataatatccccaaatgaaggcatcagaaataaaagttcttctctgaccttctttctctcaagacattgtattatgaaaaatttccagcatacagaaaagttgaagaacacccacatgcctgctactcagattctacaataaacatttgctatatttgttttacctacatatctagtcatccatccatccattcatattatttttaatgcacgtcttattttttaatgcactgtcaactacagacatcagtactcttcacctccaaacatttcagcaacatatcattaacgatagtcaaaaatttgtttagagttccttttgttttaaataaaatttataaagaatgaaatg

SEQ ID NO: 239818 - DNA, 432 bp, Homo sapiens
atcttcacaaaagtttttcagcaaagaccatgacgactcctcattttcttgtgaaaatggttgcatgggatgctagaagtgaaacttgcttttgcaactgaaatgtgtatcatactatttgtcttcggtagccaggacactgagtagatgtaacgttgcagagaattttgcatgaagcctttttattgctattttttagaaatcattttggagttttgagaggctaggcagcaatctataaaggttgcttattaaatgacttcctcatcatcctaagaaataatcataaaagagtttaaaaattccttttggccaggcgcggtggctcacgcctgtaatcccaacactttgggaggccaaggcgggcagatcatgaggtcaggagatcgagatcatcctggctaacatggtgaaaccccgtctctactaaaa

SEQ ID NO: 239819 - DNA, 343 bp, Homo sapiens
gcttcaagttggggttcccatgaccccctctctgggttcagttaatttgctggagtggctcacagaactcaaagaaacacttaattatatgtactgttttgtcatgaaggatattacgaaggatatgaatgaagacatgtatagggcgaggtatgggggaaggggcatgaagcttcatgcacccccttgggtgcaccaccctccaggaacctctacatgtgcaggtatccaggagctctctgatccctgtcattttgggtttttatggaggcttcattgcataggcatgattgacaactgtgtagaaatgtgattggacaaaaaaaatttgatttaaacccgg

SEQ ID NO: 239820 - DNA, 2363 bp, Homo sapiens
  misc_feature (663)..(663): n is a, c, g, or t
  misc_feature (930)..(930): n is a, c, g, or t
aatgagaaggaaccggaaaaacaattctggtaatataagaaaacaagcttctttaacacgcagaaaagatcacactagctcaccagcaatggatccaaacaaagaatacatctctgaattgccagaaaaagaattaagaaagtcaattattaagctactcaagaaggcaccagagaaaggtaaatatcaacttaaagaaatgttttgttttttgtttttttgagatggagtctcgctctattgcccaggctggagtgcagtggcgcgatctgggctcactgcaagctcggcctcctaggttcatgccattctcttgcctcagcctcccgagtagctgggactacaggtgcccaccaccacacctggctaattttttgtattttttagtagagacagggtttcaccctgttagccaggatggtctctatcccctgacctcgtgatccactggcctcgacctcccaaagtgctgggattacaggcatgagccaccacgtttggcctaaagaaatgttttaaatgatacagtgtatgaatgaaaaaatctccagaagaatagatggcataaatttaaaacaatcacaacttctggaaatgaaagacacatttagagaaatgcaaaatacacgggaaaaactcaacaataaaatggaacaagtaganagaacttcagaacttgaagacaaggcttttgaattaacccaatcaaacagagataaagaaaaaataattttaaaatataaacaaaccctccaagaagtttgggattgtgttaaatgaacaaacttaggaataattggtgttcttgaggaggaagagaaagctaaacgtttggaaagcatattggagggaataattgaaggaaacttccctggccttgctagagatccagacatccaaatacaagaagctcaaagaacacctgggaanttcatctcaaaaagatcattgcctaggcacatagttctcaggttatctaaagagaagatgaagaaaagttcttaagagctgtgaggcaaaagcatcaggtaacctatttaaaaacaccttttagattaacaacagatttctcagcagaaaccctaaagcctgtaagtgattggggtcctatttttagcctctttaaacaaagcagttgtcaggcaataattttatatccagcaaaactaagctttataaatgaaggaaaggtacagtctttttcagacaaataaatactgagagaattcaccactatcaagccagtattacaagagctgttaaaaggagctctaatcttgaaacaaaacctcaaagtacaccaaaatagaaccttcttagagcataaatcttacagaacctataaaacaatagcacaatgaaaaaaaaacctagcacaatgaatagaatagtattctatcacatctcaatactgacactgaatttaagtggcctaaatgctccactcaatagatacagaacagcagaatggataagaattcatcaaccaagtatttgttttccttgagagactgacctaacacatgaggactcaaataatcttaaggtaaaagcatggaaaacaaacattccatgcaaatggaaaccgaaagtaagcaggagtagctattcttatatccgaaaaaaaagacataaaacaacaattaaaaaagacaaagagggacattatataatgataaaaggattaaaccaacaggaaaatatcacaattggaaatatatatgcacctaacactggagctccaaaatttataaaacaatgaacactaaacctaagaaacaagatgggcagcaatgcagtaatagtgagggacttcaaaactccactcagagcactagccaggtcatcaccacagaaagtcagcaaagaaacaatggacttaaactataccctacaataaatggacttaacagatatttacagaacattctacctaacaactgcagaatataccttctattcatcagcacatggaacattcgccaagacagactacatgataggccacaaaagaagtctcaacaaatttttaaaaatcgaaattatatcaagtactctctcagaccactggaataacataggaaatcaacactgagaataaccctcaaaaccacgcaaatacacggaaattaaataacttgcttctgaatgattgttgggtcaagaataaaatcaagaaggaaatgaaaaaaattgactgaatgataatagtaaaaaacaaaacaaaacaaaacaaaacaagaaacctatcaaaacttccgagatacagtaaaagcagtgctgtgaggaaagtttatggcattaaatgcctatatcaaaagtctgaaagagcatgaatagacaatctatggtcacacctcaag

SEQ ID NO: 239821 - DNA, 348 bp, Homo sapiens
caaagaaaagataggtaaattggacttcatcaaaattagaaacttttgtgctgccaacaataccatcaagacagtgaaaagataacccacaggatgggagaaaatgtttacgaatcatttatctgataaggttctggtacctagaaatataaaggactggtacctagaaatgtataaaggactcttacaactcaataacaaagagataaataaccagattaagcaacggggctgggtgcagtggctcacgcctataatctgagcactttgggaggccaaggcaggaggatcacttgagctcaggagtttgaggccagcctgggcaacatattgagactccatctctac

SEQ ID NO: 239822 - DNA, 856 bp, Homo sapiens
tctccttcctacaagaggatgtcgccttctggatccacctcaagcctactcagggagctgctcagcttcctcaagggcctggagtagatggtttccatcttctcttttgccacctgtggagagtttttaagagcaaacagaaattcaagtgaattgtcctcctacagttactgacgaaactattacagctacttctgattatccattcaggttaaatcaggcatcatttcagtcacctccaggtattaatgtgtatgatataaattggaaagtcaagtcctcctaggagatgactgtgcttctgcacaattccattacatttgcagtctctgtcttcctgtactgcattgctgtcgtgctttatgttggttacaggaacctatatcagggtagtcataaacttcccatgattggctttgtcattactcttgttgccatcttttgcgattggtgagcacttcaaaagctcgcttgggcaaaacctcttgcagatattaaaataactactggtcaaaatattgttcaggaacttctgcttgtaagaaatcataataatgtgttattttggctctgtgaccagcatgggattcctaaatgtatctgtgatctttgtctttctgaatatgatactttggaggggaaatgcttggcgtgtgtacaagtatgaggagaccaacttacacaacccatcaaatacttatgctcctcatagccaaggaggtattccacctcctgctggaatgtaattaaagggagaaacacactgtatgaaatatatgtctatatcatgacttgttgccaacatcttgaggcacattatttgtttccaataaaagtaatgttttttttttttaag

SEQ ID NO: 239823 - DNA, 332 bp, Homo sapiens
gagttcatattgtcaccaccttttggaagtcttctgtgattgcccctagccaaaaacagcatttccttcctttgacctcctctagcacagagagcagcggctaagagcttgggactcagtttctctacctgtaagatgagaaagtgaggactaagtgagatgatccatgtaaagctttagcacagtcctggcacacagtaggcactcaataagtgtcagctattcattatggtgctgtggtctctcccctgccccacagctccttcaggctatggcacacagtaggtgcccactgaatactcacccaggtgaccagcaggtggccccacacc

SEQ ID NO: 239824 - DNA, 207 bp, Homo sapiens
caaggtgtctaggtgaaacagcattttcaggaaaaactgctgaggcatttgtttataaacatctttccgggggaaaagaaaaagtttttctttctttcttggtagaactcaagttttttcatgagcgtgacatagtcatgaaagattgggaaacaatattaaacactattgtgtagaactaccaagtaataaatgactttgttctta

SEQ ID NO: 239825 - DNA, 309 bp, Homo sapiens
tatagttaccctatttatttggatgtgagtatttggaaagatttaaaaactatgctgctgccaccatcactaaaatattttctgtttcttttaatacatcgctttccaagggggaaagttttttgattcttcagagttgtgtttctcttttactatagagttaaaaaatacagtggcttgcttgttgaactctgcatctcccttccacacttatataaccttttcttgtatataaacattaactttgcataggccctgtgatttttgtcctgtctcccttccttcctctcttaaaacaaaacaaaagct

SEQ ID NO: 239826 - DNA, 479 bp, Homo sapiens
tgagccaagatcacaccactgcactctagcctgggcgatagagcgagactccatctcaaaaaaaagaaagagtttaattgatgtgaggccagccatgctacatggaagagttattactcaaatcagtctctcctcgcatctgggggctagattttttcaaaaatagtttggaggaaggggtggaggtggctaggcaatgggtgcttgctgccgattggtctgggtgcaatcacaggggtgtgggactcatcctcctgcatgccgagtggcttctgggcgggtccaggaggagccatcacgttggacttgcaaaaaacctgaaaagatatctcaaaaagccaatcttaggttctgcaatagagatgcaggagtaattggagaagttgcagatcttgtgacctctggaatgatggctggcaccttaccagaattcagactcctcacctcctcctagcctggtagggtctctcattagctta

SEQ ID NO: 239827 - DNA, 825 bp, Homo sapiens
gaagtaacatcttcctgttcccagaataccatgttttcctacctctatacctttgtacatgctgtttcttctgtatctaacatctttcttctctttctctacttggaaacattttattccttcatgaagacatcagatatcacctcttaatctccctagggaggtttttcctagagctctcaaacattccctctcataatcataggtacagagctcctttataacatttatcacatgggaaaagggattatcatatattttttattctctaacctataatggtctatggacttcttgggggcagagacctctaaatttgttcatggtacatttttttttttttttcagaaagcacttatagtaattctaattcaccccacctaagacagagatggacatatcataggctctgcataaatatttacttaaaccaaataaccttataatctactgtgtcattagtagacataccaactcactagagaagggagatcacataaaatctggaagataatttgcttgctgggtttcaccatctctgttatttgttcagttatcaaaggaacagaaattgaaaacagacacaaaaaagctatgcaacccacaaatctactatgaaaatgtgtattccatattgatgagctgtttcttaactaaacgaagtgaataggtatagatctgcataatataataagcttattatctcttggtcaactggtttgttgtaggatcccaggcaaattaatcactctcttcttttgtattactccagaaccatcaaataacatagtgcattctacaaaggcagttttaaggaataaacaa

SEQ ID NO: 239828 - DNA, 555 bp, Homo sapiens
cagggctcttgtgtggatatggagtaggccgtagaattcttggcacatagtaggtgctcagcgtatcaatcatagccattattgttatttcaaatttcagccaaaaataatcacttgagctcttagtaggtgacagttggattaaggacattgggactgtatctggttcaatcagggatgacttcctgggggaggaggggcttgagctacttaaatatatgtgggaagtggggcagcattgagttagagagagggctgtgtgcagaggccagggagggattatgcctgtgtgcctattattagtaatgatattacttatttccatattatagacaaagagggagagtccaagtaacttgtccacagacacatagctagtaagtgtagggtgttcacatggaagggatgggcagaggaagagaaatgggaaaatgcaggaaactgggatagttctgtgggaggagaagggagaaaaagaatgggctttgtaatcagaaaggctcctgaagagagggatgtgggggatttaacaggccagccattgccctttactta

SEQ ID NO: 239829 - DNA, 825 bp, Homo sapiens
acaaacatctttcaagaacaaaaagcaagcatgtttggtccattcatgaatccttgtacactgattgttcgggttctttcagttcccatccacttagaaataacaaacatgtttcattttgagcctatcctacagggccgcaaatccggagcctgcagtttgttctcttggcctggggccaggttgcagatgtttgagtcccttggatccctgagtggctgcgtctcccagtctggtgctgactcatggtgcagccagcatgcagcctgcccatcggccaggtccctgcaggtttctgagtctcagatggtggatggcctattcagagttcacagatctgcacctaatagactttcctctttgtccctctttctacccctaaagtacatgtgaggggaaaccctctgcatggtgcctagcacgcagtgaacactcagcgttcgctgtcagtggtgtgttattattattcattaccattaggatccttgcacaaactcatcgcagttgcctatttattttttccaggaagattactcggaactgcttaggcacatcacaccagggcggactgatggagagcaggaagatggggtattcatctgtcccctcttccacatgctccttaaagacaagaatcatctgattagtctccgtgttccagcaaccccctgggacccagcaaccggtaattaggcaaggaataagcttattgtatgtttcacagtttttcaaagatgatttgggagaatcaaatcataccatcatcattccaccaatcaggactcggcactctgacagtgcactttgatgtttaaaaaaaacaaa

SEQ ID NO: 239830 - DNA, 514 bp, Homo sapiens
cacatagtttttctcctgagtccattgggcaggattgggccggattgggccaatcacagagggatggaggggttcccagagatgggtctgctctggcccacactgcagctcacccctgtccactctgtgcgggggccactggggaactagacgaacagcattcaggtcactgtggctcacagacccgtcgccccactccgctcgtccccagcagcatggagggagggagagctcccgtgcgctaattggctgagctatttggaccaattgctaatcaaaggctccaaagccctgggtgctgtggtgctgggctctgaagctgaggttcacaaggtatgggggacctcagtctgagcatcaggttggctctcattctcaggaggggacctgggccaccttcccaacccccacatctctgttgcctcctattatccccgtaacctttcagtctccattgccaaatgggggggttcaagaccagcctggacaacatagtgagaccctgtctttaaaa

SEQ ID NO: 239831 - DNA, 368 bp, Homo sapiens
atgcccttcagcagaagggatagttaggccagcccattgtcccaatattcactgaattaagaggaaaaagaaaaggtaatgaacattatgagaaaagattagggaaacagaaaacagacccaaaagacccagtgtatgtgtaacagaaatttcaaaaatagaggctgaaacaacacagatggaagagaaaaaataaatagaacaaaaatttgcagaccaaaataaattcttgagtctttagtttgaagtacagtgctgtaagaattaaagaagaatcatacctggaaacatcctgaaaaatattcttaagtttgtctttgaatacagacaaaaggacataaatatcttttagtaagaagttgcagagg

SEQ ID NO: 239832 - DNA, 628 bp, Homo sapiens
tgccctatgtaaatcagaagctgccttctcaagctcgtctataaacccctgccccaccccgggcatttcaccacagaaccggaagacccactcgggagcccctctctctctgtaggagagagagcttttttcttttctctttgttttgcctatcaaacctctgctcttaaatgcattccttgtgtgcatctgcgtcctcaatttccttggcataaggcaatgaaaaacagcaccgcttcaatatttggtaaatgaatgaatttaatttaggtgagtttgacacctactaaaaagttcggtacaacttgtcacttgcaacatggtgtccaagacacagataagagatacgtcagagaataaagagaattagatagcaataactgggagatgtctatggaacctgattgttctgacctcttcttcaactggttttcttcctcactgtttgaaatattgtttaaattaaataattaacactatattaagagccaagaatagcactcagaggctatatttagcttctggctacctggttatgccgtgcagtgaaatgaggcaagaagtttttgacaatttaattaacatctttctagattttcaatttttaaaatatgaagccccatgaagg

SEQ ID NO: 239833 - DNA, 433 bp, Homo sapiens
caagtcacggtatttgccttgaattttatcaaaagacaaagaacatgtctccaaagtaggttgagcaggaagagggaggaataaatcaagttgtcctttgttgtacctaagtccccaaagtatacgtattatatgctatatttcacatatatcacatatgatatatgtgttctattttatgacccatattataaattagaaaactaaataccatcaaaattaaatcacttgcaagtgttcacatagcaggaaacggggaaaaccagattaaaaatcatcctggcttcagaatccatattattaactgatatactatatactgtatctcttttgctttggtatttatatatacatatgcatatatatacatgtgtagatacttgtatatatattatttgtaatcttttaataaaaagtacagttattatagaga

SEQ ID NO: 239834 - DNA, 468 bp, Homo sapiens
caggctgtcatcctctttaaaatcttcatgtttcctttcttacatgatgttggtaaataacttaaacacccagcaggcaatcctttatggaactcaaaataaatgttggaaattttactggcttatagaatccaaacactcgatctcatgcaactgcctttgcctctgtgaagctttagcagctgtggctaagtcacacaatctttctaagcctaggtttctcatctgtaaaatgggtataataatattcactttatacatgtaaatgagatacctgtaaagagcctggctcagagaaggccgtcagtaaagttggctataggccaggcatgagggctcacacctctaatcctaagtggaggcctaggcagggggatcacttgagcccaggaattcaattacatgagctatgatcatgccactgcattccagcctgggcactggatgacacagtgagaccctgtttct

SEQ ID NO: 239835 - DNA, 1717 bp, Homo sapiens
  misc_feature (739)..(739): n is a, c, g, or t
ttaaatatttttcatgtcattgtggtgattgaggatgttaatgaccacgcccctcaattccggaaagatgaaataaacttagaaatcagtgaatccgtcagcctggggatgggaacaattcttgagtctgcagaagatcctgatattagtatgaattcgctgagcaaataccaactaagtcctaacgagtatttctcattggtggagaaagacaatcctgatggtggcaaatatccagaattagtattgcagaagactctggaccgagaaacgcagagcgctcaccacttggtactgaccgccttagatggtggggaccctccccgaagcggtactgctcagataagaatcctggtaatagatgccaatgacaaccccccagtgttcagccaggacgtgtacagggttagccttcgggaagacgtgcctccaggcacctccatcctgagagtgaaggccactgaccaggacgagggcatcaactcagagatcacttattccttctttggtgtggctgacaaagctcagcacgtgttctctctggattacactacaggaaacattctaactcagcagcctttggattttgaagaagtagaaagatatacgataaacatagaagcaaaagaccgaggatctctctcaacacggtgtaaagtaattgtagatgattctcaatcttcccccaaagcatggtttggtgccagccccttcacctccttccagagcccaagatcantgctcaagttttggaggacatgatcaccatccccatggtactgatgcttgctggatttagggagggcattttgctaccaagcctcttcccaacgccctggggaccagtcttctgttttgtttttcattgtttgacgtttccactgcatgccttgacttcccccacctcctcctcaaacaagagactccactgcatgttccaagacagtatggggtggtaagataaggaagggaagtgtgtggatgtggatggtgggggcatggacaaagcttgacacatcaagttatcaaggccttggaggaggctctgtatgtcctcaggggactgacaacatcctccagattccagccataaaccaataactaggctggacccttcccactacataatagggctcagcccaggcagccagctttgggctgagctaacaggaccaatggattaaactggcatttcagtccaaggaagctcgaagcaggtttaggaccaggtccccttgagaggtcagaggggcctctgtgggtgctgggtactccagaggtgccactggtggaagggtcagcggagccccatgcctccttgtgcatagaccttcttctcccacccccttctgcccctgggtccccggccatccagcggggctgccagagaaccccagacctgcccttacagtagtgtagcgccccctccctctttcggctggtgtagaatagccagtagtgtagtgcggtgtgcttttacgtgatggcgggtgggcagcgggcggcgggctccgcgcagccgtctgtccttgatctgcccgcggcggcccgtgttgtgttttgtgctgtgtccacgcgctaaggcgaccccctcccccgtactgacttctcctataagcgcttctcttcgcatagtcacgtagctcccaccccaccctcttcctgtgtctcacgcaagttttatactctaatatttatatggctttttttcttcgac

SEQ ID NO: 239836 - DNA, 392 bp, Homo sapiens
gaattctttttttgggaaaatcctgttgaattgtgtggcttgtgaatctggctctagaactgttaatgttataagaattgaaagaggactatttaaaaataccaagacatcttttaaaattcctatttttagaacagctacttgtcattaaaataaatcattccatttctatttgtccaggttactgctttcacagcagggccagggctatggtgaagtgtgggaggtgcccagtccccttcactgcagtcatggctctgtttcatgccacatgtgttattttataagtggttaagccccacataggcatgcaaacatggtacatctctatgtattggttttggtaatgttgtaaataattgggagaatacattaaaatttggtaatagtgc

SEQ ID NO: 239837 - DNA, 554 bp, Homo sapiens
ttaaagagacgggtctcactaagttgcccaggctgctctcaaactcccaggctcaagcgatcctcctgcctcagcctcctgaatagctgggaggcgtgagccactatgcctggtaattgtactcgtttctacaagtgctttaggagagaaacacaaaggaagtagttttgattctgatacactttggcttctctcaaaaaactgggaaaatattttgacttttctacaggcttttcctatcttcagtcagaaagtgcacatctctatctgaatctgacagagtcatcattctctgagcttcttggagaatgttaaagttaggtcattttccaaagacgaaggcaagactctcttgtaaaagttaagtctcgtcatattcaggtgaaaaatcttaaaggcaaggctgggtccttctcatagaaactcgaaccatttctattcgtgcttttccctggcttctgtccaccactgaggctctttcacagcacagggcctgttttcggctgtgctcagttaaccctgaagaaaaggtctgtccattccccaagacgact

SEQ ID NO: 239838 - DNA, 378 bp, Homo sapiens
aggattttagtcatagtacttaggaggtaataattagtaactcctaactatttctagtttcatgaaaccctgagaatcttattaaactctgggtcttggccgggcgtggtggctcacgcctgtaatcccagcactttgggaggcagaggtgggcggatcacgaggtcaggagatggagaccatcctggctaacatggtgaaaccccgtctctactaaaaatacaaaaaaaattagccaggcgtggtggcaggggcctgtagtcccagctactagggaggctgaggccggagaatggcatgagctgggaggcagagcttgcagtgagccgagatcgcgccactgcactccagcctgggctagagggagagtctgtctca

SEQ ID NO: 239839 - DNA, 168 bp, Homo sapiens
aatattaaatgcctaccatgtgcactgttctagctatgtccgtgaacaaaacaaaggtcccttgtaaatcttgccttctaaagtgactgggagtaggggggattagtggagagcagacaaaagaaataacctcataccttatggaacgaggcagctggttaaataaac

SEQ ID NO: 239840 - DNA, 122 bp, Homo sapiens
gaaccacagtcagggctgtgcctagtagaatgtgtaggtttagatctgcccaactgcacagaatcacagaatcttaggggactttgtagtaagaatcctttccatccttcctctggtcgact

SEQ ID NO: 239841 - DNA, 650 bp, Homo sapiens
ggatttcaccatgttggccaggatggtctctaactcctgatctcaggtactccacccgccctggcctcccaaagtgctgggattgattagaggtatgagccaccgcgctcggccgggagtggagtgttgtgagcgtggacagtgaggtcaggaatcatccctttagggacagaatcaccttgtggttggcctttggcatccagctgcccagattagaatcccagctgcagcactaaccaggcagattgggtaacagaccccatcttcacctttgccatccattaaatgggcttttgtcaaaatgaaggaagacaaccggtttggagcacctggcctgcagctcctgtgacctgtagcaggagatctagagaagcttaacagaggtccacaacatgacagaaaacaaagagacacagagaaagataaagatggggacattggccgggcgtggtggctcacacctgtaatcccagcactttgggaggccaacgtggatggatcacctgaggtcaggatttcgagaccagcctggccagcatggtgaaaccctgcctctactaaaaatacaaaaatttgtcgggtatggccgggcacagtggcttatgcctgtaatcccagcaaattgggaggccaaggtgggacgatcatct

SEQ ID NO: 239842 - DNA, 434 bp, Homo sapiens
ttttttttttaagcacagaagttcaccagggctagtagaaaatttcaagttaagaaaataactcttgctgggtgcggtggctcatgcctgtaatccaagcactttgggaggccgaggcgggcggatcacccgaggtcaggagttcaagcaatcctccaacctcagcctccaaccaactccggaccccgccccatgtcccatcgcctcccctgccctcggccccgcaaacacccctggccttgactttcccaccagcgcggcccagccccactgtgttccatcggcgctcaataaaatactgaatgaggccgggcgcggtggctcacccctgtaatcccagcgctttgggaggccgaggagagcggatcacgaggtcaggagatcgagactagcctggccaacacggttaaaccccgtctctactaaaaatacaa

SEQ ID NO: 239843 - DNA, 209 bp, Homo sapiens
ggtggagtctcactctgtcgtccaggctggatcttggctcactgcaacctccccctcccggactcaggtgatccgcccgcctcagcctcccaaagtgctgggattacaggtgtgagccaccacgcccagccaagtgtcatgttttaaatattacacattatgggtttattaactgatatttagcagtttatcataatctcagttttcat

SEQ ID NO: 239844 - DNA, 427 bp, Homo sapiens
tgcaagctccaaactccacctcaccacaggtgactcctccttcactttctcctccagcctttctcagagtggctgggcgggcaaagccagaaaagccactctggccacactgcagcctctgttgccaccaccaactgcagtgaggcaagccatggtgccacaggctccaacctccagcatgtggcaggtgattccccttccccttctcctggttctctaagccaggaacagagtagctcggtgggcagatacagaagagcctaaaatctgttgtactattttaagaaaaacttctcttgcctgtaatcccagcactttgggaggccgaggtgggtggatcacccaaagtcaggaattcaagaccagcctggccaacatagcaaaacctcatcgctactaaaaatacaaaaaacaaaaaacaaacaaa

SEQ ID NO: 239845 - DNA, 193 bp, Homo sapiens
ttttgaaagaactgctgacattgtatggtcttgatattcaccttcttaaacttcaatatctaaatattctcctatgaaggggtcagcataaatatcattgtccttaattacttctgttactctttgattcctactagacatagggcacttaatatattacagattgtgtgaaacattggattgctactcctaa

SEQ ID NO: 239846 - DNA, 2571 bp, Homo sapiens
tggtaattatcttaaactgcatgagatcccggaatccagatgaaagtgcaaaattggcagacagtattgcactaaattaccaactttcttccaaggaacaaagagcttttggtgccaaactgaaggaaattgaaaagcagcacaagaactgtgaaaacttttattccttcatgatcatgaaaagcaattttgatgaaacatatatagaaaatgtagtcaggaatatcctaaaaggacaggatgttgacagcaaggaagcacaactcatttccttcctggctttactcagctcttatgttactgactctacaatttcagtttcacagtgtgaaatatttttgggaatcatatacactagtacaccctgggaacctgaaagcttagaagacaagatgggaacttattctacacttctaataaaaacagaagttgcagaatatgggagatacacaggtgtgcgtatcattcaccctctgattgccctgtactgtctaaaagaactggaaagaagctatcacttggataaatgtcaaattgcattgaatatattagaagagaatttattctatgattctggaataggaagagacaaatttcaacatgatgttcaaactcttctgcttacaagacagcgcaaggtgtatggagatgaaacagacactctgttttccccattaatggaagctttacagaataaagacattgaaaaggtcttgagtgcaggaagtagacgattcccacaaaatgcattcatttgtcaagccttagcaagacatttctacattaaagagaaggactttaacacagctctggactgggcacgtcaggccaaaatgaaagcacctaaaaattcctatatttcagatacactaggtcaagtctacaaaagtgaaatcaaatggtggttggatgggaacaaaaactgtaggagcattactgttaatgacctaacacatctcctagaagctgcggaaaaagcctcaagagctttcaaagaatcccaaaggcaaactgatagtaaaaactatgaaaccgagaactggtcaccacagaagtcccagagacgatatgacatgtataacacagcttgtttcttgggtgaaatagaagttggtctttacactatccagattcttcagctcactccctttttccacaaagaaaatgaattatccaaaaaacatatggtgcaatttttatcaggaaagtggaccattcctcctgatcccagaaatgaatgttatttggctcttagcaagttcacatcccacctaaaaaatttacaatcagatctgaaaaggtgctttgacttttttattgattatatggttcttctgaaaatgaggtatacccaaaaagaaattgcagaaatcatgttaagcaagaaagtcagtcgttgtttcaggaaatacacagaacttttctgtcatttggatccatgtctattacaaagtaaagagagtcaattactccaggaggagaattgcaggaaaaagctagaagctctgagagcagataggtttgctggactcttggaatatcttaatccaaactacaaagatgctaccaccatggaaagtatagtgaatgaatatgccttcctactgcagcaaaactcaaaaaagcccatgacaaatgagaaacaaaattccattttggccaacattattctgagttgtctaaagcccaactccaagttaattcaaccacttaccacgctaaaaaaacaactccgagaggtcttgcaatttgtaggactaagtcatcaatatccaggtccttatttcttggcctgcctcctgttctggccagaaaatcaagagctagatcaagattccaaactaatagaaaagtatgtttcatccttaaatagatccttcaggggacagtacaagcgcatgtgcaggtccaagcaggcaagcacacttttctatctgggcaaaaggaagggtctaaacagtattgttcacaaggccaaaatagagcagtactttgataaagcacaaaatacaaattccctctggcacagtggggatgtgtggaaaaaaaatgaagtcaaagacctcctgcgtcgtctaactggtcaggctgaaggcaagctaatctctgtagaatatggaacagaggaaaaaataaaaataccagtaatatctgtttattcaggtccactcagaagtggtaggaacatagaaagagtgtctttctacctaggattttccattgaaggccctctggcatatgatatagaagtaatttaagacaatacatcacctgtagttcaaatacgtttatttatatctttatgattttattctctctctctattctcatggcactttcataacattatggctaacctctaattacagattttgcttttgcctccctgaatgaattacaagcctttttaagatatgaaatatgcctacccgcagagcttggcacaaagtggagtcaatcttttaatgttttaaatatgcattttcagactcaaataattaagaagtttcattgatatccactggtcacatcataactgtctatagggcaataaaatctgtgttaaactca

SEQ ID NO: 239847 - DNA, 2731 bp, Homo sapiens
tggtaattatcttaaactgcatgagatcccggaatccagatgaaagtgcaaaattggcagacagtattgcactaaattaccaactttcttccaaggaacaaagagcttttggtgccaaactgaaggaaattgaaaagcagcacaagaactgtgaaaacttttattccttcatgatcatgaaaagcaattttgatgaaacatatatagaaaatgtagtcaggaatatcctaaaaggacaggatgttgacagcaaggaagcacaactcatttccttcctggctttactcagctcttatgttactgactctacaatttcagtttcacagtgtgaaatatttttgggaatcatatacactagtacaccctgggaacctgaaagcttagaagacaagatgggaacttattctacacttctaataaaaacagaagttgcagaatatgggagatacacaggtgtgcgtatcattcaccctctgattgccctgtactgtctaaaagaactggaaagaagctatcacttggataaatgtcaaattgcattgaatatattagaagagaatttattctatgattctggaataggaagagacaaatttcaacatgatgttcaaactcttctgcttacaagacagcgcaaggtgtatggagatgaaacagacactctgttttccccattaatggaagctttacagaataaagacattgaaaaggtcttgagtgcaggaagtagacgattcccacaaaatgcattcatttgtcaagccttagcaagacatttctacattaaagagaaggactttaacacagctctggactgggcacgtcaggccaaaatgaaagcacctaaaaattcctatatttcagatacactaggtcaagtctacaaaagtgaaatcaaatggtggttggatgggaacaaaaactgtaggagcattactgttaatgacctaacacatctcctagaagctgcggaaaaagcctcaagagctttcaaagaatcccaaaggcaaactgatagtaaaaactatgaaaccgagaactggtcaccacagaagtcccagagacgatatgacatgtataacacagcttgtttcttgggtgaaatagaagttggtctttacactatccagattcttcagctcactccctttttccacaaagaaaatgaattatccaaaaaacatatggtgcaatttttatcaggaaagtggaccattcctcctgatcccagaaatgaatgttatttggctcttagcaagttcacatcccacctaaaaaatttacaatcagatctgaaaaggtgctttgacttttttattgattatatggttcttctgaaaatgaggtatacccaaaaagaaattgcagaaatcatgttaagcaagaaagtcagtcgttgtttcaggaaatacacagaacttttctgtcatttggatccatgtctattacaaagtaaagagagtcaattactccaggaggagaattgcaggaaaaagctagaagctctgagagcagataggtttgctggactcttggaatatcttaatccaaactacaaagatgctaccaccatggaaagtatagtgaatgaatatgccttcctactgcagcaaaactcaaaaaagcccatgacaaatgagaaacaaaattccattttggccaacattattctgagttgtctaaagcccaactccaagttaattcaaccacttaccacgctaaaaaaacaactccgagaggtcttgcaatttgtaggactaagtcatcaatatccaggtccttatttcttggcctgcctcctgttctggccagaaaatcaagagctagatcaagattccaaactaatagaaaagtatgtttcatccttaaatagatccttcaggggacagtacaagcgcatgtgcaggtccaagcaggcaagcacacttttctatctgggcaaaaggaagggtctaaacagtattgttcacaaggccaaaatagagcagtactttgataaagcacaaaatacaaattccctctggcacagtggggatgtgtggaaaaaaaatgaagtcaaagacctcctgcgtcgtctaactggtcaggctgaaggcaagctaatctctgtagaatatggaacagaggaaaaaataaaaataccagtaatatctgtttattcaggtccactcagaagtggtaggaacatagaaagagtgtctttctacctaggattttccattgaaggccctctggcatatgatatagaagtaatttaagacaatacatcacctgtagttcaaatacgtttatttatatctttatgattttattctctctctctattctcatggcactttcataacattatggctaacctctaattacagattttgcttttgcctccctgaatgaattacaagcctttttaagatatgaaatatgcctacccgcagagcttggcacaaagtggagtcaatcttttaatgttttaaatatgcattttcagactcaaataattaagaagtttcattgatatccactggtcacatcataactgtctatagggcaataaaatctgtgttaaactcaaaacttttataagttttctaaattatttcttcactgtgacagcaaagatttaaataagatgaatgtaaaagagaaagcttattggactcaaacccacagatccacaccagagttctatttacctcatcttggtatcaataaaaacttatgtggaaggtaa

SEQ ID NO: 239848 - DNA, 469 bp, Homo sapiens
tgccccttgcccttctcccagctcattgctccaggagagagaagagttcaaaaaataaagtaatcataaacttgaactctctccattctcttgttctctaattacagattttgcttttgcctccctgaatgaattacaagcctttttaagatatgaaatatgcctacccgcagagcttggcacaaagtggagtcaatcttttaatgttttaaatatgcattttcagactcaaataattaagaagtttcattgatatccactggtcacatcataactgtctatagggcaataaaatctgtgttaaactcaaaacttttataagttttctaaattatttcttcactgtgacagcaaagatttaaataagatgaatgtaaaagagaaagcttattggactcaaacccacagatccacaccagagttctatttacctcatcttggtatcaataaaaacttatgtggaaggtaa

SEQ ID NO: 239849 - DNA, 640 bp, Homo sapiens
ccctaattcctctacaattttaggaagctaaaaacataggagtaggaccttaacccacttgcagacaacaattttcttgaatatatattccgtatagcctttttatctcagttgacttgaatgctcaccctaaaatccaaaactaagactaactgggttaaggaaaatcttaatacagagacagaagtaagtatgccctaaaatacctagaacaggtctagagacccatcaacatgagaatatatttagttcagcaaccaaatgaatagaatcggcttcttgtttgggattttgaaagtactttttcatttgaactagtcttaggcaatggtctcgcctgaccttcagcgagcctcagtgtctactgggtggcaagaaatagataccgtgaatggtcacagcattatttacagcatttaatcattctggacctcaaagagatttgagaacatttctcattttcctagttatggtaggtaattttttttttctctaaccaactactcaagagtcattgaagagattctaaacactgcttttcttgttagtatggcgtgttgttactatcgtacaaagccaccattttccaatgagtcttcaaatcatttggaagtgcatttgggaaacaagaaagaatcct

SEQ ID NO: 239850 - DNA, 661 bp, Homo sapiens
ataatgtggtagtgacacacatgtgtaaaccaatatactggttgaacagaattaaaagcccagaaatacatccaagtatgcatggaaatctagtatatgatataggtggcatttcttcactaagtcataatactgaggaatggaattaatttggaaaaaaataataaaattatatccataactcatgccatacataggaataaactccaaatggatctgtaatctaaatgttaggaaatgaaactaggccaaacatggtggctcatgcttgtaatcttaacacttttgagaggccaaggcaggaggatcacttgagcccatgaattctagaccagtcagggaaactgagggagaccccatctctacaaaaaaataaaataaattagccaggtagtggcacgtacctgtagtcccagctacttgggaggttgaggtaggaggattgcttgaactcaggaggtcaaggctgcagtgagctatattcatgccagtgtgctccagtttggtcaacagagcaagatcctgtctcaaaaaaagaaaccacactagtattttactgtcagtgtagggaaagactttttaactgtgactcagaatccagaggcaataaaataaatgattgataaatttaactacattttaaaaattacatggctgaaga

SEQ ID NO: 239851 - DNA, 442 bp, Homo sapiens
ttctgtaccattagagcagtagtttttttaaggttatacagtgtgttcctgtatccttcattttcagtgacatgtggcttctttgcaatacaaatgtgatgacaacaggattttaaagcagcaaattggttaaaactgggagacattagcaaatcaccacccatgatgtccaccagccttggaagggccaatttcatcatccgctatgtcttcgacaaccaaccaatcttttttcctccaccttggttttccattggtataatgtcaacattctgttaatgtgtccttgggatctatcaactttacgatttcttaactagcttctctctacaaatatgtttatatactctactctattacttttcttctgtttcaactgtaatttaaaattttttaagtttcacatgattttcctaataaatgagaaaaagtctaaatcttt

SEQ ID NO: 239852 - DNA, 952 bp, Homo sapiens
gcggcggcggcggggaggcgtcgcttccgctctggggggtttcgcggctcggggagctctttgttagtttaactcctcgggctcggggccagcgtcgggaccaccggttctcttcagtccctctgcccgcagcagccgcgcgttggtcaccatcccgggatggttgcgtcggttctaccgggagctctctccgcctcggtcctatggagacccgtaattaaataacagattatgccttggcgttcacatgctagttcccttgaaggtttaatttaaaaaattttaaaattaaactctttataagcatggcgtgcatcctttgctctacccaattttgtggattactcagtacactttttacctcttcggttacaacacttcaacagaagtgttggcagctgttggtacacccctaccttcaagtaaaacaaatcttaaaattactaaagtttttcattggtaatttattccacatttgccccatgaaaggatgaagtgagctcagggttgcattaaacacacattcctagagccaggtctttctcttaccagaaatgttagggggaggcagaaggaatgtgatcattttgtccacagcaagtagttagcttcagttggatggagactttaaggaaacaaagcggagcaaacgttattgcccttttttggtgcacttaagcggttttaatgacttagatgttatttaaacatttaacacatgaattgtgattaattctgcaaactttaacagaattacgaaactgtacacatatatcctactattaggttaaaagggtttttaccttaccttttaaaaataagacgcacattagaagccctttatagccgtttgaatttttaaataataaaaaaaaaggctggtcagtcacccagcgttgcagtttccagttaccaggatgtgagagcaaactttgcaacacatttaaaaaag

SEQ ID NO: 239853 - DNA, 519 bp, Homo sapiens
tctggtgtggtggggctaattttctggcattgcatgtgagctgttttctcttcagattacacaaatcaatttttctggatagtgaagtgtcatgatttaatactagacatgtcctcagtgagtagatatttgaaggcttatgcttagtcatgtgtgacatttcttttttcctctcctgaaagatggttttgtggttgtgatcactgatggttgggaatagctgttcatcctcatccacccatctgcattaggagcctcgctgaggacagtgcggtgctagacattgggaaccgcgttacatggaccgttctcatgagggcgcaggatgggaggatggaccgtgtctgcatctgttcttctgcgcttgcgacctgacacgcgtgattccaggtggacatggtgctgagctgcagcgctgtgtggggttggttgaagggctgctgtgtataaaaagtcatgctctatgaaaaaaatataagactgaattcgtgcaattttcaaaaaaaagtataatctagg

SEQ ID NO: 239854 - DNA, 706 bp, Homo sapiens
cctccactattgaactgtttggctcctgttttttggttgctactcatcatgatatgatgaacaccctgttacatacatctttgtgttcacctctaatagattactcaagtgttatacacatttgtaaggtgctgccttaatgttgcttgattgttctttggaaaggtagattatgtgggtaccatttatttgtaatttatccagcagtcgtttaagccacatgctgtatttttcttataataaaacctagagtttaacattatttaattatcagtatacttcatgttttcatagttatttgtagtttgtaattaatctctgattctccatttgaaatttgtaactgtagccaggttttcatcttaaactaacaaggtggtagagtctattctcttctgaatcatagacattttcttgagtggatgtttatgtattgaaggaacttgttcagttcacattgtcatctgcattagctacttgggtgtcagtgtccttagatggttattattcagcagctatttggatgagtagccatttgcatcatgagtgcttgatttattttgtgtcatcatctttaaaatgatttgcttgcccatagatgtccttaatagaagaagattcctttatccaaaacaactgttagttccatacactgtgatgttaaaagtgaacaatcacaaccacaatgagaggggacttttgatta

SEQ ID NO: 239855 - DNA, 503 bp, Homo sapiens
cttatgaccaaggagcctcaacatgtcacagcttttgtgggctgtgggcagtaggagagagggcactgccactggagacctgcgctgtggcctctttggccagtgccttgctgtgccatgtgggacaaatcctttcccctccttattgggccctaatttcccatctgtgaacagttcatagcaacttggggctgctgggaggagggcaagcaagcctggaacccagagcgtggccagaaatgatgtcgacgatgcccatgaccacctcctctgttctccaagacctttgcctctcctcaggcccctggtcacctttccctgggtcttcgttctttgatgtgagaagagggcagctttaatcccccacctgatagagaagaaaactaagctgtggagtagggtggagtgagggagtggaaggaaggttgtggtttcctggtgaggtgtgatgcttagacctggtctctaaaaataaaattaaagttaaaaaaaatgaattaaaa

SEQ ID NO: 239856 - DNA, 665 bp, Homo sapiens
ggacctcaatcctacagctgcacatgactgaattctgccggcaactgaattgactgactcttctccagattcccaggtaagaactcaggctagcccaacccctgagtgtggctatgtgagaccctaaagcagagggtccaggacttctggacttctcatctgtagaattgtgagctaataaatgggtgcagttctaagctgctaaatatggtaatatgttacgcagcagtagaaaactaagacagccatattcttttcagttctcatgctttccatggcataatctctgctttatttaagtactcagtaaaggtttgcccatggcatgttgaactacttcgaagacacctgtacttatcttttaacaaaagattccttttcattatttctcatggatcctactgatgaaaataaagataagcatatattcaaggaaatgcatttctacatcattatctgaggacaatattggtgatgtcccctgggtattcaggttttaaatgagccagttcaacagtatcttgatacatttcctgatgtgtctcacactctttttcttatatgcaaatttttctatctagattatatgcaagtaaagtttaaattctatattatttctgtgacggaaagttattgatcttatagctatcatgttgctatcagac

SEQ ID NO: 239857 - DNA, 392 bp, Homo sapiens
actactgctgacatttcatcagtctccagcctttaaaaaataaagtaaaataaaataaaatgagtttgggatgtattcatcatgagaaaatacaaaattacacgaacaaggccggtggcggtaatcccagcactttgggaggccgaggcgggtggatcacctgaggtcaggagttcgagaccagcctggccaacatggttgaaactctgtctctactgaaaaaataaaaataaaaaaaaacaaattagccgagcgtggtggtgcgtgcccataatcctagctacttgggaggctgaggcaggagaattgcttgaacccgggaggcggaggtttcagtgaaccgagatcgcgccactggattccagcctgggcaacagagcaagactccgtct

SEQ ID NO: 239858 - DNA, 447 bp, Homo sapiens
ttcttattttgaaaagtgaatggatgtctaaatcccaagaacaagcacagaaaggcagaacagggctagcagcttgtcttcccagaatgaatattgcgccaaccactgtgaaaacctggaactccaatagtcattccacacacaaaaaaaatctgatgcttagcatacatatttttggaacatctaataagttaatactttacattagtgggttttttttacatttatagtaaatctgacacataaagacctccatcctcagccaccccaactctgtttgaatggcacctggtggcttgtctgatgagctgcagccacactgccaccagcttgcccagcctcaggcttgtcctccagggcttggataggtaagtaaatgactccactgacatagtgactcccagcttctggaaaccaggaaataaatatgatttctaagagagctga

SEQ ID NO: 239859 - DNA, 364 bp, Homo sapiens
atatatatatatatatatatatatatattcttttcataatttcatataacttcagtgtattccttatctgttagccagaggctgtggttttaatgacatctctgtgtggtatttatatatatatataaatacatatataaggatattgaagttgtggaacttactgcaaaaaatacctgaaaaattaactgtgcattttttgttgagtaatttattgtactatccatgggggtggtaactgaggaataatttttaatagtgattgcattttttaaaactccctgttatttcttttagttggcatacgttatggcatgttatatacatcatgccttgtcaggtagaagccacttctctgtaaatg

SEQ ID NO: 239860 - DNA, 309 bp, Homo sapiens
gagcagaagggagtgcattgagtcctcagaggagaaagtgacttggctggaggctcagggaatctttcccaggatgagctgcacctcggaggtggggtagcatttgagcgttcaaaggctggggtcatttcagatgagtgaggaccagcccagagtcaaggccttgtggaagaagatgggcggaagcaggaaccactcagggtctcaaggagctggctaaagtgaccccgacaagagtgatcacgatataaacctggaattgcacatttaagagtccaagtgcacatagatgggcctagtcagcagtgt

SEQ ID NO: 239861 - DNA, 844 bp, Homo sapiens
atgacatctgctgtaattgatgagtttgttggagatatgatgaaggatttgcctattctaaagagtgatgatccggttgttccttcactgtttaaacaaaagacatctgatgaacttttgcactggcatgctcaaagactccttagtgacgactatgacaggatcaaatgtcatgttgatgaacaatctagagatcctcatgttcttgatttcctgaaaaagattcaggattatcagcaattttatgggaaatcgttagaatcaatctctacgaaagtcattgtgactcaaactactcggccaaaggaggattccagtggtgccagtggtgaaatattacagaataccaaaccccaccaaattaccaaaaagagtaagaaaaagtcatttctcaaagaagatcagaacaaagctcagcaaaacgatgatctgctgttttctattgaagaggagatgaagaacaatttacattctggaataaggaaattggaagattatttgacatcatgtgcaagtaattcagtgaaatttggagttgaaatgttaggattaattgcctgctttaaagcatggaaaaaacattgccgaggtgaaggcaaaatttcgaaagatttaagtatagctgttcaaatgatgaaaaggattcattcactcctggagagatacccagaaattttggaagcagaacatcatcaatatatagctaaatgccttaaatatttaggctttaatgatctggcaaactctttggatccaactctgataggagatgacaaaataggaagaatatcgattggcatggacagtcgggtcgagtggataatgggcatactgatagagtgag

SEQ ID NO: 239862 - DNA, 1072 bp, Homo sapiens
gagtttgggtatcgttgttggtaataaacatccctgcagaactgactgcgatttcacatgaattgtttaaaaataaaccaaaattacacattatatattccctctcccaaaggaatctccttgggaagctgttacgttttctactatagctgcccttatcgaagtttcgatcctaccctcccttctccttctccgtccctcactcttccaccattttcttcccctctttcttttctttctgtctatcaagagttgcatgaaaaagcacatctctttgaccagcctccaaggtgataaatcttcatcagctgagaataaatttgatttttggaaacagccagcagtcagagtcaaggtcagtgggtaataaaactatagtaacattttgagttagagatggggagtgactgtaaagtagtgagcccatttttcttgagtttttggaaggcaaagaaggaaatcccaaaacaggaaatctcagtttattgtgtatatttgttaaaaacaaaagaaaacaaaacaaaaaactagtcttgtttgataatgacattgcaagttttgtatattatttatttatttttgtatttgtgactttttccccccaatggttgtgtctttcaactgactgtgggatccttgtcacacttttattttatgttgataatccttttggcattttaaatgatatctgtatgtcatattgaaatacagtaattaaagtggcacaacataggaggaaatcaaatttcatttaatgtttaattacataaattgactacctgatagatttttttttaaatttggagtttaacatttgaaaattggcaggaaggttttaatgcttgttttaaacatagtcatcatctagatctgtactatcaaatgcaatgatattacttattataacattatcaaatgttatatgtagtgccatcaatttatattgttttcaaagtgtaacttttaaaaatagagatattcagcagttatactaaacatttgagtctttcaatgtctgttaaatgtaaaacttgatatttattaaaagagaattttaaacttagaaaaacag

SEQ ID NO: 239863 - DNA, 387 bp, Homo sapiens
cggggcgcgagccagacacagagggccgcggaggacgcgggaggcgagcggggagccgaggtcgtgctaggatcccgcgcccaggggccttcgtcgagggaggggcgtggcggcggcagcaggagggcagcaggagctgtcaggctggcggttccgcgccgcggctccttctgcgctgcgcccgcaactctgggctgagaacttctcccgccggcccactcgccctcgccccgcgcactcggcgccaggcgactcccgcaccttgtacccggcccgccccgcctcctccttcggccgcaccactccccctgccggccgcgcttctctccgttacaaaggagggaaaatgagccgggcggcggcggcgcggcgcggggccaccacggc

SEQ ID NO: 239864 - DNA, 500 bp, Homo sapiens
caatgctgtggagaaggcaaacatcaagcccaggcggactggtactggctgaagaatgggtgccacatcatcgtgctggctgagggttggctggtcaacctgggctgtgctatgggccgccccagctttgtggggagtaactccttcaaccaggtgatggtgcagattgcgctgtggacccacccagacaagtaccccattctctaccaaaaatacagaaaaatttgcctggcatcgtcgttgcacctgtagtttgagctactctagaggctgaggtggaagaatcacttaaacccgggaggtggaggttgcagtgagtggagatggtgccactgcactccagcctgggtgacagagtgagaccctgtctcaaaaaaaaaaaaaaaaaaaaaaaaaaaagatacttatgaaggaaattcttataaaattgtggaaaaaatcattaatataactatttatgccatgattcccaaattgtgtaaatgataatatgtgcagag

SEQ ID NO: 239865 - DNA, 543 bp, Homo sapiens
tgcgtcagtgctcccgggttctactgagaagtgcaactgctagctcacacagtaactctgacggtaactctgtctcatttcccgaggggctgccgtcctgttccccgcaacagctgcaccatgctacattcccagcagcagtgcacagggactggctttcactctgattaacacttctacaaggacgccctccccacagtggcctcccacaagtagggcccacaaccccaggaaggaaggccagactcacccaacagcacactctggccccgctggagcatggggcgtgcgtgctttcactcattcactcactgagttgctctgggcggcctcatcctgccgcctgccccagccctgtcctcactcgctcctgcacggactctggtcacctgaggaccctgccctccagacagcagcgtggaccaggatctcttccgcccagccactccacggtgccaccactgctgggctgcatcctgtgcttggctcaaggcctcctggagaggctgcgtggccaactctgcagccctggcaagcggccgc

SEQ ID NO: 239866 - DNA, 749 bp, Homo sapiens
aaacgaagccagaaagatggtggccagcacacctatggcaactatcaccacggtctccatgcttccggggagctcctgactcagtcccgttcacatcgtcctcatgggctaaggctgctggaagtggcaaactgggggaagaggatggcaggagctaggttcctccacgacacctccagagacctgagggcctcaagctgcagctccggggcacatcccgctgcgctcccacgacggccccgcggatggcaaagtcagcggcatcgcctatgcaggcaatcaaaggatgttgatggataagtgtttcaggcagaataatggccctcaaagatgttgacaccagaatcttcagaacctttgcatatgttacctaacatgacaaaagggactttgctgatgtgattaaggttaagaactttgagaagggaagattatcctggattatacaggtcgacgtttatttctttctgaactttcctggaggatcatcggccatactccagcagaagggtggatttgaaaaaataacgtttccacggcaacagtggcagcaattcaaaggaagacgttggagaattcacatgctattttagctggctctgtgattgcaatcacacaaatcattacattccagcgagatcccatcaacagaaggtttttccatttcagtctgtcaagtttttcaggcatgaatactgtaagcaagaagagaaaagttacaataaattgacatttatagtaaaaaaaaa

SEQ ID NO: 239867 - DNA, 1071 bp, Homo sapiens
aaacgaagccagaaagatggtggccagcacacctatggcaactatcaccacggtctccatgcttccggggagctcctgactcagtcccgttcacatcgtcctcatgggctaaggctgctggaagtggcaaactgggggaagaggatggcaggagctaggttcctccacgacacctccagagacctgagggcctcaagctgcagctccggggcacatcccgctgcgctcccacgacggccccgcggatggcaaagtcagcgaattgaccacaagagaagactccctttcaaactcttcattctctggttcagaggtttgatgtaatggttgtctcatcgtacatggtcagccacaggatatacttcatccatttcagagctgtactcctgagttccatgctataatcagaaatatgtggcacattttgaacaaaggaaatatatacccaacaaagtgttaaaatggagctgccaaccagacaaaccctagaaatatgtagccacttacaggcagaacacaactacatgtgttcccaatgtggaaggcattccggaagtgtatgcatccacatttctacatgaggcatcgcctatgcaggcaatcaaaggatgttgatggataagtgtttcaggcagaataatggccctcaaagatgttgacaccagaatcttcagaacctttgcatatgttacctaacatgacaaaagggactttgctgatgtgattaaggttaagaactttgagaagggaagattatcctggattatacaggtcgacgtttatttctttctgaactttcctggaggatcatcggccatactccagcagaagggtggatttgaaaaaataacgtttccacggcaacagtggcagcaattcaaaggaagacgttggagaattcacatgctattttagctggctctgtgattgcaatcacacaaatcattacattccagcgagatcccatcaacagaaggtttttccatttcagtctgtcaagtttttcaggcatgaatactgtaagcaagaagagaaaagttacaataaattgacatttatagtaaaaaaaaa

SEQ ID NO: 239868 - DNA, 1042 bp, Homo sapiens
aaacgaagccagaaagatggtggccagcacacctatggcaactatcaccacggtctccatgcttccggggagctcctgactcagtcccgttcacatcgtcctcatgggctaaggctgctggaagtggcaaactgggggaagaggatggcaggagctaggttcctccacgacacctccagagacctgagggcctcaagctgcagctccggggcacatcccgctgcgctcccacgacggccccgcggatggcaaagtcagcgaattgaccacaagagaagactccctttcaaactcttcattctctggttcagaggtttgatgtaatggttgtctcatcgtacatggtcagccacaggatatacttcatccatttcagagctgtactcctgagttccatgctataatcagaaatatgtggcacattttgaacaaaggaaatatatacccaacaaagtgttaaaatggagctgccaaccagacaaaccctagaaatatgtagccacttacaggcagaacacaactacatgtgttcccaatgtggaaggcattccggaagtgtatgcatccacatttctacatgaggcatcgcctatgcaggcaatcaaaggatgttgatggataagtgtttcaggcagaataatggccctcaaagatgttgacaccagaatcttcagaacctttgcatatgttacctaacatgacaaaagggactttgctgatgtgattaaggttaagaactttgagaagggaagattatcctggattatacaggtcgacgtttatttctttctgaactttcctggaggatcatcggccatactccagcagaagggtggatttgaaaaaataacaaggaagacgttggagaattcacatgctattttagctggctctgtgattgcaatcacacaaatcattacattccagcgagatcccatcaacagaaggtttttccatttcagtctgtcaagtttttcaggcatgaatactgtaagcaagaagagaaaagttacaataaattgacatttatagtaaaaaaaaa

SEQ ID NO: 239869 - DNA, 389 bp, Homo sapiens
tgttgaatgaagcccgaatgaaggttgtcagcaccttttgcagggactatcaagcatggatgaaaactgaggcattgctgttatttccatctgtgttgaataccttttatgggcttggcatctgtttgggtttcctcttgcagaattgcctgttcatgtcctttgctcacttttgcttatcactttgtaggaattttctatacattacagacattaactccttgttatatgaggcatagatagcttccccagtctgttttttcacctgaattatgttgcttttatcctagaaaatgttttatgtttttaaagtgatacatcttttgctttataaaaaaggaaggttttcccacatcagcgtaatacaattctctcttaaatttattcct

SEQ ID NO: 239870 - DNA, 457 bp, Homo sapiens
ctgctctctctgctccagccaaactggcctcttttattccctatttaccagcttcctggcctccacagagcttttgctcatgctttgctctgtgcctggaaggttcttctaacccctattcttctgagaacagctgtagtctccacctctgaaaagcaccttctgacctccctatggtggtcccttactcctatcacattgcatgaaactgtaatcgggtggttattttggtgaattttttactatcggctacgtaagcccagggtttggttttgtttgcttcatgatttgtatttccacatttgttaaatacatatttgttcataaatgagaatgatggatgctagaagttgaagtaaatttggcataaagtcagagaaagagaaaatgtcacaatctgacagttggagtcagaatgtagaaacttcagttatattaaaactgattttatatcgtt

SEQ ID NO: 239871 - DNA, 342 bp, Homo sapiens
acaggatcgcagctgtttttgtttttgcaaagtcccattgtcctgccttcactcagcgttcaggacccggtgtgctgcggctagtgccacaacaaagcttttctcttatagaacaattagaaatcctattgtggggatacaaggtcaaggtagcaacatagagtctgtttctctaaaagagaatttgtaagccaaagtgctgaaagttttaagagaatcttcaaagaataatggattattttgttggtttctccatctgggtgtctctgtatatagtaaggtatagtaatgaatgcatacgtttattccagcctgggtgacccagagcgagactccatctca

SEQ ID NO: 239872 - DNA, 369 bp, Homo sapiens
ctctgagctaccaccttgagaaagacattgacaaatggttatttcagaaatggagaatacccatctcaaggaccaaagcagccatccactcaattttatcttatctacaaggcaaattatgcttatcattgcaaagatacaacccagtttaaaagctttggcagcagtattctgaaaccatacatcactccatgaagctattcctgtttctctataaaatgcaatgtgatcctgattttccagaaaaggttggggttccctattactgaaaaaaaaagagaaaaacagatgacttaacaaatgtctgtactttcacattttgttggaacttataacactctaaacacacaaaaattcaagaaacgtaat

SEQ ID NO: 239873 - DNA, 411 bp, Homo sapiens
tatctagctaatatgctaacaaatactgtagggatagggtatagtctagccgattgtagtacaggaataagaatcaattttccagtgctatacctttatagagttctattatttaaaatggatttctggccaggctcagtggctcatgcctgtaatccctgcactttgggaggctgaggagcagggatcacctgaggtcaggagtttgagatcagcctggccaacatggcaaaacccaatctctactaagaatacaaaaaattagctgggtgtggtggtgggtgcctgtaatcccagctactcaggatactgaagcagagaatcgcttgaacccgggaggtggaggttgcagtgagccaagatcgcgccactgcactccagcctgggtgacagagcgagactccatctcaa

SEQ ID NO: 239874 - DNA, 458 bp, Homo sapiens
ctggttgcatggccatagttgggaagagggcagagctggcagacatgtggcacacaggagactgaggcacacatctcagacagaagtttgcaaactgaagggtagtgggccacagccagcctggagatacattttgtttgacttccaagttctttagaaaaattttaattaggccaggtgcggtggctcacgcctataatcccagcactttgggaggccgaggcgggtggaccacttgaggtcaggagtttcgagaccagcctggccaacgtggtgaaaccccatctctactaaaaatagaaaaattaactgggcatggtggcaggcacctgtaatcccagctactcaggaggctaagggaggagaatcacttgaacctgggagacaggggttgcagtgagccgagatcatgccattgcactccagcctggaagacaagagcaaaactccatctcaaa

SEQ ID NO: 239875 - DNA, 464 bp, Homo sapiens
caggtatccgtatcaattgggataatttcattataaacttgtttttacaaagctaatcttcactctcattttaagcagcacagagttcctgggatcagtcacagacattttcaccagacttctaagatgctgtttaattcagttccaattgttactttaatgctgttgagatgctagaagctctccacataataggccagctgcctaagcgtaacactgatgacctttcgtaggactcaaagattttgtttgggattgtgtcttcagtaattcataacaggttttgttgctttttaaatcaaacatagtaaagatttccttttatgctctccttttagctacttggcttctggagtgttactctgttttcctaaatttacagtagctgccagtcttgtgctgagttctcctccaagtacactgaattgtgcaattcttgcttggcccagttttggacaggcatc

SEQ ID NO: 239876 - DNA, 386 bp, Homo sapiens
ccaaagtgctagtattacaggcgtgagccaccgcaccctatcttcttgtataagtgagaacacagagccccagctagatccattgattcagtgggggccataaggctagtaactgaagaagccaggacttgaattcacgtttccctgattcacagatggtgttcccaacctctagctgtactgccttagccggagtgaccccatttgagaggtagtcacctgcttccaccgttctagcttcccatctgtgccctgaacacatggggagatctgctcattttagaaggcgtgcttttcattcattattgtgaagggcaaccagtagtagatgagctccaatgccttgcagggacaaagattaaacaaattttcatcatgtccactga

SEQ ID NO: 239877 - DNA, 1251 bp, Homo sapiens
tatcccttgagggcaaagtttagaaactggtcactctgcctactgtctgttcagcctcttgtacaatggcagtttggcagctttaaatccttaacctagaaatgtatttaaggtttttctttcaagaaatggggtatacatatgaaggagagagtaacaactctttttatacacctattcagatttcagccctgaatttggcaaattttagattaggtctcacataaggtaaatatgactcactaactctttttttctcatcttccccacccccccatatatatttatttattttaatggagttagggaccactagtgaaatgatgaaaggcccaattctgagtaacaattgtctactcttcacataaaatatactgaaaaagaattaagattccttgatccagtagacatagagaaacataaacattcatgacagatgagtaggtaaattcagggatcactttggaacttgctggattatggtgatggtttttggatagtatgtgcttcattattttatttggggtagttacagtgttgtagtttttgttaacagctacacttttggtactattttccttttaaatttttggtgtctaagatttaccactaattactaatatatgcctttccaattcacttaaaaccttaataagtgaaatgttcaggtattgctagggtaaatgtgtcttttcctactattgagattttaaaaggctgtgattaagagagactttattaatttgatctgaaagaagtagaaacctctatgaaacaatttttattttcctttgcataataccttagaaatgtgttaaggacaagctatattttccttacttgcttttgatagtttttttttttttttttaagcatagatatccaggttggcaggcctctgaaatgtgaaattgtaatttttatagatggcattactatgaatctgaaatcagtgctaggtgtacaaatgtgaatttttcaatcctgtaatcaaagaacaagatcttgtgggttcctactgctgaaaaaggatgctttcttttgtacttgtttttagtgaaagacctttttgagggagagctattttataggtagttgctattgatatctccatttgagaaatagacatttttctgtatttctagaggtgttctgaattttaaacctgaattcttcagtttagaaaacccagaataaaattatacccacagtgggcactcaacaagtgtgatatttcacaaatgtcagaga

SEQ ID NO: 239878 - DNA, 621 bp, Homo sapiens
cagcaaacctccccacttgtccctgaccattcagtagttccagaggcagtgagcttggaatcttagcaagagagatcttggggtggggtgtggactttccacaaaggcattacctacatgcacgttcccttacacatgtagccttccaatctcatacgtaagaacacttatttaagtaaaatatgcctattccaacagcaggagctctcggctggggagtagagttgttattagtttactatttagtattaactgagtaaacatttagaaaggactggatgggggtgggcacatggggctggggtgcatttgctctggctctacatttatgaaggacctcaaatttcattatgtgacattttctgtaaacaagggtatatatactacaacagatacacagaggctagaaaaaagtccatcataaaacttcacacttgtgttctattacaaaaccacattgtctgcatggtattatgatgtcggcaaatatataaatcttgtatttatagacatttaaaaaatgtaaaatgcatatatttattatatgtaaacatcataaatataccataacttttatatccttcttttcctcctcctccaatggctatctttagagattca

SEQ ID NO: 239879 - DNA, 259 bp, Homo sapiens
gccactgcgcccggccttagtttttttattttttaagtgacgggggtctcactatgttgcctaagctggccttgaacccctgggctcaagcagtcctcccacctcagcctcgtgagtagctgggactacaggcacatgccactgtgcctggctatactctctagttttaacatccattgatgatccttgcctgaatcagtcatttctgtgattgtcaaatgattgtgtaattcttccttttacatttattaggagcttt

SEQ ID NO: 239880 - DNA, 2358 bp, Homo sapiens
aacagggaatgaaagctgagtgtagtggctcatgcctgtaatcccagcactttgggaggccaaggcaggcggatcacatgaggccaggagctaaagaccagcctggccaacgtggcgaaatcctgtctctattgaaaatacaaaaattagccaagcgtggtggcacacgcctgtaatcctaactatttgggtggctgaggcttgagaattgcttgaacccaggaggcggaggttgcagtgggccaagattgtgccactgcactccagcctgggtgacagagcaagacctagtctcaaaaaaaaaaaaaaaaggaaatgaaagacatgcaatagatgatttggtttatttctttaaaacctggatattggctctaaagtgtttatttaaataaatcagatttagaattactgatggaaattggccattcttctatgccatgactctaggatgagtgtcgaagaaatagcagtcaactttaattcagtagacagggcaagaagaatcaaagggactcttaaattaaaccctaagtagtagaacatggaatcaggctttaggaggtcaagtaagaggtgggagaggaggaattcagttctaccaatatttgagtgcctactctttaacacactttctaaaccctggcttcaatagtaacaaaaacaatagctttcctgtctttctagagcttacattctagtaggggaaacaggcaataaagaaaataaaacttgcagcatttcagaaggtggaagataccctgaaagacagtaaagtagataatggtgaacaggagtgaaattttaaaacagggaagttctcactgataaaatgacatttgagtaaagatctaaaggaggtaaggtagtgaattatatagctatgtgggaaaagaacataagcagaaggatgactaatatgtttggaaaatggcagggcagccagatggctacaatgaagagaggcaggggaagagaagcaggagaaaaggttaaataaataggacccaggaagcaatataatacaggactctagggattatagtatatgattgtattgtgattgtaaaggccattgactttaatttgatggaaatggggaaccacatgggattctaatatacatttgaagactgtcactctagctgttatactgaaaatggactccttgggggcacaggaagagcaagatcggttaggaggctgttgcagttatcttagctgagatgatagcagcttatagcaggacagaaatggtaagggctgtgttttttatactgactgtagagtataggatttgctgataagttagatgtgggagttagatgtagagagagagagaactcaaagatgactccaaggttttagcctttgcaaatggcaagacgttgttgtttagtgggatggaaaaggcagtttccccagggaagatcagatgtttagttttgggtatgttaaatgtgagatgccggccaggcatggtggctcatacctgtaatctcagcacttggggaggccaaggcaggaggatcacgtgggcccaggagttcaagaccagcctggcaacataaggaagcaccatctttacaaaaaataaaaattagtgacttgtggtggcacacctactcaggaggcttaggtgggaggatcagttgatccccaacaggttgtggctactacagtgaactgtgatcacatcactgtcctccagcctgggtaacagagtaaagaccctgtctcaaaaaaaaaaaaatgaggtgcccattaagatatcaaaatgtaaatgttgagtaggtagttacatgagtctggagttcaggaaaaaagtctggtcctcagcctcccaaagtgctgagattacaagcatgagccactgcacccggacagaaaatatttttaaatgacggaaattacaacatgtttgtatactaatgggaatgatccaaacagcgaagttaatgatgcaggagataagagcgtcctgcaggtggcattagtgagcactgtggaccaggatttctcaaccttggcattattgacgttttggacctgatcattctttgttggggggcagggggagctgtcctgtgcattgtaggatgtttagcatcattcctggccttgactctctaggtgccagtggaactccctcagttgtgacaatcaaaacgtcttacacacgccaattataccccgggtggcagaaaggggcaaaattgcccaattgagaaccatggttacaggctgacaacatgagtttcaaagctagttttaggaaagagggcaagtaaagagtctgggagtagcaaggaagacacctaattccagtctcagatccagtggtatgagctgtgagaggtt

SEQ ID NO: 239881 - DNA, 159 bp, Homo sapiens
agtaattgtatttaatagtaagaaaatatataagcaatgattttttaaaagggagttctcaagagttttggatttctttctgccgtgtatagaggtttcttatgcatggacatttgtgctgttttatatctttttcaattaaaaaaaaatttaaaggca

SEQ ID NO: 239882 - DNA, 2162 bp, Homo sapiens
  misc_feature (544)..(544): n is a, c, g, or t
  misc_feature (1152)..(1152): n is a, c, g, or t
gttttgttttgttttcaatctaacatagaggcagccttttaaattgactttttttcccccagtttttagtttgacctattaaatatctagacagactttcatactccagtgttcctaaagatcaagcatgctacttgttgaggtgtcttaagttgcgtattttaaacaataaatattgggtaaaagtagtgaaacattagaagtatccttttaccaacactacaagaaaccaggacagaaatcacctcttccattttccttgccagtgaatcttggaaggttataaagttttttgcaagtacaggctgcttttccatgtttatagatatttgctataaaatagcctgcatcaaaaacatgtctattaactgtcttactgaaggcttgatagtgtatttttcaaagcaaaacagactttgaaggtgtctgtctgaagatttccggaccagagggaatgcatatgtggacaattcagagatctcagggaaagtaattgtgtaggctggcgatcaatttggcatgagggaaaggagagtgacaatcnatatctagctgggaggtgagagaagagcctcaatagtgacagctcagtcaaccaacggaggaaaaaagtaacacccaatgggaaaaggccaccaagagcaacacttacttgccctgcttgaatttcggccctgagtcacctggacacaattgaaaagttagcgaggctgggctgccagtcactgagtagtagtcccatatatatcttcagtcctcacaatgcacacatagaagacagcatattagcaccaatatctggttctcttctctttgctgggcactcagaagactaagtttaccagctaccctagcagtgagttgggccatgtgactagtcctggccagtggcccttaaactgaagtgacagctgttgaatgaggcagtgaaaatccatactacattctccagtttatcttttcctgtccatagagaaaacttcatattgagagagtggggcaggctaaatatttgagtcattccattgatatgaagattataatctttatcatccaaaccaggacgatttttggactgaaaggggtgttgttaataatttgccaggacagtaagcttgagctgaactgtcctgggaaaccaggacatagacnccctacccatggaagaaaagtgactaccctgctgctcagacccgaagttgcccagactttatgtcaataagaaattcagtaagtcagtcactgagaggttggggttgttactccagcataacctagcctatcccaactagtataatagattattctctaaaccaattactagctgaaacttggagagaggtgctttaccccttgaactttctcaaaaagagacaaagcaggtaggggccttcataaagtgttaacttgattggatggggcttccaagaagccaattttctgcccttctcacatcagcaccaaaaggtttacaattcagatagcctggatctttaaaaccataataaaaacaagtatcaacatatatagcattttttattttgtcttattgcatcctcataacatctctctgaagtaagtaggactgggaggatgtattcattttacaggtaactgaggctcaggaaatgtgatctgtcctaagttgcatagtggtgagagggcctccgctgagctccacctacgccccttagggagcacagggcctgaggttacactgaccatattatggccccaagagttgaggctgaaagaggatttggtagagcgacttttctggatgtgctgtggtttacaatatctgcttctttaagagaagctactctgaaatatcatggaacaagtgtcacaagaagcatgcaaattaaatagcaggcccagtgaagaatgtgctgttggcatccatacggctagatgggccagtactgtggattcttaaagcatctctttgccactgttccatcttcttgtccagaaaatataacactataattttatcccaaatacagccaattagattttcttgcctttcttttacacctccatcaaaaaaattagcaacagattaacaccggctacttactgtgctgctttggacattattcagatccagtgtgactgttagtttgacctctccaagctttaatgactaaacatgtgtc

SEQ ID NO: 239883 - DNA, 303 bp, Homo sapiens
agttagttcggcctgtgtccaggaatgaacaaggacagcttggaggttagaagcaagatagagttggttaggtcagatctctttcactgtctcagttacaatttttcaacagcagtttcattagggttctataggtcaagtaaaataatcagtatctacctatggatttgcacatgaggtagacactatagacactgggaagctagctcatcaatttcccggcctcctcccaggcagaggtggttatgtgccattcttgtctgctggaagatgtgcaataaagcctttgctttatagatttaa

SEQ ID NO: 239884 - DNA, 473 bp, Homo sapiens
tgagcaatgtaagttggataacctttatccaaaacacttgggaccagaattgtttcagatttcggatttgtttttttggattttagaatatttgcacagacataataagatatcttggggatgaaaccaaagtctaaaaacaaaatttgcttatgtttcatatatactttacacacataagctgagataattttatacaatactttgaataattttgtacatgaagcaaagtttgtactaagtacttatgtatggaattttctacttttaacttcatgttggtactcaaaaagtttcagattttggagcatttcggatttcagattattgtattatgcatgctcaatatgtacatgcaatatgccttaaaacacgcagaagtatacctacaacttaaaataataaggaattcaaaatgtcaaatctgtacatctggagacatttaataaacatatgtcaacattttaaaatag

SEQ ID NO: 239885 - DNA, 447 bp, Homo sapiens
tctgtaaaaggtataattaccctgctaatgctttacatatggcttgcagctcatgcccaggcccatgcccaggcttgtgcccaggcttgtggcttgcacccatggctcatgcccaggctcgcttgtgctgagatagagtaagaaccgtgtcaaaaccgtctgtgattcctcaagtgtttttccagctccctgccacttgtccacccactgccctcggtccccagcttgggctggaacccgacacttaggatgacaagcattatggtcttgtggatgttaattagacagcattattatagcataaaaaaaaggcacaagcccatttctaataattattgtattttcctaaccagtacatatgattttttttagattatcttgttttctgttcatgatcgcttgacattctatctcttattttattaaaagttgtgacattctttgcca

SEQ ID NO: 239886 - DNA, 569 bp, Homo sapiens
tgagatggaggctcgctctgtcgcccaggctggagtgcagtggtgtgatctcagctcactgcaagctccgcctcctgggttcacgctgttctcttgcctcagcctcctgagtagctgggactactggcgtgcaccgccatgtctggctaatttttgtatttttttgtagagatggggtcttgctatgttgcccaggctggtcttgaactcctggattcaggtgatcccccgtcgcagcctcccaaggtgctgggattacaggtgtgagccaccattcctggccctgaatgtttactttgggccaaatgattttcaactctgaatctttcacagatgagacagtgtgttgagtaattttgtcgagttcttggagtgtataagtgctagatataagtgcttatgccctaacaggaggggctgataataaacaaaacgcagtaatttgggatagttttagtgtcctgaagaacatagaacagggtatgtgatagagtgactgttaggggcagtgtgcaggtggagtggagccacacattattagcctaggttaggttggagaacagtcaggg

SEQ ID NO: 239887 - DNA, 480 bp, Homo sapiens
tgcagattttgcaggcggtgagttccgtgtggtgccataaagatggccacacattctttgtcattgggaggccattgagagttgacataaatttccccttctcttgaatctgggctggccttgtagttattttgaccaatagaatgcagtagaagtgacacttagtaatttccaaggctgacccttaagagatttttcagcttttctatgtgacttgcaacactttcttgaaacacagccaccatgcaagacatctacctaccctgtggccaccagtctgtgaagagcccacactagccataataagagagacagaaagagggtcagggtggaatagcactgaggtaccagatgtggtaacaccttttgaaatgtagccaagtgaaaccagcagaagcaatatagaactgaatgactgcctagtagagccctctccaaatttatgactcacaaataaaatggtggttgttttaagccaca

SEQ ID NO: 239888 - DNA, 325 bp, Homo sapiens
aagagaaatcaaactctaaggaaagaaaatatttttatttcagagttgaggagctgtggcccaaaggctgtggggtgaatattcatttttatttttctttatctttccatgtgctgctttatcccagatatgggcacatttgcagaaagtgcaacagaatgagctaagtaatgcccaagctttctggccagaagatagaagagagaagcttcagagaacagaaattagttgagagattttccagagggaggggctttagaaagtgaactcttatttatgatgaaaaactaaatgtaataaagtgtagtagaggaaatagtaatga

SEQ ID NO: 239889 - DNA, 717 bp, Homo sapiens
tcatgaggtgtagtagtaatatctaagaccttaactgaaatgtttaaagaaacctaggtataacagagaacattatgggtgctgatttccactctcactaaaagccagtgactttactatatcagcaagtataaagcactacttgactctgtagattgtatggaccaagaatgtagatatgagacagctgatctctacgaactgaatttttagtgagtaaagcaagcaagcatgtaatagagaacaataaaagctctgatagacatatgtacaaggtgttgtagaggtacaaaggaaagttattcagactaggcaagagagtgattaaacttaagtattgaagaacaaatagatcatagctctaggggatgtggaacatacaaagtggaaagtttgggaagagtattcccaaggcaaaaagcttagcacatacaaacataggaggaaagcgagacactcttaaagagttgctatgctttgggaggtggaggcgggcggatcacgagatcaagagattgagaccatcctggccgacacagtgaaaccctgtctctactaaaaatacaaaaattagctgggcgtggtgcgcgcctgtagttccagctactcaggaggccgaggcaggagaattgcttgaacccaggaggcagaggttgcagtgaactgagattgtgccactgtactccaacctggcaacagagcgagactcttgtctca

SEQ ID NO: 239890 - DNA, 426 bp, Homo sapiens
tttttttttttaagacagagtttccgtctgttgcccaggctggagtacagtggcgccatctcggctcactgcaacctccacctcccaggttcaagcatttctcgtgcctcagccttccaggtagctgggattgcaagcatgcaccaccatgcccggctaatttttgtatttttcgtagagacagtggggttttgccatgtcagccaggttggtctcgaactcctggccgtaagtgatctgcatctgcctgtctccgccgcctaaagtgctgggattacaggcgtgagccactgtgcctggccgcatttgtgttttttattttaattaggattttagtctatagctttttgttttgttttgatgtttacgttgctttggttttgggatcataaaatgaattggagagcgtttcccttctgttttctg

SEQ ID NO: 239891 - DNA, 738 bp, Homo sapiens
agttatattttaataataattctgtagtcactgggccgggcctggtggctcatgtctgtaatcccagcactttgggaggcagaggcaggcagatcacgaggtcaggagatcgagaccatcccggctaacacggtgaaacccagtctctactaaaaaaaaaaaaaaaaaaaaaaaaaaaatattagccgggcatggtggcgggcgcctgtagtcccagctactcgtgaggctgaggcaggagaatggcatgaacccgagaggcggagcttgcagtgagccgagatcgcgccactgcactccaacctgggcgacagagcaagactccatctcaaaaacaaaacaaaacaaacaaacaaacaaacaaaaccttcagggaagtaaaacagggaagggaaagaagtcagtgaagatcgtatcatcacggaagttaccactgtgggctcccggagtttaatccttctatttaatagaaaactcaggtaaccagtgtccaaaacagaactcaaagttatcctgcccaagaagtgagggagctggctgtgacagtaatacccaaatgcttatgggttgttgttgagggctcctgggcagagtggagaagagtattaattccctggaacttctggccgtccccaaacaagggcagagcaggctctagcacaggagagagctgagaaagctcctaggcaaagagctggaggcattcacagttggaaatctagggactttgcaaattac

SEQ ID NO: 239892 - DNA, 1291 bp, Homo sapiens
acagagtatccggcgtgtgtacgctttggcttagggaatgatggctggtttgatcatctaagtagactagtaaaactttctctataacagcaataaggctattctgttttctcataatttgtgtgttcactagagcaacatctttaatttcctttaaaaatttttcctgcactttgggaagcagaggcaggcagatcacttgaggtcaggagttcaagaccaccctgaccaacatggtgaaaccccatcagtattaaacatataaaaattagctgggcatggtggcaggcacctgtaatcccaaccactcaggaggctgaggcaagagaatcgtttgaacccgggaggcggaggttgcagtgagccaagattgcaccactgcactccagcctgggtgacagagtgagactctgtctcagaaaaataaataagttatagcctgtaatttcaggggaaaaaagcccatggatattacaagtgttgcatctaatttcagggaattcatagatctcatgatgccagtccatggatgctaggttaaaaacccatgcttgtggctgtaatctcagtaacaacaactgcgcggggtcgggcgtggtggctcacacctctaatcccagcactttgggaggccaaggtgggcggatcacgaggtcaggagatcgagaccatcccggctaacacggtgaaacccagtctctactaaaaaaaaaaaaaaaaaaaaaaaaaaaatattagccgggcatggtggcgggcgcctgtagtcccagctactcgtgaggctgaggcaggagaatggcatgaacccgagaggcggagcttgcagtgagccgagatcgcgccactgcactccaacctgggcgacagagcaagactccatctcaaaaacaaaacaaaacaaacaaacaaacaaacaaaaccttcagggaagtaaaacagggaagggaaagaagtcagtgaagatcgtatcatcacggaagttaccactgtgggctcccggagtttaatccttctatttaatagaaaactcaggtaaccagtgtccaaaacagaactcaaagttatcctgcccaagaagtgagggagctggctgtgacagtaatacccaaatgcttatgggttgttgttgagggctcctgggcagagtggagaagagtattaattccctggaacttctggccgtccccaaacaagggcagagcaggctctagcacaggagagagctgagaaagctcctaggcaaagagctggaggcattcacagttggaaatctagggactttgcaaattac

SEQ ID NO: 239893 - DNA, 437 bp, Homo sapiens
tgtctcctgggcctcaagaggcttccgggggtttcagagtgcatgagaccttttgtagtcctctcctaggtgctagctgtgactccctgaacattctggaatgagttaggctggagccaaatggcccagtaccgttgccactagccacagggagctatttaactttacgttaattacaattagcatttcagtttctcaggtgcactagccatggttcaggtattcagtaggcgcacatgggttctgtactggataatgcacatagagaatgtttccattggcacagaaaggactcttggacagcaggagaatagagcctatggctgggcctgtaatcccggcacttggaaaggtcgaggcaggaggatctcttgaggccaggagtttgagaccagcctgggcaacatagtaagacctgtatctttacaaaaaatttg

SEQ ID NO: 239894 - DNA, 95 bp, Homo sapiens
cagccaagatgctaggagcacacacagcaggggccatgcccggggcagccgcacgccacctgttgtttaaaaccaaggccgccagcagttactga

SEQ ID NO: 239895 - DNA, 326 bp, Homo sapiens
tgaacaggttcacggcctaggagcaacaggctgcaccacagacgagcctcctcttccctccggtgaggcatggacaatcagacttctgggccaggcccactgtgccccaccgcctactggagccgtccttcaccgtgcctctagctggatgtaatcaggaactcagcgtgcaccacctcacgtctggctgtttctgcctttgtgatgtccgagaggttcgttcctgtgggtatgcatggctccagctgctcattttcttggccatacagaattcttgttatatacatattttatgattcataaacgctactgttggtgaacaaacc

SEQ ID NO: 239896 - DNA, 460 bp, Homo sapiens
acaaacgtaacatgcatgctgagactattactcctggaccacaactgtagataaacgacaaagtttgtatgttcaccctcataacattttgatcatttgaacttgtgacctctctactggaactgtattgaacttcacctaaaggaattgctggatccaatcgccgtgcctcgtggatcctccactaagatcccagttcccagaccgagatccccgattcccagatccccgttcctgagctgcagcagactccctagcaggactgggtccaacccgccggcaaacaattttaacataaaccgttttcaacttggtaagaggaaatcattttggtttctatcataagtggtccacgtaagtctattctttcaccttaaaactgcttcaaattggaacggtgctcccggggacatagtgaacactccagcctgggcaacaagagtgaaactccatctccaaa

SEQ ID NO: 239897 - DNA, 499 bp, Homo sapiens
cgccctgcagacctgccaccgctgcctcggggttcccctgggaaaggcacccagggagggccgggcagggaagcaggagcccacttggctcctgccagagagtgaacagaagcaaaacgtgcctttggttaatttttcttctaatagaagtaattcagagtcaaatgaaataccatttaaattttccatgaaaataatcaccctgctatttcacatgattttcccaggctttgttgtatgacttggaaaccaggcttgttatgaaggaggcagagttggggtgtacagcgaacaggcatttctcccaagctcacgggcacattttttcaaactgtgttttttaattggcctcttcatgtataaatgaacagtgtaacggacaagcagggcaccttaatcccaacgccacagtcggccagtttgcgggttcaggcctcctttatgatacatgccacaaacacaatatctttgtattaaaaggattttttttttttgctga

SEQ ID NO: 239898 - DNA, 833 bp, Homo sapiens
cttacaggtaagtaaacctgggcccaagtatcacagagcacacagctggaattcacagcaagacctgattgacttcgaagtcagtggtctttcccctgcttcccacgagacagttttgatcatcgatgattttctggttctaatgagatcaaggacatgaagaggctgagtgcctccatgagcttcattattttccatgatctgacctctcattctcttaagctttggagttggatgaaggaagaactctgaaaaaaagtatctgcacccaaggacccacaccaaaggagcagtaccagagggaacacatctgaagagccctatctggatttgccaacatgatttagatgataagatactggactttgagctggtgccataatgggatgaggctttgggagtccaaagggagataagtgtaagtgtatttcaccggtgaagaatgtaaaacataaaaggccagaacatgaactctgcagctaatctccaaagatggctctcagtgaaccacacctcatggaattcatgtccttgcatagtcccctcccgcactgaatctgggttaactttgtgactttctctaactatcagaatgtgacagaagtaacaatatgatacatccctccatttagtgagatcatctttaatttctcccaataatgttttgtagttttctgtgtagaggtcttacaaattttttagattgattctttgacatgtgacttttctatgctgttgataaatgatattttgttaaaatttttattttctaattgcttgttactagcatatagaaacttaattacatatagaaactaagtacaggactttgt

SEQ ID NO: 239899 - DNA, 687 bp, Homo sapiens
cttacaggtaagtaaacctgggcccaagtatcacagagcacacagctggaattcacagcaagacctgattgacttcgaagtcagtggtctttcccctgcttcccacgagacagtatctgcacccaaggacccacaccaaaggagcagtaccagagggaacacatctgaagagccctatctggatttgccaacatgatttagatgataagatactggactttgagctggtgccataatgggatgaggctttgggagtccaaagggagataagtgtaagtgtatttcaccggtgaagaatgtaaaacataaaaggccagaacatgaactctgcagctaatctccaaagatggctctcagtgaaccacacctcatggaattcatgtccttgcatagtcccctcccgcactgaatctgggttaactttgtgactttctctaactatcagaatgtgacagaagtaacaatatgatacatccctccatttagtgagatcatctttaatttctcccaataatgttttgtagttttctgtgtagaggtcttacaaattttttagattgattctttgacatgtgacttttctatgctgttgataaatgatattttgttaaaatttttattttctaattgcttgttactagcatatagaaacttaattacatatagaaactaagtacaggactttgt

SEQ ID NO: 239900 - DNA, 345 bp, Homo sapiens
ttacacaatgtatacatgtattgaaacatcacactgtgccccatgtgtgtaattattatgtcaattagaaacaaaaaaacaaaatgaccacaaaacagccttctgtatctgctgggtctgcatccttgaatttgatcaaccaaggataaaaaaaaatgtggaagaaaaaaccccaaacaataaaaaaaaccaatagaaaaataaaaaattagctattgtaagtaatctagagataatgaaaaatatacaggaggatgtgcataggttatatgcaagtaagtataccattttatatcagggacttgagcattcaaagattttggtaagctctgagggtgaggtggg

SEQ ID NO: 239901 - DNA, 480 bp, Homo sapiens
gtgctaactattgtataggaaaatatacatctatactattttgtcctcagacccactctgtgtgatagggactattattgtttaagttcttgattccctcactccagatattagcctcctcaaccatccccaactccgtaaatgatactatcatctgccctgttgctcaagcttggaacttaaaagccatcactgattctattcttcctctcaatcttacctttttggtcaccccatctgctttcttctaacccatcaacaagtcctgctttacctcccaggtgtttctgaaaattgtctctatacttcagcattaccacaaacattaacacaagccaccaactctcacctcttaactggacaccccacttctccttcagatcccttcccagccagtcagcaaagattagtcggagggaactttcaaaaaaataaatttccctgtgtagaatatttcaattgcttctgttaggatgaaaa

SEQ ID NO: 239902 - DNA, 352 bp, Homo sapiens
gaaagggagtttagcttgcagagtattaaagaatgcccttaggatcaacacctatggaaggcaagggaggaaagcaagggtgggcaaagggagaaatcaagctgcatgaaggccaaatgccggcctggactcaccctacagggaactctggggcttgattggcttcatagaattgtctggagttggggcaaggggtcaagcctttatattcccatatttatcagtcattggatgtagggtacccagaaatgggacctgaggccattgtagaagggcctatcatatgataggtataaactgaccactctctcaacatctgggaaacaaatccttcatctaaggggaatctgga

SEQ ID NO: 239903 - DNA, 594 bp, Homo sapiens
gtatggaggcttcccgtgccccaaatgtttggatgcatataaattacattttactaaaatgtctacacacgagttcatacacgcatgcgcacacgcaaatagcggagaatctggctctaattacttgcactttagttgaactgtggcgtttcctttgaatctctccctaatgtatgggagctgtaggctttgcagtcctgcagtgaatccacagaaaaagggagaaaaaaatccagataggctctctttggtgccaacacaaatgaagtccaaacgaacattttgaccaaacgcaactttgctcttcttccttaattagctgaaattactcccttccactgggattcggagctctgggctcaaaattcccctggggccatgcaggaaatgtcttttgctttataactcctttttcttttaaagctcagctgcccagagagtgcattaaaatactgtcttaatcacagaaggttctagtaaaaaggctaggctttcctaatgcatgatgcctgcctgcctgtaatcaggcccaacctaaaatcctgaaatctgtcaacatcgttttagccagccgtaaattagctctcacaaaga

SEQ ID NO: 239904 - DNA, 415 bp, Homo sapiens
gctgggctcagctgggactgcctcctacacgtggcctctccagcatggtgacgtcacggaagcctcagactcctcacacagatgctggattccccggagggagtgtttccaggggtcccctgcagaatcagcaagcaacgcttctgacacctgcctcggaagggccagagcacctctgctgttgtggtccattggcaagccaatcactaaggctggcctgtactcaaaggaagaattagatcccacctctccatgggccgcgcagcagataattcggggtcttggttaatctaccatgttctttctctccactgcaggtgtgttaaaccggaggccactgggtctcttggacaactagcagtgaatctgtgaatcccctgagtgcacagttttaaataaatgtgcaaaatgtgca

SEQ ID NO: 239905 - DNA, 463 bp, Homo sapiens
aactgaatagaacttggtccttgggatcctgggaaataggggctagttgtgaggcacttcctggggtggtgaagaggaagccctggatagaccttggtaaaagaggaaattgggatatcagccccacgggctatttgcacggtgtgttccgggcttcagcatgtttctacatattttaatgtgagtttaggagggtaggagttctttttcaacttcacagatgaggaaacagcctcatttaaggtcagcagtttaatcagggttacatgacttaagtgtgacagagccagacttgaagtgaggtttgtgactaatgagttttgttacattttcccacctcaccacagttccttgaacttgtcattggtatatctgtttcaggctttctgccttgtggcataccaccatactattatttacataatatttttcttaaataaacacaatttaaaagttaacctca

SEQ ID NO: 239906 - DNA, 406 bp, Homo sapiens
agggcttttctttcttggtagtaagataactgtaggtctttgcagtagtgtcttagattatgtgaaatatggtattttggcaagtgtacatggctaagaacaagtggaatcagaattcaacttaagtttgcttgactccaaagcttatgtgttttccagtataatgtgctgcagtatcaatggtctgtatgaacaaaggccatatcatttttattgacaaagtatagaaacggggaaatggtgactgaactggaacttgcatcatctaattccataactgaggagacaatagcctggggactgcatgtatcccacaggatgttaaaaaattgagaaaatgttatttcatgatcttcacttctctgttgattataacttatttttgaagaggctaaaataaatggca

SEQ ID NO: 239907 - DNA, 332 bp, Homo sapiens
gacctatggatgggaatttataatatccagcaaaattaaatgtatatttgtcctctgacctaaagtccaatattaaaggtttaacctagtaatacacttataaaaatgttaactacatataaagaagttcatttactgcagcttactcatggatgctaaaataattagtaggaacgttgccggggaacaagatattctgggcgtcctgcaagggatggtggctcatgcttgtaatcccaacattttctgagattgaggtgggaggatcacttgagcccagtagttcaaggctgcagtgagctaggatcgtgacactgcactccaccctgggc

SEQ ID NO: 239908 - DNA, 428 bp, Homo sapiens
gagaaagatttcagttttactttgtacaattaaacatgcatggctgcatgtatacatatgcatatttaaaatattttgaagtctttacaccaaatgttaactgaaattatctttggatgtagaatagtggttagtttttatttaatcctttcaactttcctgtatttaaattttttaaagaatacataccattataagcaaaaatacacataaaataaatgttttatttattaaactttaaaaatacatttcaaaacttgcacagaatgattcctggctccagatgaacaagatctggggctctgatgtatggcatgggtggtaatggaaagagtgaatttgactttggtaatcatcacgcattgtatatgtatatcaaatcatcacattatacactttgaatgtattcaatcttgttttgacaatta

SEQ ID NO: 239909 - DNA, 1769 bp, Homo sapiens
  misc_feature (1354)..(1354): n is a, c, g, or t
  misc_feature (1375)..(1375): n is a, c, g, or t
  misc_feature (1403)..(1403): n is a, c, g, or t
aacagattgctaacccacccccagattttcagattttattttatttatttatttatttttttatctgactgattttcagattttaaaaatctatccctagattttctggggtagagtttgaaaatttgtgtttctaacaagctcccagatgacgctgctgctactgcttcagggaccacatttcaagaaccattgatataactctaaaccattcttgtcttcttcctatgtattttccacatcagtcaaagtgatcttttcaaaccataaatctggtcattctactgcatagttttgaaatccattgtcttcccattgcttttaggacaagtcaaaatcctagaagtccctacacagtcccctcctagcctactcgttcagtgacatctcacactaatgctgcccctaccctcaacccactcttcgctgcaccagccaccatggtcacctttcagttcctcaaatttatcaagctccacccttccccaaggtctttccacatactgtttcttccaccaagatgttctccctacccccaagccctccctgaccacaattttgctcggttaattcctacttctcctccttgtgcaatgcgggattggttattaggatcttaacttaaatgtcactttcctaaggaagccttttctaactgcctcagccaagacagatgtctctggtttcctaactagagcctttaattatacatttgtttaatgattatttgagctacttactctactaactggtaagcatcataagagcacagaccatgtttttgtttgctcacaactgtatccctgtgccctgtacacatgaatatttggtaaatgaatgattgattctggaatatttggttgaagaccactagtggacttaggagttcttcccaaagaactgcactttgatctgaaagctcaaatttcttcagttctccttttaccagtacttacaggtgaatcgtctgcagctccatggacttttcttctcataaaccttagtatttcttatttgtagacttactaagtgtattaaggtttaataaaattcaatatggcgcattgttttagtatatataaaatcatgtgtttgagctcatattctttatttttttttcttttgagatggagtttcgctcttgttgcccaagctggagtgcaatgtcatagtctcggctcactgcaacctccacctcccgggttcaagcaactctcctgcttcagcctcccaggtggccgagattacaggcgtgcaccaccatgcccagctaattttttgtatttttacctggccaacatggtgaaacgacatctctataaaaatacaaaattagctgagcttgatggcgggngcctgtaatcccagctactcnggaggttgaggcaggacaaattgcttgnatacgggaggcagaggttgcagtaagccgagatcacaccactgcactccagcctgggcaacagagtaagactctgtctcaaaaaaaaatcgtaaaataaaataaatagataccttccttatttctaactccacgcgtccactcatccactggaggccatactttatgactatggccaccattttgagtttttgtaacattgagatatttggaaatttcatgaactctaccttctagaagattttcccacagaacagcatttaagagtccccactcagtcctcaagcatacgtcaatttttggctcaccatactcagacttgagtgccaaagcccacaggcctacacttctgtctttgaacatgctc

SEQ ID NO: 239910 - DNA, 1228 bp, Homo sapiens
  misc_feature (813)..(813): n is a, c, g, or t
  misc_feature (834)..(834): n is a, c, g, or t
  misc_feature (862)..(862): n is a, c, g, or t
aacagattgctaacccacccccagattttcagattttattttatttatttatttatttttttatctgactgattttcagattttaaaaatctatccctagattttctggggtagagtttgaaaatttgtgtttctaacaagctcccagatgacgctgctgctactgcttcagggaccacatttcaagaaccattgatataactctaaaccattcttgtcttcttcctatgtattttccacatcagtcaaagtgatcttttcaaaccataaatctggtcattctactgcatagttttgaaatccattgtcttcccattgcttttaggacaagtcaaaatcctagaagtccctacacagtcccctcctagcctactcgttcagtgacatctcacactaatgctgcccctaccctcaacccactcttcgctgcaccagccaccatggtcacctttcagttcctcaaatttatcaagctccacccttccccaaggtctttccacatactgtttcttccaccaagatgttctccctacccccaagccctccctgaccacaattttgctcggttaattcctacttctcctccttgtgcaatgcgggattggttattaggatcttaacttaaatgtcactttcctaaggaagccttttctaactgcctcagccaagacagatgtctctggtttcctaactagagcctttaattatacatttgtttaatgattatttgagctacttactctactaacctggccaacatggtgaaacgacatctctataaaaatacaaaattagctgagcttgatggcgggngcctgtaatcccagctactcnggaggttgaggcaggacaaattgcttgnatacgggaggcagaggttgcagtaagccgagatcacaccactgcactccagcctgggcaacagagtaagactctgtctcaaaaaaaaatcgtaaaataaaataaatagataccttccttatttctaactccacgcgtccactcatccactggaggccatactttatgactatggccaccattttgagtttttgtaacattgagatatttggaaatttcatgaactctaccttctagaagattttcccacagaacagcatttaagagtccccactcagtcctcaagcatacgtcaatttttggctcaccatactcagacttgagtgccaaagcccacaggcctacacttctgtctttgaacatgctc

SEQ ID NO: 239911 - DNA, 2028 bp, Homo sapiens
  misc_feature (822)..(822): n is a, c, g, or t
acaagaacacccaagactacaagcagttcattgtttttacagatagacttcagccaaccactgaagcagcagagatggaatttttaaatagacacaaactagagacagttcctttggtaaggcacaaaggtgaggcttctcagccccatagtggggctgcatgcatacagagaaggtctccacctcgggacagcttcttgaatccggtggatatcaactgtcactgtgtgtcagaatcaccttggggcttttaaaaaataatgatgcttgggcacccactcccagagctcaagtttacctgatctaaggcatgtgcctgggcattggtgtttctttagagcgcctccgtcccaggtgaagctaatggatagccagccctactttacgaatgaaccacagctcaaaatcttgtataaacaatttctctctccaacaccttatgtactcagttccactggatgtcttgcgctttatatgcttgaaactgagttcttgatttgggacccttccctacctggcccttgctcagggttccccatcttggtgagctgcactacccagcattctgtagtgaccagaatcccaagaactccccttcattctcatttctctgcccatcttctcccctgcccgcccatatacaattcgttctcggtgctgaggctattactttccaactgcacctagatatgtccacggctcgtcacctcccctgcttctgatgtagtcaaagctaccgtcatttgttctagggctactccctggcctctgggattccacttttgtctctttaagttgttctctgcagagtaggttgagtgnctttttctggcttaagacccatcaaaggctttctgctgtagagaattcaaacccaaacttttgcccaagaccagaaggccctgtggaatccgagcccccagatcccacacctctctcccctgctagttagcttgaagcaccaagctctaaagtctttccatttactgttcttttcaccgggaatgctttttcctccaccctttacaggctggcttcttcttcaccttcatgtcttagtctaagacatgacaattaactgcttgtagtcatgcttttgttttgtttttgtttttgtttttaaatcttggcactattgacatttggggctggaaaatttctttgtcgttggaacttttctgtacattataggatgtttagtctctactcactggatgacacaataatctgctccccagttgtgataagaaaaaatgtctctagacaatgccaaatgcctcatgaggacaaaatccctgccaactgataactactagcttaaatattaacttcttgaacaggtattctctgttctccaggctttaagtctccaggtgtatttctcaatcttcatatcctatttgttactttcatagaacttttctcaccttgaaattgaatatttatctagtaaatatctgtgtcatagtcccactagactatcttgactatttcattcaattctgtaatgatagcattgcgtacggctcctggtatgcagtagatgcttaataaacttctgttgaagaaatgcatgcacgcatgaatgaatgcatgagcaaacaaagactgctaggcaggcaagtgccttcccgccagggttagagagattatctagcagtgcaaaaagaccatggactaaaaaggaatgagataatgccccttgcagagacatggatgaagctggaagccatcatcctcagcaaactaacacaggaacagaaaaccaagtaccgcatgttctcactcataagtgggaactgaactatgagaacatagggacacagagagagtaacagcacacatcggggcctattggggtgggggtgagggtgaggggaggggaagtatcaggacaaatagctaatgcatgcagggcttaacactagggtgacgagttgataggtgaagcaaaccaccatgccacacatacagctatgtaacaaacctgtaagttctgcacatgtatcccggaatttaaagtaaaat

SEQ ID NO: 239912 - DNA, 193 bp, Homo sapiens
atgcaaatatgtaactagcctgaattgccgtataataatttaaacaatctggcaattgtaggatggcagtgtctctctcccgccctacaaaagatgcattgttcccttggcatttatcacatcatttagtggtaaagatttcttctgtaaagagaatgcagcttgactttaataaacagactttaaaaatagc

SEQ ID NO: 239913 - DNA, 350 bp, Homo sapiens
aataatctcagattgcttattatttttcagaaggctgtatttttagtcttaggctattggtttgtcttatattgcaggattttaaaaaaatgattagttcccagcactttgggaggctgagatgggcagatcacaaggtgaagagattgagaccatcctggccaacatggtgaaaccccctctctactaaaaatacaaaaattagctgggcgtggtggcatgtgcctgtagtcccagctactcagggggctgaggcaggagaattgcttaaactccagaggtggaggttgcagtgagccgaggtggtgccattgcactccagcctgctgacagagtgagactccgtctca

SEQ ID NO: 239914 - DNA, 909 bp, Homo sapiens
ctcactctattgcccaggctggagtacagtggcacaataatgggctcaagtgatccctcccaactcagcattcctagtagctgggactacaggtatacaccaccgcccccagctaattttttgggttttgtagagatgtaaagacagggtttcactatgttgctcaggctggtctttaactcctgggctcaagcgatcatccctcctctagctcccaaagtgttgagattacaggcataagccaacacacccagccgcttacatttctctttgaatagtccaatatataaataagtgtctccttaaactctaaaagcattttagaagagagatgatagaaggaagaagaaattaaacagaaagggaaaaaggtgagggaattattttaaaaaaggaaattagataatgggacaatataaaagcttccagtatgctagactggcagaactaaaagagatcttaactatcatgtagccaactttttataatatatattagataaatgagaccattgtaagttaagtgatctgccaattcacaggtaattaagttacagagcacaaactagatccaagattccagagacttccccgtcaactgcttttaattgctcacactgagatatgttatagggagtattatcaatttctagacccagttattataattcctgtcttacacaaagtgtggagaagagttcaagcacaataatgcaccaaagaaatttagaaattgcaagttaaaaacaagtccagagaaatcaacacattttattttattttatttttatttatttattttttgagacggagtctcgctctgtcgcccaggctggagtgcagtggcgtgatcttggctcactgcaagctccgcctcccaggttaatgccattctcctgcctcagcctcc

SEQ ID NO: 239915 - DNA, 441 bp, Homo sapiens
ggtgaccgtcggtggtcggaaaagtctttgtggctgaggagtgagggcaaaggggcatgtgctggcacttcctgcggccgactgtgacaatggaatgaaaagtcccctggaagggaggacagagagttgagggcaggaccttgggttctggcatcacagagggcactggaagaagaaatggaacaagggaaagggacttgaaacagtcacacgagaggagctgaagtatcaatacttcagagatggactcctgcatcttagggcagggatcgggaaatcactgcctgcctctgtttttggaccgcctgaaagctaagaatggtttttactttcttacacggctgaaaaaaaaatccaaaaagaaaaacaatctttcatgacacatgacaatttataaaaactggaattctagtgtctataaataaagttttattggaacgc

SEQ ID NO: 239916 - DNA, 481 bp, Homo sapiens
taagaataaatttgggggcagaatttccagaatagtagctctttctccccataacttgtgaggattaagagaaaaatgccccaaactccatccttctcatgggccccttgtcaaaccaaggtgactttctgaggtagccactcactgggtgccagaaaaccctgagcctgtttatccagaattctctgtgcctgtgccataagcaaaagttttgtgtctttagcagagatgatattgttccggggtttggctttccctcacccccaggggcacagtagatgctaatgactttgtaacggcagcagggggtcatgacagggagctgctgtgtgttgaggagagaaggcatgtttctttcttcattgtgtggagagcgtcacaagccactctctttccatctgcccatcatgctgggagttgttcagatggccaatggaggagcaggctgggactagtccttggcagggctccgcagaagggc

SEQ ID NO: 239917 - DNA, 443 bp, Homo sapiens
acagggggtaccggtaccggtccttggcctgttaggaaccacgcaggacagcaggaggaaatctgccggcatctctcagaaagaaacaccaaaaaagactgttgatatggaatcaactgaagtattcaccaagaaaactgagctgactgaagaagaaaagaatgaccaaaaacatctgaacaaaatcaaccagtattatcagttcaccttgccccaatatgtaaaagctgtttatcaatatcacaaaattatgaaaccatggaaaaacatgaagacaaatgcttaccaagttatccccactctgggatctttaagattcttgaattaactgctcctactttactttggaaacaatttctccttctacctcatagactgtattgactccatcaagcatgaacacagatagttattaacaatcttattatgtgccatgaattatc

SEQ ID NO: 239918 - DNA, 599 bp, Homo sapiens
gattagattaaatataattcttttaacgtggccagaggaatcagtcttaaaagcaggaaatactttctatacaaaagtttcacctttccgaatgtcatgatgtagttttaaaaaaagcctacctttcattgtatataatttttcaaacgtaggcattctcaatgcccaaatatagagaagcaattcagtaattagagtatggttacagctatgtataattttttaaaaatgtgtagaagaaaagctgaaagtctatcattggcagtagttattaggaaatgctattcttttacctttgagtacttttgccacagacagtgtaaatgtatttttatcatcatttcatcttttaaaataaaagacaataattgtgaaattaaattgttgggcttataacatgtaaagatgaaatatatgacagtaattgcacaaagaaaggagctatattgaaacagtttctgtatacttctagaatccagtaatcccaaagtaaaaacaagaatgaaataataaacagaataattgaaatcagtggaattgaaaatgggcaaatgatagagaagatagatggaactaaaaaacaaataaggattctttga

SEQ ID NO: 239919 - DNA, 527 bp, Homo sapiens
aatttagaaatgctttttctttactcctcatccttgcatctatatatatttagcacatataagtaattatttaagtccacaaacaaggtttggtgcacatttggattgacacctcacaatgactccacagatggctggcacctctgtggtccccaacttgcagaatggaaaccatggttctcaaagtgtagttcccagaacagcagcatacatatcacctgggaacttgtaaaaaactcaaaagtcctggacgggtgcggtggctcacgcctgtaatcccagcactttgggaggccaaggcgggtggattacttgaggtcaggagtgcaagaccagcctggccaacatggtggaaccccatctctactaaaaatacaaaaattagccagtgtcgtggctgtagtcccagctacttgggaggctgaggcaggagaatcacttgaacccaggaggcggatgttgcagtgagctgagatcgtgccactgaaccccagcctgggcgagagagcaagactctgtctccaaaa

SEQ ID NO: 239920 - DNA, 411 bp, Homo sapiens
gtatggtgtcaggccatggctgaagcccatgctgactttggtcttagggatttcccactgggtactctctgagtttctgaggacctggctgcagccactctggttacatcaggaggaaaaggtgacggacttatctcccacagcctacactctctcagaaagttcccaacacgaagaaatgataaatgtttgagatgatgggtatgctaattactctgatctgatcaccatacattacatgtatcaaaatatcactatgttctcaataaatatgtataattattgtatgtcaatttttaaaaaagacagttaaagtcatgaagatgcaaacatggaaagccctccttttcaagaacaggagtctcttctgtatttggagaagaccaaggaccaaaaaataaaccactcttt

SEQ ID NO: 239921 - DNA, 361 bp, Homo sapiens
tctcaataagagatagaaaaagcttggcagaagataagtaaggaaatagaggacttaaataacacaataaacaaaatatatctaacagacatgtatagaacactttacccagtaaaaatagaatacatttttctcaagtgctcatgaaacattctccatgacaaaccataggttagatcacaaatcctcagtagattttagaagataggtatcacgcaaagtatattctttgaccacaccaagatgatggtaaaaatcaatcgcagaaggaaaactggaaaattaacaaatctgtggaaattaaagcacatattcttaaataactaatgaatcaaagaggaaatcacaaggaaatttagaa

SEQ ID NO: 239922 - DNA, 358 bp, Homo sapiens
cagcacagcacagaacaaaacagacacagctcctgtccccgggctgacagccaagtaggagagatgaatgttcaacaatcttgcacataagcagtaagtgccatggtgttagccagcgttctccagagaaacagaaccaataggatggatatacagagatatagaaaaagatttattatgaggcattagctcccatgattatggacgctgagaagtacccaggatctgccctccgcaagctggagtagttccagtccgcgtctgaaggtgcaagaatcagagcatggatgtctgaagcagggaaaatatggtgtcccacctcaaagaagagcaaatttgcccttcctctgccttttta

SEQ ID NO: 239923 - DNA, 356 bp, Homo sapiens
actttagttcaattttatagctagggaagtgggttcagaggcaaatgacttcataagttaaaaggcaaattctcagcgatttcctggccattgctctgaggaccattgttgactctctcttgttgaatataacccatataaaaatagagtctaagctttttttgcagggggatggagtccccctctgtcatccaggctggagtgcgatgacacaatctcagctcactgcaacctccgtctcccgggttcaggagaatcccttgaaccaggaaggcaagagttgcagtgagccaagattgcaccattgcattccagcctgggcaacaagagtgaaactttgtctcaaaaaaaaaaaa

SEQ ID NO: 239924 - DNA, 1159 bp, Homo sapiens
ggcggagcctaggagtcagataccgcgagaagtagtctcccgaagaggttcggacaagcgcaggcgcactacaattcccgccctggccgcgaaggtggcacccgcagcgggaggcggggccgggccttcgggacaaagatcgcgagatttaatggcgagtcacagctacttcttcctggcagagaccggaagtgcggtccgcggagcgtctctggcgcttaccctgctttgggcctgcgttgctgctgctgctcctccgctcccccgtcgtatcgcctgccctggatcgaagtgatgggggatgccaaggaggccggagccgagggtccgccggccggggccgccgctcgaggagggctcagcctcctgtcccagggagaatccgaggaatcttctgcacagggatcagctttatttcttggaggcaatgaagtgaagagccgagctgtggtgaaatactcttctgcccctcctcgaacagcatttgcacgccttgaagagaaaacagacttgaaactcccacctgccaactggttacgagagagtgccaaactagggccagcaggaactaccattcttggcaacagcaagaaaagcaagccattttcaagctttggcatggcatatgactttattgattcagtgggaaatgatgtggatgttgtctctgactctgaaaacataaaaaaactcctgaaaattccctacagcaagtcgcacgtgagcatggcagtacaccgcataggaaggactctcttactagatgagctagatattcaagaactctttatgagatcgtctcagactggtgactggacatggttgaaagagttttatcaaagactcattgatcagaagtggcagaggaagaaaaagagcaaagagcactggtatcaaaaggcaattctttccaagtttttatattacagtatcaatggtgatggagccgctcagcctgtctcatccaccgcagaacagcaggaatcgtccagttcagatcagacaaatgattcggaaggggcttcatggcctgctcccttcgaaatgccttcttcagtttctgaagatcccagtgcttccagtcagggaagtgagcctcttgaaccctcatacatagtggggcatgtggcctcagcccccaaagaacaaaacctgatta

SEQ ID NO: 239925 - DNA, 1452 bp, Homo sapiens
ggcggagcctaggagtcagataccgcgagaagtagtctcccgaagaggttcggacaagcgcaggcgcactacaattcccgccctggccgcgaaggtggcacccgcagcgggaggcggggccgggccttcgggacaaagatcgcgagatttaatggcgagtcacagctacttcttcctggcagagaccggaagtgcggtccgcggagcgtctctggcgcttaccctgctttgggcctgcgttgctgctgctgctcctccgctcccccgtcgtatcgcctgccctggatcgaagtgatgggggatgccaaggaggccggagccgagggtccgccggccggggccgccgctcgaggagggctcagcctcctgtcccagggagaatccgaggaatcttctgcacagggatcagctttatttcttggaggcaatgaagtgaagagccgagctgtggtgaaatactcttctgcccctcctcgaacagcatttgcacgccttgaagagaaaacagacttgaaactcccacctgccaactggttacgagagagtgccaaactagggccagcaggaactaccattcttggcaacagcaagaaaagcaagccattttcaagctttggcatggcatatgactttattgattcagtgggaaatgatgtggatgttgtctctgactctgaaaacataaaaaaactcctgaaaattccctacagcaagtcgcacgtgagcatggcagtacaccgcataggaaggactctcttactagatgagctagatattcaagaactctttatgagatcgtctcagactggtgactggacatggttgaaagagttttatcaaagactcattgatcagaagtggcagaggaagaaaaagagcaaagagcactggtatcaaaaggcaattctttccaagtttttatattacagtatcaatggtgatggagccgctcagcctgtctcatccaccgcagaacagcaggaatcgtccagttcagatcagacaaatgattcggaaggggcttcatggcctgctcccttcgaaatgccttcttcagtttctgaagatcccagtgcttccagtcagggtcttaaaaatgattttgttcggaatattctatggacatttgaagatatccatatgttggtcggctccaacatgcccatatttggaggaggcagatacccagcagtcagcttacgtctcagggataacaacaaaccaattaatgtgctaactggaattgactattggttggacaacttgatatgcaatgtgccagagcttgtgatgtgttttcatgtaaatggaattgtacagaaatatgaaatgataaagacagaagaaattcccaatttggaaaattctaatttttctactaaagtcataaaagacattgcacagaatattttatcatttttgaaatctaattgtaccaaagaaggacatacc

SEQ ID NO: 239926 - DNA, 344 bp, Homo sapiens
gtgagtcctccgcggagggggacctgccagggatgtgggagcggaggacccgctccaccggggagggatgccacggttcccggcagattctggaggcttctccatgtttccctgacacccccaaaacagggagttgaagtccatgctccagtcggcaggtattcgtattaaaagcagttctggtagccgacaggtgaattagatacgatctttcctctcaaggagggtacatgtaaatatgtcgttccaaaacgtggcacagtcgtgcaaagcaggagggaagaaacggtgccaggtagtgactcgccgagaatgagaccgaactaattcacaaagggtgtaaa

SEQ ID NO: 239927 - DNA, 2473 bp, Homo sapiens
tttctgctacagacaggccagggacttagacacaaatggcgagggatgaggagcttgatgacgtgtcaagggggattagatatcaagtgtgggggatgaaaagcaggattcttgctggaactgagcttgccacggttggacgtggaaggccaatgttgaggcctagtggagaagagggcttggaggagcctggctaaggtttggtcaaggagagtctgtcacaagatagacccatctgtatccaggctaacgcaatagggtgaccaaatgcagcccgcacgcttctctgtgtttctctccaggtcctttgggcacttagtttataattttttattttctattttttatttttatgggtacatagtataggtgtgtatggagtacatgagatgttttgatacaggcatgcaatgtgtaataatcacatcatggaaaacagggtattatgggcacttagtttagccataaggcttccgtgccaagtggcctgggagccagctggggccagcttctgccacaggcatccttcacccacccttctcacaaacaagcgattcttcaataaacaataaacagaatacacaaaaagcaaaccaaaacatctctagatttattaatagatgggtgaattaaaggagtcttttccaaataatgtgactaacagaagccaagggggatgaatgcccaaagctggggcttgccagaacctgctggtaccgagagctgattgctgaagtgtgaggaattttgtgagccagctgacagcacattggcagcttgggatctgccagggcgggattgtttacaccacaggatttagcaaacgttatgaatcaacccctccatcggccccaagcttccctgacacaccaaacagtagaaattcactgcctttttttttttttttttaactctgcttggtgttagctaactagtcatgaagaatagaggctgaagtgaccaaagagatctttctgcattttgacattcaaatatttggaaagattttccgcattcagcatttggattctagtcccattgccaggctcaagtaagctctgtgataacaacactcagctgttggaaactgctgtccgaagcatctctcagcagatagggaggcctaaaaggacacggcagagtggtgtctggtgggtcctctcctgacatttcttctctctctggtcaaatgctggatgcacacatatagtggctctgagacttcctatctgggtgagctcaggcagttctagggacctctctgagccctagtttcatgtcctgtacaacagtagtcattcctactgcacatggttcttgagaagattggaccagaacatgtagctctggctcctggcccagacctgatcaacactcagcaaatagtggacactgatgctgttaggagaacagagcatccatatgaagggcggttccctgagctggggagaccagtgacaactgtaagtctgggttcagagcatgagtcgggggacggagaaggcccctgggcatctggccctgggtggctgagccctgggaatcctgcttttcccagagatgtgcttgtgcccagtgtgctcatgttttaaatgccagcacctactccaggaaaatgatgggtatttcaatatctgctcacattatgcatatttaaatatgaatttaaatactgtttaattctcctagggatgtgttgtcatttaaaagaggttgtgattagcatgaaggactggggacaggagcaggagatggcagagcagctgtaggcactgatgtaatgcctccagctttatgaggacgggcccaaccaggcttcacccatttggggccctcaagcgggagcgtcagtggcagccctcgccatcgtccgtctgttgaatgtattgccacatggccacattatgccccaggagccatgtgttggaggacagtatccttaggcttctcagaaattccacatgggagcctcaaatggacatgcttttcttgaaaacaaaaatatttgtaaaaatgtaacaatgggagtcgtttaatctcaagtctcccctataagcaaaaatagataaaattatgaaatgtaagatgtaaattattctgtttcttagctgatccttaatcttgatgatattttcaaaacaaatgaataataaagacatgagaaaaggtttcctttaaaaagtcgtggttctcgccaggcgcagtggctcatgcctgtaatcccagcaccttaggaggccaaggcaggcggatcatgaggtcaagagatagagaccatcctggccaacatggtgaaaccctgtctctactaaaaatgcaagaattagctgggcatggtggcgcatgcctgtagttccagctactcgggaggctgaggcaggatttaaatactgtttgaacccaggaggcggaggttgcatgagccgagatcgcaccactgtactgcagcctgacaacagagtgagactctgtc

SEQ ID NO: 239928 - DNA, 2335 bp, Homo sapiens
tttctgctacagacaggccagggacttagacacaaatggcgagggatgaggagcttgatgacgtgtcaagggggattagatatcaagtgtgggggatgaaaagcaggattcttgctggaactgagcttgccacggttggacgtggaaggccaatgttgaggcctagtggagaagagggcttggaggagcctggctaaggtttggtcaaggagagtctgtcacaagatagacccatctgtatccaggctaacgcaatagggtgaccaaatgcaatgtgtaataatcacatcatggaaaacagggtattatgggcacttagtttagccataaggcttccgtgccaagtggcctgggagccagctggggccagcttctgccacaggcatccttcacccacccttctcacaaacaagcgattcttcaataaacaataaacagaatacacaaaaagcaaaccaaaacatctctagatttattaatagatgggtgaattaaaggagtcttttccaaataatgtgactaacagaagccaagggggatgaatgcccaaagctggggcttgccagaacctgctggtaccgagagctgattgctgaagtgtgaggaattttgtgagccagctgacagcacattggcagcttgggatctgccagggcgggattgtttacaccacaggatttagcaaacgttatgaatcaacccctccatcggccccaagcttccctgacacaccaaacagtagaaattcactgcctttttttttttttttttaactctgcttggtgttagctaactagtcatgaagaatagaggctgaagtgaccaaagagatctttctgcattttgacattcaaatatttggaaagattttccgcattcagcatttggattctagtcccattgccaggctcaagtaagctctgtgataacaacactcagctgttggaaactgctgtccgaagcatctctcagcagatagggaggcctaaaaggacacggcagagtggtgtctggtgggtcctctcctgacatttcttctctctctggtcaaatgctggatgcacacatatagtggctctgagacttcctatctgggtgagctcaggcagttctagggacctctctgagccctagtttcatgtcctgtacaacagtagtcattcctactgcacatggttcttgagaagattggaccagaacatgtagctctggctcctggcccagacctgatcaacactcagcaaatagtggacactgatgctgttaggagaacagagcatccatatgaagggcggttccctgagctggggagaccagtgacaactgtaagtctgggttcagagcatgagtcgggggacggagaaggcccctgggcatctggccctgggtggctgagccctgggaatcctgcttttcccagagatgtgcttgtgcccagtgtgctcatgttttaaatgccagcacctactccaggaaaatgatgggtatttcaatatctgctcacattatgcatatttaaatatgaatttaaatactgtttaattctcctagggatgtgttgtcatttaaaagaggttgtgattagcatgaaggactggggacaggagcaggagatggcagagcagctgtaggcactgatgtaatgcctccagctttatgaggacgggcccaaccaggcttcacccatttggggccctcaagcgggagcgtcagtggcagccctcgccatcgtccgtctgttgaatgtattgccacatggccacattatgccccaggagccatgtgttggaggacagtatccttaggcttctcagaaattccacatgggagcctcaaatggacatgcttttcttgaaaacaaaaatatttgtaaaaatgtaacaatgggagtcgtttaatctcaagtctcccctataagcaaaaatagataaaattatgaaatgtaagatgtaaattattctgtttcttagctgatccttaatcttgatgatattttcaaaacaaatgaataataaagacatgagaaaaggtttcctttaaaaagtcgtggttctcgccaggcgcagtggctcatgcctgtaatcccagcaccttaggaggccaaggcaggcggatcatgaggtcaagagatagagaccatcctggccaacatggtgaaaccctgtctctactaaaaatgcaagaattagctgggcatggtggcgcatgcctgtagttccagctactcgggaggctgaggcaggatttaaatactgtttgaacccaggaggcggaggttgcatgagccgagatcgcaccactgtactgcagcctgacaacagagtgagactctgtc

SEQ ID NO: 239929 - DNA, 407 bp, Homo sapiens
ccaatggaacaggacagagaactcagaaataaagccaaatatgtataaccaacctgatcttcaataaagcatacaaaaaagtaaattaggaaaggacaccctatttaataaatggtgctgggagaactggttagccacatgaagaagaatgaaactggattcctatctctcaccttatacaaaagtcaattcaagatggatcaaagacttaaatctaagactcaaaactggaactagaagataaccttggaaaacctcttctgacattggcctaggcaaagaattcatgactatggtggctcacgcctgtaatcccagcactttgggaggccgaggcgggcggatcacaaggtcaggagatcaagaccatcctgatctcagtgaaaccccgtctctactaaaataca

SEQ ID NO: 239930 - DNA, 406 bp, Homo sapiens
tatgacagttgtatttattttggtaataatatattacaagcaaatattatagaaactaacgacattgtgaataaaagagtgtcttatttctatgaagactaagttgaagtctttggaaaggttataataaaggtaataaaaataatcaaattatgtgtgggcaagatgactacaaaagattagagaaaatcttaaattttcaaaaggttatatactctgattattgtaagaatctttagatttccattgtatttaaataaaatactaaagcctaaggattactgcaaataagatgtcttaagacttcaaccagcagattcattctttaattaaaaaaagcctttgttatatataagtacattggcaaatgtatacatttttagataaaataaaaaaattaaaacct

SEQ ID NO: 239931 - DNA, 442 bp, Homo sapiens
gctcaactgggtgagtaagtcacaaaaatctgttcttttgttatttactaagtgttaggtaatctgaaatgacaggaatgggaaaataaaacattaaaaaatttgtgaagaaatatgagatttaaagaacatgagcaagaaaatgtggaaaattcatagagtgaggccaggcgcggtggctcatgcctgaaaccccagcactttgggaggccgaggtgggcagatcacaaggtcaagagatcgagaccatcctggccaacatggtgaaactccatctctactaaaaatacaaaaatcagctgggtatggtggcacacgcctgtagtcccagctactggggaggctgaggcagaaggattgtttgaacccgggaggcaaggttgcagtgagctgagatgacgccactgcactccagcctggcgacagagcaagactctgtctc

SEQ ID NO: 239932 - DNA, 383 bp, Homo sapiens
ttttatgaggttggtatttacctaatatcaaaaccagatatggaggcatttgaaggaaactttaggcaaatattcctcagaaacataaatgacaaaatttgaggccaggcacagtggctcacacctgtaatcccggcactttgggaggctgagtcgggcagatcacctgaggtcaggagttcgagaccagactggccaacatggtgaaaccccatctctactaaaaaaaaaaattggccaggtgtggtggaatgcgcccgtagtcccagctacctgggaggctgagacagaagaatctcttgaactcaggaggtggacattgcagtgagccgaggtcgcactgctgcactccagcctgggtgacagagcgagactacatctcc

SEQ ID NO: 239933 - DNA, 460 bp, Homo sapiens
ttcagctttctggcttcactgtgggatccagcatagaacatgattgagctgtcagagaacctcctgaaggaaagttgtacctgataagtaagagtttccagaaaaatggtgacacatacaggaagaaaaatagattgtttaactcagtctgaaaaatcccttttgattcataaactgtctacatgattgaaacatacgaaaccatctctttctctaagcagattcttctcaattcacatacaagcacctcaggggcaaataaaacttctctgtgtaggcatgaggaggaatcactttagcagaaggaaaataaggtgctgtagaaatgagaaagtgctgtagaaatgagaacacaaaatgctaacctggaggagagagggtggcagagtgagtgaaagagagggcatctgatgccgtttaaatcatttttaaggaaaactaaacatcctgattggaaaaa

SEQ ID NO: 239934 - DNA, 555 bp, Homo sapiens
ccatgggtcatgtgggaggtccatatgcaaggtatcccagtggttggtgaggcttcctgatggagtctgtggagtgctgagtaggtttcagagcctttcttccctgctcccagcctttcccaacgcttagctatgacagtcacctcaatattttaattggagcaagaaagaggtagggttcttaggcagcatcccacacagctaggggctgagcactctcactatgctatcaccttctcccatgggagaaattgtggactgaggggagtctctcttgccactaagctgtgccaacttcaaagagtgatgcagataaagtgaaaatcttcttcttccttttctttaatgcatttattctcagatatttctgctccaatggtgtgctggaacttccacataggacttctggattcctacaaaagaactaccatctgaaagtactggtaaaaatcaatgcttctgtggaagaatgatgatataaagctcctattctgccatcttgctaacatcactctctaaagttacttttaaaggaataaaatattttagtatcta

SEQ ID NO: 239935 - DNA, 390 bp, Homo sapiens
ggcacacagagtttacaggaaacagtccttaagtccttaggggtggcccgagcttctgttgcctccttctagattgattataggctcagaaatgggagagacttgggccgggcatggtggcttatgcctgtaatcccagcactttgggaggctgaggcaggtggatcacttgaggtcaggaatccgagaccagtctgatcaacatggtgaatccccatctctgctaaaagtactcaaattaactgggagtagtggcacgtgcctgtaatcccagctactcaggaggctgaggcgggagaattgcttgaaccagggaagcagagggtgcagtgagctgagatcacgccactgcactccagtctgggcgacagagtaagactcctccgtctc

SEQ ID NO: 239936 - DNA, 414 bp, Homo sapiens
cggccagtgaggagacagacgcatgaatcatacttccagtgaagaccgtccgtgcgagtgctgtgaggtacaggcttacaccaagggctcctcaactcattcttggaggggtgagcttcaaaaaagcttactggggccgggtgcagtggttcatgcctgtaatcccagcactttgggaggtggagacaggcagatcacaaggtcaggagtttgagaccagcctggccagcatggtaaaaccccgtctctactaaaaatacaaaattagctgggcatggtggcatgcatctgtaaccccagctacttgggaggctaggcaggagaattgcttgaaccctggaggcggaagttgcagtgagtggagatcgcgccactgcactccagcctgggagacagagcaagactctgtcttgg

SEQ ID NO: 239937 - DNA, 220 bp, Homo sapiens
gtacttaagactctgaggaaaatgggggaaggtgtacaagtaggaagggggtttggaagcacaccaggaaacagcaactgtccatttgagttgctgcattgctaggactagactaattctagtcggcttgcgatgcagacaacaggtggggcaactctgactgtctccaggacttcggatagactgttcagacctagtgggcctctcagaggtctgggtc

SEQ ID NO: 239938 - DNA, 947 bp, Homo sapiens
atttgaaaagattaatttacattatacttcttcaagaatagatttctcaggtttttataggttgcaaatattttgtaggataatgatttattgacctcatttttgttttcttaaacatcaataacttttgtcattttttataattattatccatttttcattgaatttcctgtttacacacaccatcaaatttcatattggactatatccctcatacttcacttaaagtttgtcagaaatttccagtatttttaccaaaaaaaatcgttattaaaagctggtgattaagaatcactgacattcaggtgtttggtattgtagttggaatttctgtgaaatgggccagagactcccatttgtaatacagaattatacagtaaatggttacatagctgaatgatcatatttctcaggtcaaggtttaggtaggacacattttgccctgaaatcacacagctaaattgatgtgctatttgtaactgggtgtgaggaattctcatcatccctttactatgtctcacagggagtgcttgcaccttagtgggagaggcttccaggcctttctccagaggagttatggtaactgtcttgagtagctttctcacattatattcaactcttggtgaagatgtgcttgctaaatttaaatattttcaaatgtaatgattggggtaaaactttttcttaagtgttccttacaaatgaagaaagaaaatattgactgtgcagaccacaaattgctgagtattttttaaaatatgatttttaatcttaagacctcaatgtcaacacgagagtcattgtagtactattccaggtaatacatggtatattcaggtattgcatgtgattgcagtaacttgtagccacatttaatgtaacttgtattcagtgttttgtctcactggcctgatgcccagagccttcttcatctacccagtgttaaa

SEQ ID NO: 239939 - DNA, 470 bp, Homo sapiens
actacaagagaaaatggctggggaagtgcttggctaactctgcctcccttggctaaacctggaagtgaaatccagggaactgaagttggagttggctgctggatttgggtaggaatagggaggttgtggccacagggcactgcatgtctaggtggtatttcttactctcggtaccaatttcaaaaccaaggggatgagtccaaattaaagaagatccctgattaggcacaaaactcaacttggctgtttggaagattctgcactccctttaaggttggccagggtctcttgcctccaggagtgcacagttctggaaacacaggcagaaccatttgacatgggttgggagacccaagtagctgcctggttaacagactgcttatcagtgtctctgggaagatctactttgacagtccagcccctgcagatcctcatgaattagaccgctccttaaaataacaaaccaacct

SEQ ID NO: 239940 - DNA, 1858 bp, Homo sapiens
  misc_feature (26)..(26): n is a, c, g, or t
  misc_feature (171)..(171): n is a, c, g, or t
  misc_feature (634)..(634): n is a, c, g, or t
  misc_feature (648)..(648): n is a, c, g, or t
  misc_feature (1059)..(1059): n is a, c, g, or t
aaaaaaaaaaaaaaaaggggaaaaanaaatgaataaagtgcttgggtagttctgatgagagagattatgtctaagaatacatcagggatggcttcatggaggaaaccatttttaatcttggccttaattaatagatacagagaaagaaagataaaaataaagaaaatagcntggcattccaggcagaatgaacaataaaggaaaacaatattgccttttgcaaaaatacactgtttttttttttgagggactctgtgttttcattgtttgtaatatcacgtctccgtgttaaagacctgtgtgtaattttcagtcattaattatgcacggatgatttctccctatgcagaatgctgtttgggcttaatcaggcaatcttttaaaagatgtagtctctagggatttgctatttaagaagtggaactagctacgttataattaaataattcctgctacagtaccatgtaaaaggtcattcatcattcaacatttatttattctacaaaatatttatcgagtgcccattatatatctggtactattctaggcaatagagatacacataagtcaatatttatccctcatggggcctaatattctttttttgttctttttttttattattatactttangttctagggtacangtgcataacatgcaggtttgttacatatgtatacatgtgccgtgttggtttgctgcacccgttaactcatcatttacattgggtatttctcctaatggtatccttcccccatccccccaccccacgacaggccccggtgtgtgatgttccctgccctgtgtccaagtgttctcattgttcaattcccacctatgagtgagaacacgcggtgttcagttttctgtccttgtgatagtttgctcagaatgatggtttccagcttcatccgtgtcactacaaaggacatgaactcatccttttttatggctgcatagtattccatggtatatatgtgctacgttttcttaatccagtctatcatcaatggacatttaggttggttccaagtctttgctattgtgaatagtgccncaataaacatacgtgtgcatgtgtctttatagtatcatgatttataatcctttgggtatatacccagtaatggggtggctgggtcaaatggtatttctagttctagatccctgaggaatcgccacactgtcttccacaatggttgaactagtttacagtcccaccaacagtgtaagtgttcctatttctccacatcctctccagcacctgttgtttcctgactttttaataattgccattctgactgatgtgagatggtatctcactgtggttttgatttgcatttctctgatggccagtgatgatgagcattttttcatgtgtctgttggctgcataaatgtcttcttttgagacgtgtctgttcatatcctttgcccacttttcgatggggttgtttgatttttttcttgtaaatttgtttaagttctttgtagattttggatattagccctttgtcagatgggtagattgcaaaaattttctcccattctgtaggttgcctgttcactctgatggtagtttcttttgctgtgcagaagctcttgagtttaattagatcccatttgtctattttggttttgttgccattgctaatattcttaaattatatttaatatcaaacattctaagaaatcactctgtaatgaatgtaaaaccactttgggtagagagtatgataccagtagttctatttaatcttccttttaaacaaatatatatttattttaaaacatgggtttttcatgattttttttttggttaaattttcagcaatgtgtttaatactccaggatacc

SEQ ID NO: 239941 - DNA, 2384 bp, Homo sapiens
agggcgggttccgggtccgagcgcgcccccgggctcgggtcgtcatgagcctggactgcaccagccatatcgcgctgggtgccgcttcgccagcgcccgaggaaacttacgatcatctttcggaagtcccggtcacgcgggagcagttaaaccactatcggaatgtggctcaaaatgctcgaagtgaacttgcagcaactttggtcaaatttgaatgtgctcagtctgagcttcaagacctccgatccaagatgctttctaaagaagtctcctgtcaagaactgaaagctgaaatggagagctacaaggaaaacaatgccagaaaatcatctctccttacctctttgagagacagagttcaggaactagaagaagaatcagcagcactttccacttctaaaatcagaacagaaatcacagctcacgctgcaatcaaggagaaccaggaattaaagaagaaagttgtagagttaaatgaaaaattacaaaagtgttcaaaagaaaatgaggagaataagaaacaagtttcaaagaattgcaggaaacatgaggaatttctgactcaactgcgtgactgcttggatccagatgagaggaatgacaaggcatcagatgaagatttaattttaaagcttagagacctgcgcaaagaaaatgaattcgtgaaaggacaaattgttattcttgaagagactataaatgtccatgagatggaagcaaaagctagcagagaaacgatcatgaggctggcttcagaagtcaacagagagcagaaaaaagctgcctcctgtactgaagagaaagagaagctgaaccaggacctgctcagtgctgtagaagcaaaagaagctcttgaaagggaagttaagatcttccaagaaaggctgcttgctggccagcaggtctgggatgcctcaaagcaggaagtgagcctcctgaagaaaagctcttctgagttggagaagagtttgaaggccagtcaggatgcagtcacaacctcacaaagccagtactcctcatttagggagaaaatcgcagccctccttaggggcagattgagcatgactgggtccactgaggacaccattttggagaagattcgagaaatggacagccgggaagaaagcagggaccggatggtctcccagcttgaagcccaaatatctgagcttgttgaacagttgggaaaggagtctgggtttcaccagaaagctctccagagggcccagaaagcagagaatatgttggagactcttcagggtcagctgacacacctggaggcagagctggtttctggaggtgttttgcgagacaacttgaattttgagaaacaaaaatatcttaaatttctggatcagctttctcagaaaatgaagttggaccagatggctgccgaacttggctttgacacgcggctggacgtggttttagctcgaacagagcagctggttcgtcttgagagcaatgcagtcattgagaacaagaccattgcccacaatttgcagagaaagctaaagacacagaaagagagactggagagcaaagaattacacatgagcctcctccggcagaaaatagcccagctggaggaggagaagcaggcacgcacggccttggtggttgagagggacaacgcgcatcttaccatcaggaacttgcagaagaaggtggagaggctgcagaaagagctgaacacgtgtcgagacttgcacaccgagctcaaagccaaactggccgacaccaatgaactgaagattaaaactttggaacagactaaagccattgaagatctaaacaaatccagagaccaactggagaagatgaaggagaaagctgagaaaaagctcatgtctgtcaagtcagaactggataccacagaacatgaggctaaggagaataaagaaagggccagaaacatgatagaagtggtaaccagtgaaatgaagacactaaaaaaatctctggaagaagcagaaaagagagaaaagcagctggcagacttcagggaggtggtgtcgcagatgctaggcttgaacgtgaccagccttgctcttcctgattatgaaatcatcaagtgtcttgaaagattggtccattcacatcagcatcactttgttacctgtgcctgcctcaaagatgtgactactgggcaagagaggcacccacaaggccatttacagcttcttcattgaacactgtatctcttgagagaggtggccataagacatggcacacaattcccaatttcacaaattcctcatgtctttgagatttgatcagtttgtgaatattttatgctttgatgatatagtgagaatgcatcacttgcaaaaacgatctcaaaagtgtcagccttagataaacgttcagcattaaaaaacgcc

SEQ ID NO: 239942 - DNA, 3048 bp, Homo sapiens
  misc_feature (2471)..(2471): n is a, c, g, or t
  misc_feature (2681)..(2681): n is a, c, g, or t
  misc_feature (2759)..(2759): n is a, c, g, or t
  misc_feature (2784)..(2784): n is a, c, g, or t
agggcgggttccgggtccgagcgcgcccccgggctcgggtcgtcatgagcctggactgcaccagccatatcgcgctgggtgccgcttcgccagcgcccgaggaaacttacgatcatctttcggaagtcccggtcacgcgggagcagttaaaccactatcggaatgtggctcaaaatgctcgaagtgaacttgcagcaactttggtcaaatttgaatgtgctcagtctgagcttcaagacctccgatccaagatgctttctaaagaagtctcctgtcaagaactgaaagctgaaatggagagctacaaggaaaacaatgccagaaaatcatctctccttacctctttgagagacagagttcaggaactagaagaagaatcagcagcactttccacttctaaaatcagaacagaaatcacagctcacgctgcaatcaaggagaaccaggaattaaagaagaaagttgtagagttaaatgaaaaattacaaaagtgttcaaaagaaaatgaggagaataagaaacaagtttcaaagaattgcaggaaacatgaggaatttctgactcaactgcgtgactgcttggatccagatgagaggaatgacaaggcatcagatgaagatttaattttaaagcttagagacctgcgcaaagaaaatgaattcgtgaaaggacaaattgttattcttgaagagactataaatgtccatgagatggaagcaaaagctagcagagaaacgatcatgaggctggcttcagaagtcaacagagagcagaaaaaagctgcctcctgtactgaagagaaagagaagctgaaccaggacctgctcagtgctgtagaagcaaaagaagctcttgaaagggaagttaagatcttccaagaaaggctgcttgctggccagcaggtctgggatgcctcaaagcaggaagtgagcctcctgaagaaaagctcttctgagttggagaagagtttgaaggccagtcaggatgcagtcacaacctcacaaagccagtactcctcatttagggagaaaatcgcagccctccttaggggcagattgagcatgactgggtccactgaggacaccattttggagaagattcgagaaatggacagccgggaagaaagcagggaccggatggtctcccagcttgaagcccaaatatctgagcttgttgaacagttgggaaaggagtctgggtttcaccagaaagctctccagagggcccagaaagcagagaatatgttggagactcttcagggtcagctgacacacctggaggcagagctggtttctggaggtgttttgcgagacaacttgaattttgagaaacaaaaatatcttaaatttctggatcagctttctcagaaaatgaagttggaccagatggctgccgaacttggctttgacacgcggctggacgtggttttagctcgaacagagcagctggttcgtcttgagagcaatgcagtcattgagaacaagaccattgcccacaatttgcagagaaagctaaagacacagaaagagagactggagagcaaagaattacacatgagcctcctccggcagaaaatagcccagctggaggaggagaagcaggcacgcacggccttggtggttgagagggacaacgcgcatcttaccatcaggaacttgcagaagaaggtggagaggctgcagaaagagctgaacacgtgtcgagacttgcacaccgagctcaaagccaaactggccgacaccaatgaactgaagattaaaactttggaacagactaaagccattgaagatctaaacaaatccagagaccaactggagaagatgaaggagaaagctgagaaaaagctcatgtctgtcaagtcagaactggataccacagaacatgaggctaaggagaataaagaaagggccagaaacatgatagaagtggtaaccagtgaaatgaagacactaaaaaaatctctggaagaagcagaaaagagagaaaagcagctggcagacttcagggaggtggtgtcgcagatgctaggcttgaacgtgaccagccttgctcttcctgattatgaaatcatcaagtgtcttgaaagattggtccattcacatcagcatcactttgttacctgtgcctgcctcaaagatgtgactactgggcaagagaggcacccacaaggccatttacagcttcttcattgaacactgtatctcttgagagaggtggccataagacatggcacacaattcccaatttcacaaattcctcatgtctttgagatttgatcagtttgtgaatattttatgctttgatgatatagtgagaatgcatcacttgcaaaaacgatctcaaaagtgtcagccttagataaacgttcagcattaaaaaacgcctattatttcatttactagcattttaggatccagaagaattccaccagattgcatgagttagattgggaaatgggagtgggagataanattgggaggtatctattttaagtcaggggctttactagccgatttagttctcacaataaccatgtggagaagctgtgacatttttaatttacaacctttctggggctcagacataaagttacctatccaaggttgcagttgggtagtggtgggaccaggatggacaactcattggccctgcctcaaaagccatacctcttctcctgctangcagaatctgtttctcctgaatctctgtgatgctggtgggaattgtttgcatagaggaaggacaataaccctgccatngtgagttaatgtccgggctggtcanagtggttcatgcctgtaatcccagcactttgggagtccaaggcaggcatatcatttgaggtcaggagtttaagaccagcctggctaacatagtgagaccctgtttctactaaaaatacaaaaataagccaggtgtggtggtgcatgactgtaatcccaactactcagcaggagaagcacttgaacccaggagacggaggcggcagtgagccaagattgtgccactgcactccagcctgggcgacagagtgaaactacatctcag

SEQ ID NO: 239943 - DNA, 491 bp, Homo sapiens
  misc_feature (488)..(488): n is a, c, g, or t
gcctattagagaagaaagattggaaaaaataacatttgtttttcctcttcatcagttttcaaccttggcctttaaattatgatttaagagtccctcctctcgagagatgagtagtttcctctgtggagtaatcaagcatcagaggagcctgagcgtaatgttaatgttctgagtgcttctgaagtgacaggaagtggtgcatatgcccagggacaaagccaagttgaggagcagaaccacagcactttgggaggccaaggtgggcggatcacgagatcaggagatcaagaccatcctggctaacatggtgaaacctcatctctactaaaaatacaaaaattagctgggtgtggtggcacgcacctgtaatcccagctactcgggaggctgaggcaggagaatcgcttgaacccgggaggcggagcttgcagtgagccgagatcaagccactacactccagcctgggcgacagagcaagactccatctncag

SEQ ID NO: 239944 - DNA, 534 bp, Homo sapiens
cagtatatacctgagaagagtgatttctgtgatcaaagagttcaattcagatttattcagaaagagctactcagaagctctatagttcatgagctacttgatattttctagagatcattttatgttaagctattatacattgttgatgatgtcatagaagtaggaaagaagcctttataatacagttttatgaaagaaatgggagccttttttcccatttatgatattaaaaacaacacaggtatttggtgtttagtctcaaaaatttgtttggtcaccttagtgattcttaggtacaaagtcttcatcactcaattttaacaaagaaaatagggcttataaagttatacttttgaagcatgagttatgagctaattttaagatgtatagttttggtagagtacttttgtctcagtaaaatgaaagatttgggtaactccccaaatgccctgtaaaacaaatgggtttgtggaaggttgtggtgtcagcaaaatatatgatagaataaagagttttgtacctaaaaaaaattca

SEQ ID NO: 239945 - DNA, 284 bp, Homo sapiens
ggtggtgggcacctgtagtcccagctactgaggaagctgaggcaggagaatggcgtgaacccgggaggcggagcttgcagtgagcctagatcgcgccactgcactccagcctgggccacagagtgagactccttcggggggggggggggggggggggaatccaaaaatcagccggacatggtgccatgctcctatagttccagtcacccaggaggcggaggttgcagtgagctgagatcacgccattgcacttcagcttggtcaacaaagtgagactctctttc

SEQ ID NO: 239946 - DNA, 618 bp, Homo sapiens
tggcgcgatctcggctcactgcaaatctccgcctcctggattcaagagattcttgtgcctcagttctggcagaaggtggtgtttttacaagatgatttctaggattacaggcatgcaccaccatgcctggttaatttttgtatttttagtagagacgaggtttcgccattttagccaggctggtctcgaactcttgacctcaggttatctacccgcctcagcctccctaagtgctgagattacaggcctgagccactgcgccaggcctggttttttggtttcaaaccacaatagacattgctggagaatcaagctcatagtttctttttactctgcatgatatccctccaaaagcttgtctattctcatgacttcatgacagttctttgccaatgatttgcaaacattatctccagtcttgattctttcctaggctttatttctaaatactcactagtcatttccacttagaagctttgtcttcttttcaaactcagcatatccaaaactgacctcatcttgttgccctaactagaacatgccacaacccatttctgcctataatgtcattattctcttaaggcccccatatttgcaaatcaggagtcatctttgcct

SEQ ID NO: 239947 - DNA, 247 bp, Homo sapiens
gcagaatgcattaaaatattacccaatagagctcatactaacctatgaaacgtctcaaaaaatcaacatagtttaaagttatacaaaagacagtgtctatctacagtggaatttacaaaactatcaatacagagagtcatctggaaaaatctccatatattgggacatcaatgaacatgtatctaaatggtccagaggagaaatcacaagatactttagaaaatatgttcaactgatagaaaatgaa

SEQ ID NO: 239948 - DNA, 643 bp, Homo sapiens
acttgtgtaaggctcccgtggggtcattggcttaagttagagctggctgatgaagagggcgagcacctcaaagtgtgagtatttctccagatcccttcactgtagcaggtgggcagcctcgcccactatacttctgcccctttcaaagcaggtgggcagagaggtgtttgtggtaagaaagacctagaggcttttgttcgctgattcttcttccttcatcagccatcaccagaccttagatgtgaatcccccattcttgctcttggtcttacctctgcagatcagttatggccgtgggggggagttcccaaatgtcaggtgagtatgggttggctgtacagtcctggggaatgtttaaaaagaccggctgggcgcagtggctcatgcctgtaatcccagcactttgggaggccgaggcgggcggatcacgaggtcaggagttcgagaccatcctggctaacacggtgaaaccccatctctacttaaaaaaaaaaaaaaaaaaaaaaatcgttagctgtgcacatgcctgtagtcccagctactcgggaggctgaggcaggagaatcgcttgaacccgggaggcggaggttgcagtgaaccaagattgcgcctaggcgacagagactccgtctcaaaaaaaaaa

SEQ ID NO: 239949 - DNA, 445 bp, Homo sapiens
ttctccctaccactgtagtccatattggaccctgtggtcagagtgatcctgatataaaacatacctgattatgtgtctcccttggttagaagcgtctctttacttgttgttgccttcagaaggcaagttcaaatttcttagtatggtgtatgatgtcctttacaatctcagtgtgtcacagcacccccacaatccctgccaacccttggccccctgcgttttctccttggccctttccccttcccttaaagaccaagctaagaggtctcattctttttttttttttttttttaagatggagcctcggcctcccaaagtgctgggattataggtgtgagccactgcacctggccaaaggtcccattctttctgaagccttcacaattgtcccagggaaagctgtttcctctacccttctgaattacaacgagtcatgctttgtttt

SEQ ID NO: 239950 - DNA, 358 bp, Homo sapiens
ggggtggattcttgctctgtcgcccaggctagagtgcagtggcttaatctctgctcactgcaactttcccctcccaggctcaagtgattctcctgccttagccttcagaatagctgggaatacaagcgtgtgccaccatgtctggctaatttttgtatttttagtagagacggggtttcaccatgttggccaggctggtctcgaactcctggagcctcggcctcccaaagtgctgggattataggtgtgagccactgcacctggccaaaggtcccattctttctgaagccttcacaattgtcccagggaaagctgtttcctctacccttctgaattacaacgagtcatgctttgtttt

SEQ ID NO: 239951 - DNA, 427 bp, Homo sapiens
taattcagaggtttagaagattcatgtcactaaaaatgtccgttagggtaatatttcattgagaataccactacaaagcatatatgaggatttactatttctcaattatacttttaaaatatatatttctttatacttacaaatttataaaaaccacccaaaatagtccatttgtttcatcttgttggaaaatgtagttgtcaaaatggcctatttacagtgaatcaatggtgctctaaatgtgctgggaaatggatattgtatggatagagtaacaacccaagtaggaagtaggaacactgtctaataaatgtttacacaccatcaagtctacaaacattaaatatcatacatgatagaatctttctcatcctgtaatttatctcaatttttccattactttctttcattttctcttctagcttta

SEQ ID NO: 239952 - DNA, 447 bp, Homo sapiens
taatcccctcttctgtggggtgtgaagtcccctgagctgctgtatgtcctctttgcatttgctcttacacaaggaagcctcagaagaaacacagccttctctctgtatcttcaatggaaagtaattttgtcataaaaataactgactctggaatctttgctattacgaaaatatttgtcatgtgtggtgaaaaggtacagtaggtatcagtgtagtacaattactggcttccgtgagtctaatgtgatttaggagtctgcaggggttagcttcagggtatattgtaatttcaagactaggttctttgtacttttactagtattagaataaacttagtatgaaagtggtgtctaatagttaaaataatatttcagaaagactattactgcctatcgtgtgaaaagtagagtgtaaattttcacttttaaactttaaatctccagcatt

SEQ ID NO: 239953 - DNA, 1304 bp, Homo sapiens
actgcaacctccgcttcctgggttcaagcagttctcctacctcagcctctggagtagctaggattacaggtgcccgccaccatgcccggctaatttttgtatttttggtagagacggggtttcaccatgttggccaggctggtcccaaactcctcatctcaggtgatctgcctgcctcggccttccaaagtgctggaattacaggtgtgagccaccacacccggccactttttcttcttttctttcaataaggtctcactctgtcacccaggcagaaatgcagtgactcaatcacagctcactgcaacctccacctcctgggctcaagcaattctcccactcagcctcctgagtagctggttctacaggctcacaccaccatgcccggctaattttttggatttttggtagagatggggtctcaccatattgccctggctggtctcaaactcctggggtcaagtgatccactcacctcggcctctcagagtgctgggattacaggcgtgagccaccgtacccggcctccagtactttctatatatgtgtgtccagcattgttttaagtgcttcacgtgcgctacatcagtgaaccctatgataaccatacaaggtaggttctattattgtctccattttgcagatgagaaaagtgagacacagaaaagtagctcaaataaagtcaccacgcccggccctcttccaggtttcaagttttatttttttggcacctccctaacctgtttctttttctatttctgtcgcccaggctggagtgcagtggtcgaggctcactgtagccttgacctcccaggctcaagccatactcccgcctcagccttcagaatagctgggaccacaggtgcacgccaccacacccagctaattttttgttttcaaattgtttcgtagagatgggggtctcgccatgttgcccaggtgggtctcaaactcatgggatcaagggatcctccaacctcggcctcccaaagtgctgtgattacaggcatgagccaccacgccggatgccataaccagcatcattgtcagccttctgtcacaccagcgccaccctggtagcccctggctctagtctgggtttcagttctgcagggctgctgcctcaacattttaggttctgatagctgtattctcagtcctggagtgacaggtgtagcctgcagttactatttttatacggtgcagttactatttctgcgctgtttcttctcattcctttcacggtttcctgagacctgtttaatttatctgagacccgtgtattaattcatctctgttgaagt

SEQ ID NO: 239954 - DNA, 371 bp, Homo sapiens
aattatcaagaactggccaatctcaagttatctttgccctactggattactttaagatagatctcagacatcacgtcactcacttataaatacttcaatttgataagcaagaatatctccaatcactacagacacttaggatgagttacttcaataacatagtctacgtctctaaaagttcatgtgaatttagaagaaaagtgcttaatttgcataacacggtacatcatattatcaaatacaaatataatagtcaagatcaaaaggtttaacatttctagatagtggttataatgctctgccttttaataaagatattggctactttttttattttaagagtaatgtaggctcatcaccaaaaaaaaaaa

SEQ ID NO: 239955 - DNA, 1066 bp, Homo sapiens
gcgcccagatcgtcgcctatcctgcttgcgcagccgctatcgcgtctgcccaccgacgaagcatgggtgtccagggcttccaagagttcctggagaagcgctgtcccggggccgtggtgcccgtggacctcctaaaactcgcgcgcacggtctcgcgccagcagcagcagcagcacttgcaccgccagctgccgccgactgcagccctagcgcccggggctccacgcgccgccaggggctccgtgcctctgcaaccgccgcttccgcccgctgccttgggtgcctactccgggggcgcggggccgactcggcaccatcaccccgctcaccacttccaccatcatggccaagcgcagcccgggctgcaccctccgctgccgccgccgccgccccctcagctgcccggggcccgggtgctggtggacgccggctcggcgctgccgcggctctatggcggctaccagacggattgggtgtgtggcggccaatggaacgccatgctgggctacttgtcagcgctgtgccaggcttgtgcctatcctggcggcgacggcctggagctcgtggtcatgttcccggggggcctgggcaaggaccggctggccgagtggggccgtcggtgccaggccgagcggcagacagcgcaactgatcgtgggacacgtgggcaacaagggcacccctccaccgcgggcctggttcctgccaccggcctgcctgagccactgcgtgaggctagcactcatccgcttccgggtcaagcaagctgccatgttgtgagctgccctatggagaggcccacaggaaaagaaactgagggaagcctccaaccaacactcagtgaggaactgaggccctcagtccaactacagcctgcaaggaactgaattgctgccaacagccacgtacgtgagtgagcttggaagcggatccttccccaggcaagccttgagatgactgcagccctggctggcaccttgattgaagcctgtaggagaccttgagccagaggacccagctaagccatgcctacagatactatgagataataaatgttgttttaagcc

SEQ ID NO: 239956 - DNA, 1120 bp, Homo sapiens
gcgcccagatcgtcgcctatcctgcttgcgcagccgctatcgcgtctgcccaccgacgaagcatgggtgtccagggcttccaagagttcctggagaagcgctgtcccggggccgtggtgcccgtggacctcctaaaactcgcgcgcacggtctcgcgccagcagcagcagcagcacttgcaccgccagctgccgccgactgcagccctagcgcccggggctccacgcgccgccaggggctccgtgcctctgcaaccgccgcttccgcccgctgccttgggtgcctactccgggggcgcggggccgactcggcaccatcaccccgctcaccacttccaccatcatggccaagcgcagcccgggctgcaccctccgctgccgccgccgccgccccctcagctgcccggggcccgggtgctggtggacgccggctcggcgctgccgcggctctatggcggctaccagacggattgggtgtgtggcggccaatggaacgccatgctgggctacttgtcagcgctgtgccaggcttgtgcctatcctggcggcgacggcctggagctcgtggtcatgttcccggggggcctgggcaaggaccggctggccgagtggggccgtcggtgccaggccgagcggcagacagcgcaactgatcgtgggacacgtgggcaacaagggcacccctccaccgcgggcctggttcctgccaccggcctgcctgagccactgcgtgaggctagcactcatccgcttccgggtcaagcctttctcagtgttcagagtatgaaagaagagctacaatggagattcagaattactgtgccatggtactgaaaatgaagcatgatgtcattgaaatgccgaattctacaaatacctcggaagtagttaccgaaatataaaaaacactatgccaaacttctgtgtttggaaatgcctacatttctaaacagctgttttccattatgaaataggatcaaattagtcacttgaagtgaaagcattcaaggctcaattctgtactgcatgttgtaacaaaaatataagacctaacattgacctcttggcacataaatgtgtcaggccaccagttccaagtcaaaggagaataaacaaacaaaa

SEQ ID NO: 239957 - DNA, 1117 bp, Homo sapiens
gcgcccagatcgtcgcctatcctgcttgcgcagccgctatcgcgtctgcccaccgacgaagcatgggtgtccagggcttccaagagttcctggagaagcgctgtcccggggccgtggtgcccgtggacctcctaaaactcgcgcgcacggtctcgcgccagcagcagcagcagcacttgcaccgccagctgccgccgactgcagccctagcgcccggggctccacgcgccgccaggggctccgtgcctctgcaaccgccgcttccgcccgctgccttgggtgcctactccgggggcgcggggccgactcggcaccatcaccccgctcaccacttccaccatcatggccaagcgcagcccgggctgcaccctccgctgccgccgccgccgccccctcagctgcccggggcccgggtgctggtggacgccggctcggcgctgccgcggctctatggcggctaccagacggattgggtgtgtggcggccaatggaacgccatgctgggctacttgtcagcgctgtgccaggcttgtgcctatcctggcggcgacggcctggagctcgtggtcatgttcccggggggcctgggcaaggaccggctggccgagtggggccgtcggtgccaggccgagcggcagacagcgcaactgatcgtgggacacgtgggcaacaagggcacccctccaccgcgggcctggttcctgccaccggcctgcctgagccactgcgtgaggctagcactcatccgcttccgggtcaagcaagctgccatgttgtgagctgccctatggagaggcccacaggaaaagaaactgagggaagcctccaaccaacactcagtgaggaactgaggccctcagtccaactacagcctgcaaggaactgaattgctgccaacagccacgtacgtgagtgagcttggaagcggatccttccccaggcaagccttgagatgactgcagccctggctggcaccttgattgaagcctgtaggagaccttgagccagaggacccagctaagccatgcctacagatactatgagataataaatgttgttttaagccactaagtttgggggctactttgttacacagaaatagataactgaaacacca

SEQ ID NO: 239958 - DNA, 433 bp, Homo sapiens
aaaactgtgacttccatcttgtttgcactctctctctctttctctctggctcttcttgcttgatcactctgatgaagcaagctgccatgttgtgagctgccctatggagaggcccacaggaaaagaaactgagggaagcctccaaccaacactcagtgaggaactgaggccctcagtccaactacagcctgcaaggaactgaattgctgccaacagccacgtacgtgagtgagcttggaagcggatccttccccaggcaagccttgagatgactgcagccctggctggcaccttgattgaagcctgtaggagaccttgagccagaggacccagctaagccatgcctacagatactatgagataataaatgttgttttaagccactaagtttgggggctactttgttacacagaaatagataactgaaacacca

SEQ ID NO: 239959 - DNA, 1028 bp, Homo sapiens
agtcttgagatttttaataacaattgttcaaaattagtaagtatggctacagattgtgcttctgcaatagtgttaagaactgttggacccaagaaacaatttgaagcagaaacactttccagggacctaaacttaaagctatttctgctaaaagcttcaaaatgaatcagtcagatcagaaactagtaattaacattgtggtttgcaccacaattgaatactttgcttggtgaattattaggtgcatgttatggaaatctgccctatgacatggaggttgattggcttagttgaacatgatactcaagatgctgaaaaaaatgatttggcatccaaagggcattcaccacacccgcagagattgaaataaaatatttggcttgtttggttgattttacaactcatctagacactatgaataaaaacagcattgttcagaaataccttcacaaatgtatggttgtacttgcttgttcctagcaaaattatgcctttgggaaactcatttggcaagagataaactggctgactttcctttgctgaaattggtttccaagaattgaaagtgatggcctgaattacattcccacagttgtggagttgtctgttgaattccagaaaaggttctctgacatatttgatgaaaatgaactaatattgttcaattagcctttctcagtgttcagagtatgaaagaagagctacaatggagattcagaattactgtgccatggtactgaaaatgaagcatgatgtcattgaaatgccgaattctacaaatacctcggaagtagttaccgaaatataaaaaacactatgccaaacttctgtgtttggaaatgcctacatttctaaacagctgttttccattatgaaataggatcaaattagtcacttgaagtgaaagcattcaaggctcaattctgtactgcatgttgtaacaaaaatataagacctaacattgacctcttggcacataaatgtgtcaggccaccagttccaagtcaaaggagaataaacaaacaaaa

SEQ ID NO: 239960 - DNA, 4409 bp, Homo sapiens
gcagatgatcccttctaattctacacgacttcctgtagcttaccaaggaaatcagggacttaaccagtctttttcagagcaacaggttgattggacacaacagtgtatatctaagggactgacttacccagattacagaccacctccaaagctataccgttactcaccacaaagctttttaccagattctaccattcaaaaacaaaactttataccacatacatcattgcaagttaaaaatagtcagcttccaaattctgtattaactttaccatcaaggcagacctcagctgtaccatcacagcagtatgccacgcaaactgacaaaagacctcctcctcctccttacaactgtagatatggaagccagcctttgcaaagtactcagcatattactaaacacttgtctatggaagttcctcagagtcaagaaatgctgtcatctgaaataaggaccagctttcaacagcagtggcaaaaccctaatgaaaatgtcagcacaattggaaatttcactaacttgaaagtaaataccaacagcaaacagccttttaacggtcccattagatcttctgtggatggtgttcagactcttgctcaaactaatgaagagaaaataatggattcttgcaatccaacttcaaatcaagtactggacacaagtgttgcaaaagaaaagctagtaagggatattaaaacattagtagagataaaacagaagttttcagaacttgcaaggaaaattaaaatcaataaagatcttttgatggcagcaggttgtattaaaatgactaatacttcttatagtgaaccagctcagaattctaaattgtctctaaaacaaactgccaaaatccagtctggaccccagataactccagtaatgccagagaatgcagagagacaaacaccaacagtagtggaatctgcagaaacaaataagactcaatgtatgttgaattctgacattcaggaagtcaattgcagaaggtttaaccaagttgattctgttttaccaaatcctgtctattctgaaaagcggccaatgccagacccatctcatgatgtgaaagttctcacttcaaagacatcagctgttgagatgacccaggcagtattgaatactcagctttcatcagaaaatgttaccaaagttgagcaaaattcaccagcagtttgtgaaacaatttctgttcccaagtccatgtccactgaggaatataaatcaaaaattcaaaatgaaaatatgctacttctcgctttgctttcacaggcacgtaagactcagaagacagtattaaaagatgctaatcaaactattcaggattctaaaccagacagttgtgaaatgaatccaaatacccaaatgactggtaaccaactgaatttgaagaacatggaaactccaagtacttctaatgtaagtggcagggttttggacaactccttttgcagtggacaagaatcctcaacaaaaggaatgcctgctaaaagtgacagtagctgttccatggaagtgctagcaacctgtctttccctgtggaaaaagcaaccttcagatactgcaaaagaaaaggagtgtgataaactcagaacaaacacaacagcagttggaatttcaaagcctgctaacatccacgttaagagtccttgttcagttgtgggaaattcaaattctcagaataaaataagtaatccctcacagcagacagctttgtcgatggtaatgcacaattatgagtcttcaggtataaatataacaaagggaacagaacttcagatagctgtagtgtcaccgttagttctgtcagaggtcaaaacattgtctgtcaaaggaataacacctgcagtgttacctgaaacagtgtatcccgttattaaagaaggcagtgtttgtagtttacaaaatcaattggcagaaaatgcaaaggcaactgctgctttgaaagttgatgttagtggaccagtagcaagtacagcaacatcaaccaagatttttccactaactcagaaggaaaagcagaatgagtcaactaatggtaattcagaagtcacacctaatgtcaatcaaggaaagcataacaaattagagtcagctatccattctcctatgaacgatcagcaaatctcacaggagtcaaggaatagtactgttgtgagtagtgatacattacagattgacaatatttgttctctggttgaaggtgatacctcttacaattcccaaatagcaaagatattcagctctcttcccttgaaaatggttgagccacagaaaccttctctacccaatcagcaagggattggcagcagagaaccagaaaaacaattagataataccactgaaaataaagactttggttttcaaaaagataaacctgtacagtgcacagatgtttcacataaaatatgtgatcagtcaaagtcagagccacccttagagtcatcttttaacaatcttgaaacaaacagagttattctagagaaaagtagtttggagcatgccactgaaaaaagcacagctaacgatacgtgctcgtcagctgctattcaggaggatatttaccctcaggaaatagatgcatccagcaactatactccccaagatcctgcaagaaatgaaatccacagtgataaggcacctgtcttatacctacatgaccagctgtcagaacttctaaaagagtttccttatggcattgaggctgtgaatacacgtgaaggttctgtgggccagcaaactacataccagacctcagaagatcaaactgctgataaaaccagttctgactccaaagacccagcagatcaaatacaaattacaatattaagctcagagcaaatgaaagaaatatttcctgaacaggatgatcaaccctatgtagtagacaagttggcagaacctcagaaagaagagcccatcacagaagtagttagccagtgtgacctgcaggcacctgcagctggacaaagtcgtgattctgtgatactggactctgagaaagatgatatccactgctgtgcattgggctggctctccatggtttacgaaggagtaccccagtgtcagtgtaattccatcaagaactcatcttcagaggaagagaaacaaaaagagcagtgttctcctttggataccaacagttgtaaacaaggagagagaacttctgatagagatgtcactgttgttcaatttaagagccttgtaaataatccaaagactcctccagatgggaaaagtcattttcctgaactacaagacgacagtagaaaagatacacccaaaacaaaacataaaagcttaccaaggacagaacaagaattagttgctggtcagttttcatctaaatgtgataaactaaatcccttgcaaaatcacaaaagaaaaaaattgaggtttcacgaggtaacctttcactccagtaataaaatgacagcatcttatgaacaagcttctcaggaaacccgacagaagaaacatgtaacacagaactcacgtccactaaaaacaaaaacagcttttttgccaaataaagatgtgtataagaagcatagttctttgggacagtcattatcaccagaaaagataaaattgaaactcaaatcagttagcttcaaacaaaaacgaaagttagaccaagggaacgtattagatatggaagtaaagaaaaagaaacatgatactcaagatgctgaaaaaaatgatttggcatccaaagggcattcaccacacccgcagagattgaaataaaatatttggcttgtttggttgattttacaactcatctagacactatgaataaaaacagcattgttcagaaataccttcacaaatgtatggttgtacttgcttgttcctagcaaaattatgcctttgggaaactcatttggcaagagataaactggctgactttcctttgctgaaattggtttccaagaattgaaagtgatggcctgaattacattcccacagttgtggagttgtctgttgaattccagaaaaggttctctgacatatttgatgaaaatgaactaatattgttcaattagcctttctcagtgttcagagtatgaaagaagagctacaatggagattcagaattactgtgccatggtactgaaaatgaagcatgatgtcattgaaatgccgaattctacaaatacctcggaagtagttaccgaaatataaaaaacactatgccaaacttctgtgtttggaaatgcctacatttctaaacagctgttttccattatgaaataggatcaaattagtcacttgaagtgaaagcattcaaggctcaattctgtactgcatgttgtaacaaaaatataagacctaacattgacctcttggcacataaatgtgtcaggccaccagttccaagtcaaaggagaataaacaaacaaaa

SEQ ID NO: 239961 - DNA, 240 bp, Homo sapiens
agctccctctgttgctctgtaacagcattttattcatgatttgtgatgtgataaggaaatttttgctaatgtgtcaaaacaaattcaattttcctttaaggcaatttataactttatttaaatggaatataaaggaagaaccccctatatgtaaaattctgaccttcaaatttatgttaatatttttaaattattaaaacattaaaaatgcatctatttctcaccactaagagggaaaaa

SEQ ID NO: 239962 - DNA, 425 bp, Homo sapiens
gtgctgcatcatcccatggcaggagacagaagcgcaagagagcaggagagccagggcaagagaaagagggctaacctcatccttttatcaggagcccactactgcaacaacagcattcaactgttcatgagggcagagctcccatgacccaatcacatcttaaagtttccacctctcaacaacgttgcattggggattaagtttccaatacataaactttggggtacacattcaaaccacagcagtcctcaataaggaatgttgactgttttcgttgggcagggaataaggaatttgcttctgggctgaccaatattttgtatctcttttttgttaacttgaaacttagactggtcattgggactaaaagtgttctacctttttagtctattaaaaaagatgaaaattcatctctgtgaccacag

SEQ ID NO: 239963 - DNA, 673 bp, Homo sapiens
gttgggactacaggagtgcaccactacacccatctaatttttgtatttttagtagagatggggtttcaccatgttggccaggatagtctcgacctcctgacctcaagtgatctgcccgcctttgtgattagcactttggcctcccaaagtaagccaccatgccaggactgatagagatatttaattcaatttttttcaggcaaatgtgatagctggccaattttttttttcgttttttaaaatcttttgttttttagaaacctcacctggaaaatttccaaaaacctagaatgccatttttattaccatttcagaaaagtaaatactttcttcattgtctaattcataccaagtggcagcagttgatgctctcatttcttttcttgtctaaaattagcttataattgtacccgagtgttgttgttggcaagtggtccaatttctttctccaggaacacttgaccatgcagaggtctgcaaccatgaagacatataatatggttctatcatgttgctttgaaagtttgatgctgggtgcatggtctcatgcctgtactcccaacacttagggaggccaaggcaggagaatggcttgagcttaggagttttaagaccagcctgggaaatataggaaatatagtgagaccttgtctctacaacaaatgcaaaaatt

SEQ ID NO: 239964 - DNA, 189 bp, Homo sapiens
cctgggaggcatttattgccttactagggaatgttaattgaagccacccctatgctaatgggttttgtttgtttgtttgtttgtttgtttttgaaagagtctccctctgtcgcccaggctggagcttgcagtgagccgagattgcgccactgcactccagcctgggggacacagcaagactctgtctca

SEQ ID NO: 239965 - DNA, 181 bp, Homo sapiens
ttttttgcaggtcctcaagaccaggcatcaaagagagttgacagcaaaatggcccggagtccctctgcatgaatggcggctctcccagtctccagctgccggcgccctggtggccgggccacacacacacacacacacacacacacacacacacacacacacacaccccttcttgtacttc

SEQ ID NO: 239966 - DNA, 396 bp, Homo sapiens
cagaatcccctgaaagtttattctctgtcttctagatcatttttacaataatgtttttacaataactgaccaggtagccttcaggacctgaagcccatctcatacttgccctcctgtcaaagatgactttgtcctgagctgagtggttttgagagaggaaaggctgttctggataaaaattttccaactactttttgccaggcacaatgctgtacactgcacatgtattactcacctaatccttgtcacaacccctaccagtggggcaccagagccaggcccatgctgtggatcagaagcgaccataaacaagaaaatccaatctgtcttctggctttcttgaggcaagatgcggggaagagggcattgcagaaatagaggggaatgattaaagaa

SEQ ID NO: 239967 - DNA, 2146 bp, Homo sapiens
  misc_feature (1191)..(1191): n is a, c, g, or t
ttatttttcactgtataatgttgctacccaatattttcatgaatccttaaccaggcaacactttaaaaacttttcaagtctttgataataccattttcttatataaacctttttggtattaacaagattcagagaaggacagggatagataaacccaacagcagcaagctaaagaaatattaccttttgtagaacttgctagtttctatggggatggcaactcaactaataattgctgagaatttattttgtatcatctagcagataattatagtcatcttcaaaaaggaaggtcaacaatatactttaagcatgaatacagtctcatgcttcatactcagccttttccatttcttgatttctaccacttcattgaacaacatttaattattggggcgtcttttagcaaagtgtgtaatttgcttgtgctatctgactttaaccattgctctggactatggggttatactgagctgaatactatcttctttctaaatcttctttcttcctatattttgcaactcactattgacaccatcacacacacaccagcctttcctggagaaacccagagatcatccttgagtcttctcaccgtgtcacacagtggctagctgttcagatttggagtctgccagggtctaccatatttgttacatgaccttgggcaattttcttaacctcacagtgcctctgtttcctcatttgtttagacgtaatactactcctcacctagggtattgcaagggttaaatgtgattatgcaggaaagccctatgatcattaattagtagttattattgttacttctctgccttcacatctaattagttaccaactcctgctggttttaccttccaaatagttcttgactctgcctctccttttcatccttccctcttctgccccactttaggcctttacactctgatgactgcagtggcctcccaaattgagcccactcagacaatcctatcacaatccatactgtggctacctagggggagtttctagaatgcacactggtgctttttgcctccctacttatgccctccaaaggccttcaggatcacctctgaatgccttgacctgtggagggatttttgtttgctttttgatttggggctttgtgactttttggtggtattttggtagcattgtcattgtaaataaaggtttatggtcctgggnaaccttgcctaatcatccagacaccaggcagaaactgggagaggaacacaggagaaagaagagaaacttacaaataactcttcccttccgtttctcttacctcaaaaataaagaaaatctaataaaatagcattcataaaatgaagttgccatattaatctcaggaaatagagatctgaaaatactgaagctatgaaaacattgtaaagattagaaaaattattaaataaaaactcataaaacaggcaatttaatattggattcatttcttgggtagaatgccttccaggttaatgtaatggagcccagaagtattagcaattcttcttcacacctttacaaatcatacccagttgtcaaaagaagcagaatgtttctgccatcagccccattacacagaccagaataatagtttagcagccaatttctgctattaacagaactcaagggaaagaaatgacagaaaagcaagccagggatggtgaaactaattgtgatgacaagcatattattagagacaggtaatgggcggaaaactacttcatcatcagtgtttttctcaatccagtaatgaagaccatgcggatataggtgtaaagaggcctctgcttgttcaccagcaggtgtggaataattggtgctggtgtgagggggtagagggaagacagaataaacattgcaaatacaagtagacaaaaatgccatcactgcaaataaaagtagacaaaaatgccattttcttgtcttagattcagataggagattcttcttaagatgctccgtgttttttgttttttgtttttctgtagaagcaagagcagtctgtgatagaattatggcagcaagttcttaaccctttccagattaccaaactctgagaatctgacatagcctgagagtcttttctctcccttgaaaatagccattaattcagtgactgtttggagctgtgagg

SEQ ID NO: 239968 - DNA, 414 bp, Homo sapiens
tttggaatgcccctggcgatggtggaatatactgtcttcattctacagatgaggacagtgacccagagatgtaactgacttgcctagagtcacaggatccacagcaggagtgagaaccccgtggggcttcctaatccagcgctccaaggaaatgcaaggatattggtcatgggtgactcaatttaaccaacagtagcttggttagacaatctgcctttggattcattcatagttaatttcttcatgtttgcttggattcatgatgccataattcatgctgtctggtatggtttggctacagagacatgcaatagggcatgtattttgtggtttggtgacaaatcaggacacacgtgcagtgctgctgtgagccaagccagtttcctcagggtcaaggccttggctgctgagctc

SEQ ID NO: 239969 - DNA, 438 bp, Homo sapiens
  misc_feature (425)..(425): n is a, c, g, or t
  misc_feature (435)..(435): n is a, c, g, or t
cggagaggtggaagaaatgaaaatattttctgtctcttgcttgcagaagcaaatcagtctttgaggacttatgttttttctgtgtgatcacagtcagacgttctctctgaaatccccttggcacatatttaggatgccagactgcttgtagttttagtggttcaggccatcactgccttttgataatgtgtctgctgctgataatgatgatgatgacaacctcagtgacgagtgtggtctgatgcagaaaaagactgcttacagtcttgctggagagatgccaagagcactgacgagacaattagaaaacataaatctattcaaaatggtatgatgcagactcaaagtgcaacagagattcctaagaaaagagaattgaagggaagttggcgaaggtttgaggaagaagcctgggcaacagagcnacagtccatntca

SEQ ID NO: 239970 - DNA, 333 bp, Homo sapiens
ggcttaagaagattaacaaggaaaaaaaaaaaaacaccatagcatgcatttctttctactcccatctagggtttggggttgcaagtttttagagaaaggaatttggcaagaaaagaatccagatgtaactgacagcaaagtgacacatggcaaagcaacatctctgctcttaggcatacttgttcccagctactaattaactgacagaaacagaaacctttccctttaatatttgccactgtcaaggtcaaggatggaccttaatacatcaaaattgtacttactctctacttgttaaatacagatttaccctttactaacagttaaaaatgc

SEQ ID NO: 239971 - DNA, 593 bp, Homo sapiens
ctatctccaaaaaaagagaaagaaagaaaaagaaaagaaaagacaaaggcttagctactaagctacagcattgggcagtctccattgacctccccagaaggagcctagagcaatcaactttgagcttgcaaagccttttaactgctcaagataatttttagagctaactatgacatgaattcacaaaattcccaccttccaaatggcggagaccaagagacagaactgccacgtggttagaaagtcaagctcccaaggacataaaacaagatgagagggaaacctcatccagtttttgtttcagggacctgcagcagcaaagtttatagttgatcagtgctgggtcagctcaaatagcagacttacaggggtcctaggcctgcattatatctatgacacaccttttatgacagagtgacacacaaagacaagtttgtagcacaaagttcaccaaattcgctacagcctaagactagcctcaccagtcctttttcccattaatcagagaggctgaagcctgacttgtaagaaactcttgtccttttgccagtgtgccaggtttctgggttccccttctctgaatggctttgatg

SEQ ID NO: 239972 - DNA, 468 bp, Homo sapiens
tttcagtgctttcccttatcagatttgaccaactccaaaccttctagctcactaatgtggaatgttccactccaaagaaataagagcaccttgctcccctcagcctttcctggcattctcaggcaactgagaatcacctgagggtgtctgggagaaacactccctaagacatgcagtggctctaaataggttccccctcagaagaacatacttggagtttaatctcaaccagcaggtacatagaaggagctgacccctcccgaaccttgaggccctgacacactgtgccaggtggctgagacatgggcggacagaacaggttcagggggtcatgactctgaagagctaggtctgcgagcagcacattttgggtctgacatacgtcccaacttggtcagatccaaagagtaactctgaattatggggaacaaggcctttgaagtgggaggaaaatggccagcaaaaggg

SEQ ID NO: 239973 - DNA, 498 bp, Homo sapiens
tcctaaaaatgtgtaagttctgtgatttcttggactaaaagatatctatttacatagtgaaaggccaggccttgtaaagatcgtgacagtattcaatcctattctcgtttttttgtttcaatgtgttgctagttatcttatctcagtgtattgtatttatataactgcatatttgattaagatacctaacctatgagacatattaacataatgaacacatgtaagcacacaacccaatttaagcataagaacagtatcaataattttgcagttatctttcactctttttcagtcacacagagacaactatactcttaattttgtgtttagagtcctctattttcttaatagacagattgcacatggttaaaggtctatgtttacatcaagagagcctgtgtctggatcttgttcaccccgcttatgtctcttttgaagttatgcttaagctttatcccttgttcctttatggaaatttgagtattttaggaaaagtaa

SEQ ID NO: 239974 - DNA, 418 bp, Homo sapiens
catagacatgggagtgggagccgcagatgctgtttgaggcagaagagtttccatctcctcttgcccccccagtatgccagtatccctcagtgttgcctctgggcaaaacctagctggcagcaagttggcaagggagcctgggaaatggaagttcttataagagtaaggggatcgggatgcctctcagaacaaagtgaaatggtcaatgcagcaaccaaatagggtaaaatagtgctcttggcagttttggatagggatatccctgttggtctggaatccaggctggaatacaaattcagcatgtatgagtaaagatacttttgatagatgaatgtggtggagtagttaagatcactagagaaggtatatagagttaaaaaaaaaaaaaaaaaacagaagaagaagaaagaaggcaagg

SEQ ID NO: 239975 - DNA, 172 bp, Homo sapiens
agctgaggaaaatattaagttggtgccttttgttttgctcttgtttttttctccaggaatttttcattggttggctctcctttcttgttctcattgctgtcatctcacacatcctttctaacttttttcttttgcatagcttcttaagttaggcccttccatcactgatttc

SEQ ID NO: 239976 - DNA, 439 bp, Homo sapiens
ctttgttcttctagcatcaacatctttcctttggacagtggttattatcttaacataatgtttaaaaaaaaaacgtagatttttaatttatgatctctttgtgccaggaattgaaatactttatgggtaaacctaaattatttgataaaaaaatcttaatgtaggctgggtgcctggctcacgcctgtaatcccagcactttgggaggctgaagtgggcggatcacgaggtcaggagatctacctggctaacacggtgaaaccccgtctctagtaaaaatacaaaaaattagccgggcatggtggtgggcacctgtagtcccagctactggggaggctgaggcaggagaatggcatgcacccaggaggcagagcttgcagtgagccgagattgccgccactgaactccagcctgggcgacagagcgagactccacctca

SEQ ID NO: 239977 - DNA, 499 bp, Homo sapiens
tcttaacattttatgaatgtgtaaaatccagtccattcattagcatcaacagggagcagcttatgtggcatacttctcaaatagtctatctgaggcataatgacattggtgattttctggtattttaccacacttctgagttgatttttagtttcaaattgggtaagctcagagtatctttgtttgttttaagtagcaagatttctagtcatttaaaccacttaaaatcaagtagcaggctttatttgaatttgtgattaggaattctgtaattgtatttgttaggaaaattttcagtgtgtttgctgtaaatgtgtgtatgtggttttgttttttgttttttgtttttgtttttgtttttttgagatggagttttgcttttgttgctggggcaggagaacagcttgagcccaggaggcggaggttgcagtgagccaagatcatgccactgcattctagcctgggcaacagagcgggaccctctctcaaaaaaaaaaaa

SEQ ID NO: 239978 - DNA, 420 bp, Homo sapiens
cctctttttattcatgtttctgctgtagacagtctgctattaagtccatctaacaaattcattttggatattatattttttctatttctagaatttccatttcattctcttatactttcttatgtctctgctgaaatttttcatattttaaccattttgtccatctcttcctctgactttatatcatctttataattattataaagctcctatctgctaattcatctcagagtctgcttttatttactattttactgccatttcctgcttcttaaaatgctatttaattttgtttgaatgctgtacgttgtgtttaaaagtacggtgttgactaaagtggctaatttttaaaccttttacttttgagataattgtagattcacatgcagttgttaaataaatagctaatgtttacctgca

SEQ ID NO: 239979 - DNA, 146 bp, Homo sapiens
ttaaatgattcacttgaaatatatacagaaattgtaatttgcttttttttaaaaaagggggctaaagtaacactttcctactttgtaaattatagatcttaaattcatgcaccccgtgggagctcaataaagatatactgaattga

SEQ ID NO: 239980 - DNA, 387 bp, Homo sapiens
agagaatttaggaaatatttcatagtcacttggatattttgtaatcactcaaatttctgacacaaattaagagtcagaaaactgtgggaagtatggctgagattttctgattcccacattctgcaacaataaaatataaacatgactaaccaggatacatttacaatacacatgactaagtgacaacacgtgggagataactggcttttgaaatgcatgtctgtattaatcagagttctccagagaaacagaattaatagggttctacaaacctgcagagcctatatcccagcttgaaactgaaggctgtaaggctgctgtagtaccagaaagagccactgtctcagagttcaaaggccatcaggcaaaggaaaaaagaacacacac

SEQ ID NO: 239981 - DNA, 516 bp, Homo sapiens
tctcgttctgtcacccaggctggagtgcagtggcgcaatctcggctcgctgcaagctctgcctcccggattcccgccattctcctgcctcagcctccctagtagctgggactacaggcgccccccaccatgcccggctaatttttgatatttttagtagagacagggtttcactgtgttagccaggatggtctcgatctcctgacctcgtgatccacctgcctcggcctcccaaagtgctgggattacatgtgtgagccaccacacccggccccatttttaatacgttttttaaagatgcatataaaatgcattaccctctggaagattccagtaacttactgaagcaagtttctcctctacatatacctatttctgccatgagtaactgttcattttcagtgagtcatttgagtttctgttattcaggtatacagagttcctgttgtctttttagtcaacaaagtttaacaaagaccataataaagatggctttcagcagctctgttattgggaa

SEQ ID NO: 239982 - DNA, 436 bp, Homo sapiens
ttttcaataaatgcagaattccagaggcaatggagtaatttttaaaaaatacttaagaaaataaatttgaaggtagaattttacaattaataaatttgtatttcaaacatgtgatgacaataaaaatattctcaggcatacaagtcctttttaccataaaaaggactaccattgaaaagatattttaacataagtgctccaaaagagaaagagaagaaaaaatatcaagaaaaaaaagaactatatccaaaataccacagaattaaagctctatatggtgtcaatatgattggcaaccctggtggggggaagaccaaaagtaatgaacatatactaaaaatcttgtctagttagagggtgtatatacacaaacatatatatatatatatatataatatactgtatatatattaattactttaaataagaaagtatt

SEQ ID NO: 239983 - DNA, 383 bp, Homo sapiens
agagctcctgagaggtcagcgtggctgatcagggaaggctgacagcaggaagaggggagatgctcctaagaacagtttgaacacaccgatgcataaacaaacctcccttcctagccacacaaggtgacagtgaaaaagacaagcaaatgtaaaggaggtgatagactcttagaagctaccgtactcgctcgtggatagagtgatggcggcagccaactctgccaaacctgctgctcctggcaagtcccacagccagtgccatgttgggcacggtcatctctcttggactctgacactgcctcgcggcagcccttgttcctgcagcctcaccccagtggcttgttctatgctactaacaaattagaattggttgcctcctgaaa

SEQ ID NO: 239984 - DNA, 499 bp, Homo sapiens
cggaggctgggtgcagtggctcacacctgtaatcccagcactttgggaggctgaggcaggcagatcacttcaggtcaggagctcgagaccagcctggccaacatggtgaaactccatctctaccaaaaaatacaaaaattagccagggtggtggtgcacacctgtaatcccagctacttgggaggctgaggcatgagaatgggttgaagccaggaggtgaaggttgcagtgagctgagatcgtgccactgcactccagcctcggtgacagagcaagaccctgtctcaaaaaaaaagaaaaaaaggtaatcactgagactatggaattataattattttaaaaaatataataaatattcatatttatatttaaacattgatatttaaatacaaacgtatttatatttaaatgttaaaaatcagaattgtatagtcagaaacagtcaaatttaattaaaacatgtttttgtttcttccccagagaacaaatataatatcta

SEQ ID NO: 239985 - DNA, 1104 bp, Homo sapiens
caagtagaattgcttttacttatccccctattggagtttaaacaatttttaaaaaaataaaagcaaattcagataccaaacaaaccaaaaaacttactgtgatgatcctgagaggttttgagatgatgttgatctcagattgatattgatcaaatttattgtattactagagaagtacatttttaccagtgaaaatacagtcaagtgtgaacattttaaatgcagaaagcctgagattttgtcctattcaataaaacggctgaattatagaatactcaagagatgttgttttccttaagaagatatactataaatattcatgcgtactaagcctatagaaacataaactaggcttagttcaacaataaatacttgcaagctcaatgaagacataatggatacaaagatgataccctcaggaagcttatagtttagttctaaattacactactgtattttcttttcttttttttttttttttaaagaaaacagtttaacatcaaatgtttcccaggtttactttttgcacagtgcatacagttttgggaaaatatgtggttacaacacgatattctaggccagttatgttggctcacacctgtaatctcagcctcccaaagtgctgggattacaggcgagagctacagtgcctggctagtccagaatcttaacattgctatttgtatatctttttccttctgccttcagggaacccctcaatcactgcttattactgtgagtttgctctaacctgctgccatcaccttctgtcgtccgaatgaaaaaactaattttttcttgatgactctaatattgtttgaggggcaattcttctttttctcagcttttctcattaatgttgttatcttttatatgaaactgaaggatggccaaatcccattatccagctatcctgggtcagctttctaggttttacagtggtcccttggaggattttaggagtcctgtattttaaaaatttggtgacatggggtttagtgtagaagatgcagagaggccatgggaagggattccagtttgtatcccagaacatggatatattcaggttgagatcttgtgattgtcaaaaactcttgtgtattt

SEQ ID NO: 239986 - DNA, 1100 bp, Homo sapiens
gatggtgaggcttatgtggcaggactgggagggtttaatgcatgctttttgacagtttggatctggaggggtctcaggcttccacaaaaattacattgtggacagtttcataggattttgccttttaactcttcaaagcaacagttttctcaactgtcatccccacttcctctgctccttacaatggcttcatatggaaggtgaagctgagatcaccccaattttacaggtgaggaaactgaggtcaagctaggagcgtccagcggggctgagaaattgccaggatttccttccccattaaggagctgagagtcttagctccagacacgttggcttgttagaatatcaaaaccaccgaaggggaaaaaccacttactggaattaaatgctatctgctgtattagtttaaatcagtggcgttcaaacttgtttctccttttcactgcggaacacgttcttgacatgtacttgactcagagtcccatgtctaaaggagacagagcccaaggcagcccacctgaagctggggagggagtccaaagtgcaagccacctggtctccatttccccgccccttgggggcctttgggcagctccttggacccctgaaagaggccaccaggataaactttgttaaaatgcatgccttgtgccccactgtcctattacgggctttcagtagtctccactccctcggcaggcaaagacactggccatctccaaattccctcccctcctgcacagcatcagccacctggcaagcagtctcacataggaccatttgccagcaggccctgcaagcctgggggacagcctagaggaggtgacttacatacacagcataagagttttcaggagaccaaaaagattcaatatatgtcattaactcctgactcagtttccccaaaccatgcctcctgagtgctccctctgtctccaaatcctgatttttgtgcgcggacccctgtctacaataaacaggatcctatgacttcaaaaacacaaaccaacaaaaacgcacacaacccacaaaaagacaaacacaaaagggggggcgcccccaaaaggattccccccggggggccccacccagggggaccc

SEQ ID NO: 239987 - DNA, 414 bp, Homo sapiens
tgtgaacacgtaggtatactgaggggatgacagtcatttagatttatatctatgaatctgtgattatatctaaatttaaatctagacatatcaagtctttaaaagggatttctgaaagtcaagtccaaagaatatgccaaatttatctcccattcacagccaacaaaacatccatcttccacaaaaaccaccagccaggtgcagtggctcacgcctgtaatccaagcactttgggagaggcagatcacttgataccaggagttcaagaccagcctgggcaacaaattaagacctggtctctacaaaaagtttagattagctgggcatagtggtgcgtacctgtggtctcagttactcaagagtaagtgggcagatcgcttgagcctaggagtttgaggctgcaatgaactaaga

SEQ ID NO: 239988 - DNA, 450 bp, Homo sapiens
tgagagagagatttttcaactggctgcaaacaagatagggtagatcttggaaaccataatatagaggaattgaaggcacttggccatgagaagaaagaagtcattgcaggcaagagcactgtgttccaatgcttagggatacagaatgaagaacagaattattttgtgtggtccagaagacaaatctaggacaaatagttggcttttcatatagggatggtttcatcttagcataaagaaaaacactgtcttcaatttctcatcatttgagctagttagcaatagaatgaggcacctgcatcattgggcttatgaattaattctgcaaatatgtattgaatgcctactatatgccaagccctgttctggacatgagcaggtgatcaatgagatagtcatggatttgccgtaatagaatttacattctagtggggcagataaccaacaagc

SEQ ID NO: 239989 - DNA, 4476 bp, Homo sapiens
  misc_feature (1029)..(1029): n is a, c, g, or t
  misc_feature (1227)..(1227): n is a, c, g, or t
  misc_feature (2061)..(2061): n is a, c, g, or t
  misc_feature (2302)..(2302): n is a, c, g, or t
  misc_feature (2511)..(2512): n is a, c, g, or t
  misc_feature (3225)..(3225): n is a, c, g, or t
cggatgggacagggagaggaagcagctgtgctttcatgctgaccctgatcctctgtgggggggcgtctccaaactggttgctgaaattggggatctgaaaaacatcttaagctatcctacagcaaaagttgatgattctaatgttagcaatcctgtctataggaataacggggttgtgaatcaatttgtaaacagtctttggaccctaaagtcagaaatcctatctacaggaacaactgggatacacaaggtcaggatcttgtgctgtgtgactttcagcaacaaggaagtgggccaaagtgcagcccaattaatgcttaattataactctatttcagtccataatgtggcatgcaattcttgtcaaccctctggggacacttttgaatttgggcatttgggaaatgttccttcattcaccagttgctgtttttaactaagtgatttactttgtgctggagctgagctgcgccaagctggagacacaaatagaacaaacacactccctgctctcatggagctcctggcattgtcccgtgcactagtgaccatttgctgcacacccagctcttctctaagcacttttcaaggatgctcttgtttaatcctcatgacaaccttatgaggcagatactgttattctcctcaggtgaggaaaccgaggcacagggagattaaataacttggccaaggtcactccatctgagccgggattccaacccaagtagtcttgctgcagagtcctagctattcaggacagtgctttgcacgggagagatttttgcccatagctctagggggatagaaagccacaggaacattatggctgaagtgcataattttggttggaaggaaacctctttgtagaaagaacagtataaggtaatgaggcaggtttccctaggccaggtaggcagtcagccccgctcctgctagctcctgtcaactctgcaagtcaggggagggtggcacccagaatggaagtactgtgcaaaagttttcaccagattctctcattaatcttcaccnagaagaccagcgatgctcaaactatctgtgcattcaaatcattgggcaggcttttaaaactccatgtcctgaccacaccctatgccaattaaatcagagtctctgatggtgggattcgggcttcatgattttttaaagctctcaatgtagttgcccaatggtttcttcttgcctgctgcccaggaaagcaaattcacngagaacagcaggttttgcagcaaagaaagagtttaataatcacaaggccagccaagccagaggatgggagagaattctcaagtcaaccttcttgagaatttagaggttagaatttttcaaggatagtttgtcaggctagggaatggggaatgctgattggttgggttggggataaagtcatagggggttgaagctgtcttcttgcactgagtcagttcctgggttgggggtcacaagatcagctgagccagtttcttggtatggttactggttgatatggtttggctgtgtccccacccaaatctcatcttgaattgtagctcccataattcccatgtgttgtgggagggacccagtgggagataattgaatcatgggggtggtttcccccatacctttctcgtggtaatgaataagtctcacgagatctgatggttttataaagggtttcccctttcacctggctctcattctgtcttgcctgctaccatgtaagacatgcctttcaccttctgccatgattgtgagtccattaaacctctttttctttataagttacccagcctctggtatgtctttatcagcagcctaaaaatggactaatataccggtccaggtggtgccagctggtttatcagaatgcagagtctgaaagatacctgaaagatacctcaaacaccaatcatacgttttacagttgtgatgttatctgtaggagcagttggggaggttaggaatcttgtgatccctggctacatgacttccaaagcataattctaaccttgtggctaacttgttagttttacaaaggtggtccctgagcaaggagggaantagttttgggaaggggctggtattgtctttgttttaaggttgaagtataaacaaattcctcccatagttagcttggcttatgctcaagaatcatcaaggacagcttgtgaggctagaagcaagatggagtcagctatgtcagatttctctgcctgtcataacttttgcagaggcagttttatccagatgattccagtgtgcaaactagatagaaccactgagctaggccagaacttctgangaacccttctgccccaggtgtgcaccaccaattctgaggcagggaacacaggcacatgagaggggacagcaaaattgtcattctttcctgaggctcttcccagagcaccttaaccaaagcagaggaactaagagaggcctgagagcagcctgtgggaaggcataggccttccagtggccggagtgcagaaggaaggaggagggtgcagnnggcggggaggataaatgtcaggcatgggcccagccgtttcagctgcttatttggctgtctccagagtggccagtaagaagactgagtcatttttgcaaagaattgttatgatctggctttgattgcatgtcagatatgcgtgcaggggactctttggagggaaaggctgtggtgggtggccccctcaatgcccattagcccacccttgctggccaacctggggcacagaggaggaatgaaagccaaaggtttttctcctttgcttttctttccctgcagctcatacttaaggacagaaaaatgtctctaggtttattggtagattcttaaaacatcccgtgcttcccatcctattgatgggggtgcccgccatacttcctgcacctcactagccccctcctccctggagagcaccgatggtcccaccccacagatcatgaggtggaaggacggtcttaaagatgaaaggttgtggttcagagatgtgaaggggcttgcctgagggtgcacagctttaaatggcagtgccaaaattagggtctgtgtccctggccctgttcaccctgccaaatggcccatcgtcagcaggagactcagaactccagtccacccagctttttctgcaggctagaactcagcctgcaggattgtcaaggctgtgcagtgtgctcctggctctctgagggctggagctgttctatttccatttgctnctgccccacctctgccaggatgcccagtccaggaccatgtggcagtagggaaggctcagcccctgtccccgcctgactccacccagaagggtgtggtggagtggtctgagagatgtgtgtgtgtggctccggagccttcttgttgcagcatgaccccctgtccctgccaggttaccacagtctgcttgcttgtctcttgtggcattttgagagggggtatgcagcttagcgcagcacagcaaggcgtccttgatcttggttgtttttgtgtccaggcaccagagctgccttgaggctgagatgtgggcctagggctggcctggattctctagcaatgctggaatcagaggccagctagcaattctggttacctctatgctaggtgctcacctcccttgacacttccccaggtcctgacccctccttctcacagggtcccactgtgggcaccacactggaccaggaaagcattctggagccatcgtttgtaatcatcctgcttctcagccggttccactgatgtaaaacaagtttacctgtcaatattgctaacaattagtgagacgggggcaagctgacctcagggaagtaattttgtgtaaacactgcccactctgcttctactattattgattactctaaacttcccacagacataggtgggagtccagggtggctgtctacagtgggaggagggccagccagtgcatagtttaattctgcttgaggtttttgccttgccataggccactgagtccttgactttagtcctcacctaagacatgaggccttgcaacagaagcccacacacttgagggccatgggaaagttaaagggacattcctctggcttcataaaaggattctagaacctcacatcctacattctacagtcataggctcaaagagatagaagtaaccccagaatgccctgtagactcaaagcctctcattatctggaatagtggaatgttggaggccgagtgcagtggctcatgcctgtaatcccagcactttgggaggccgaggcaggtggatcacttgaggtcaggagttcgagaccagcctggccattatggtgaaatcccatctctactaaaaatgcaaaaattagctgggtgtggtggcgtgcacctgtaatcccagggaggctgaggcaggagaatcacttgaacccaggaggtggaggttgcagtgagctgagatcgcgccattgcaccccagcctgggcaacagagcaagactctgtctc

SEQ ID NO: 239990 - DNA, 475 bp, Homo sapiens
taagtaaaattcagagaccatagaaaaatagattgaggagcagctgaaagggtaggcggaaagacagaggcagggaaccacctagaaagcatggagaagctgttatgcctcagggtcatttgtatatttaggaatgcctaaatattaatacattactgacttgttaaattgttttctgactgtaaaagtaataatacttattgtagaaagtttggaaaatgcaaattaataactaaagagggacagagaaaaatcaaaaccaccaaatatctcattattcatagattattatttatcagcactttttttttgacacagagcgagggcagtggcgcgatctcggctcactgcagcctccacctcccaggttcaggtgaggcaggagaatggtgtgggcctgggaggtggagcttgcagtgagccaggattacaccactgcactccagcctgggcaacaaagcaagattccgtcttt

SEQ ID NO: 239991 - DNA, 308 bp, Homo sapiens
gttgtcatcactgtcaccatcattaccatcaccttcaccattatcaccactactatcattatcaccatcaccatcactaccatcatcatcatcatcatcatcattaccaccccagcaccactcaccatcatcattatcatcatcaccatcaccaccaccatcatcaccatcatcatctctactttacaatagaggttccaagagcttgtgatctgcccaagatcccatttccagtacgggctggggtaaacactctagttcaggtgtcacagctccaaaagaaatggacttttttttcctcttggtct

SEQ ID NO: 239992 - DNA, 404 bp, Homo sapiens
tatttaatctcttcatatctcagttttctcttctttaaaataaggacagtaattgtatctacctcacaggattgttgtgaggattaaaagaaatattacatagttgctactgcattgtaaatacttaataaatattagactttcttattgcagagaaataatttgcaggattttacctaaagctacagatagtgacattgctaacctattagggttcctcacccatacattctaagatgcaggacctattctgtgctggaccagccaccaatgtgagcaccctgggaaaccacagagttttaaaggaaggtatgattgtggcctatacacatacatttccccaacacttaggagctagtgttaaatgtttttaaaaaaaattcctttagacctcctgatattag

SEQ ID NO: 239993 - DNA, 344 bp, Homo sapiens
tctgtgactttcttgagaacaaaatactgtctgtgtcagtttggatccccattattttgagaaatgcctgaataagtttgatgctgaataatttgaataagcaattgaatcaatttaatagccaaaaatcctgtttttgataagaataaataatagatcatgtgtgaatgtgtatgtatatacatacataaatacaattgtaagcaatttaaagtaatgaacaattatggaataatattagttattattttagaacattcagtgttcaaaattaggtgaaaagggccgaaaagtttctctcaataaaagatgggtcttgacgaaagtcaagaatttggattgga

SEQ ID NO: 239994 - DNA, 462 bp, Homo sapiens
ttggaaaaggcctcctttataggtgctgcttcaaaatcctgcctcctggtccttaaagggcacattttataaatcgcatgtattcagagtaaatacagcaaaaaaatctcttgaggggttgtggtcatgctggaaaacaaccagagctgggactgctccctcctcatcctggaatgtatcacccatcctctcctccactgctttccaagaagaggactgacccctcactcttttccagaattaatccacttttctctcactttccatcccaccatctgttgcctcttctgggagcttgagtcaaaacccgccccttctcacttctgcctccttagcctcagcgcacaggtatgctcgaggcttccaggagaactaacccaagcaacccgcttccaacctatcctccagccctcacgcaaccattgagcttttttccttctttaagtgcatatttcttgaaaa

SEQ ID NO: 239995 - DNA, 634 bp, Homo sapiens
gtgtgagttggaattattatccaattaaatgaacataaattatactgcctacatagattggaaaaatatcttttggtgggccgtgtgtgtatatgcacccatgtgtttatgtaaaaccaaacatcaacttacaaaaaccagttcagtcttatagccttgtatagtgtaacatacgggctgagacatttgcttatttgagccttttcaccctttatttgtaaaaaggaggagagcctttaagtgaaatgtaaactaaacttggaacccctaaaacgattttgaacactacttgacatttaaatgtttattaaaaataaagcaaagtttaagaagcatgtttggtaaagagttctttggcaggaaatggggacctatcagccaagctaatagccttagctatggcatccatagtaactaagacacgctgccgatgtaaatatttatgccagcaagcagtgctgcagaacccgggccgagcagttcagagcagtgaaattaaagcatcagccgccaatgtttgatttattttgtattatccggtattccaagcattaccatcattcatctcttctagggtttttcaaaatagtttagccctaagaacaagaatcctagaagaccagtttactcggag

SEQ ID NO: 239996 - DNA, 633 bp, Homo sapiens
ctgctcatgaagaaatgtggcatctgttgccatttcctaaactataaggtttagatagattgtcttgaattttgatagcaaatttttttaaatttatatttctgcctcctcgtacatccttatatatggaaaaaaaagtaagagttcctcagatcagagctcagtagctgtgtcaatttgaagttcaatcagtgtagttgtcctggggtgatcgctgactctgctctgtttcatatttcagttgcttgctccaaggagagaatttctgagaacaatgggtgttagcaactttaagttactccccaaacgtttgctggccacattctcatttctaaacatctggatctgggtaaaggtttgaatagatgtagggaacaaaattggtttttccatggtgtagtctaattttgccaaatcacccaagaaagaaagtatatgacgtgtggagtttgcatttcttggatgggacctatcgggtcacccagcccagtcttacagtcataaattcctacctcttagttcctgccaaagggccttcagcctctgtgtgcacacttattgaatgaatgctttgcctaaagtttggccttttgaagaaaaacagcatgtgataatataaaaatatgagagttt

SEQ ID NO: 239997 - DNA, 637 bp, Homo sapiens
gtccaagggctgctgatgtcccccggccctttggatcatctcttgtgcagctgaaaccctggcttaggggaagaggaaccgcctgggaggggctgggggagatcctgggttcccctctggcactaaccaatgtggccaccagagggcgcaaggtggcagagcctggacttggccaggatgctctctgctgggttggggccaacaccaggaaggaagcatgggccatagggaagctcccattggtgctggggcaacccgcagcagctctgcgtcttctgctcttctgatgggaactgcaggcctctcccctggccccagagagtcgggcttctgggcccagccgctgtctgtcatgcctgcactcaggcagctggaggggtgggaggggagatggctcctggccttggccatggctgctttggcttccaccgttcctgctcctcttccatgtggccccctgacttggttgtgtgagcactccagtcctggcagagcctgacaggcactccctgaggttggggtatcccttggctctgtcctggggttgaggtccaggacctggcacggctgtgagaaggaccttgggctggagctgtggactcggtgctttattcgttctaagatgaaagtcattcat

SEQ ID NO: 239998 - DNA, 452 bp, Homo sapiens
gtccaagggctgctgatgtcccccggccctttggatcatctcttgtgcagctgaaaccctggcttaggggaagaggaaccgcctgggaggggctgggggagatcctgggttcccctctggcactaaccaatgtggccaccagagggcgcaaggtggcagagcctggacttggccaggatgctctctgctgggttggggccaacaccaggaaggaagcatgggccatagggaagctcccattggtgctggggcaacccgcagcagctctgcgtcttctgctcttctgatgggaactgcaggcctctcccctggccccagagagtcgggcttctgggcccagccgctgtctgtcatgcctgcactcaggcagctggaggggtgggaggggaacatttcatcaccttcctgaccttcttacacccttcatccgtaccagatccctctaccactgc

SEQ ID NO: 239999 - DNA, 440 bp, Homo sapiens
gtccaagggctgctgatgtcccccggccctttggatcatctcttgtgcagctgaaaccctggcttaggggaagaggaaccgcctgggaggggctgggggagatcctgggttcccctctggcactaaccaatgtggccaccagagggcgcaaggtggcagagcctggacttggccaggatgctctctgctgggttggggccaacaccaggaaggaagcatgggccatagggaagctcccattggtgctggggcaacccgcagcagctctgcgtcttctgctcttctgatgggaactgcaggcctctcccctggccccagagagtcgggcttctgggcccagccgctgtctgtcatgcctgcactcaggcagctggaggggtgggaggggacgacgcctctcccctgtgtgctcgtgtctcgccccgccgcgtcctttcccg

SEQ ID NO: 240000 - DNA, 646 bp, Homo sapiens
aactgtaaattatcgagacattctgcattctgttttgcatattgtctttgaatcccatgagtttacacttagagcccaattcagatactacattttcatcagaaaaacttgatctgtatttagatttaattaaatgtacagtcgtaaacattcaaaaaaaaaaaaaaaaaaaaaaaaaaaaaaaaaaaaaaaaaaaaaaaaaaaaaaaaaaaaaaaaaaaaaaaaaaaaaaaaaaaaaaaaaaaaaaaccttgtggcccctttggcccaagcgatttttaaattgggcaagttttatcctggggcccgaattcggggctaattgggcaatttccccttaaggggggccgtttaaaattcaatggccggggttttaaaacggtgggactgggaaaaccctgggggtacccaacttaaacgccttggaagaaaatccctttttcccaagtggggaaaaaaccaaaaggccccgaccggagggcctttccaaaaagtggccaacccttaatggcaaatggaaatggaaggcgtaaaatttgggaaaaatccgcggaaaatttgtgtaaacaccgcttatttttaacccataggccgaaattgggtggacacggggcccttattaagaacggggctttcaaggaaggggg

SEQ ID NO: 240001 - DNA, 427 bp, Homo sapiens
attccagtaataggaagttatcctaagaaagtcatcacaaataaatgtaaaaatttagccacaagaatgttcactgtagtactatttacaataaaaacaggaaacctaaatatccatatggggctgattggataatttgtggtaatccctattaagaaacatcctgcagcttttcagaatatctggttaaatggaatgataatcgaggacacacaaaaaggttcatcatattataaaaacaaaaaattgtgttataaatcaatattccaaaacgttctaactttagtttttttctgggtgatggggtcctgtgtaacttttatcttcttatggttttctgtgttataatttttctctaagagttatatatcactcatataaatgtattttgaaaaagtgtttaagaataaattttaactagtcacaa

SEQ ID NO: 240002 - DNA, 380 bp, Homo sapiens
cggaaggcacgagagctggaggccaacgtgaaggggccgcggacagacctgccgaaccaggcggagggcgcgacaatccggaacgcctagcgcctgccctaggggcttgaggcgcagggagaagcgcgggagcggcggcggcggcgccgccagcgggaggagcgcggggcggacgaggtggagaataagcggcggcgccaaaacctaagcaggaagaaggcggccagctccccgcgctccctgcactgggcccgcaaggggacgatcccgtccaggacctggagcgcgccggctttgggggcgcccgagggctccccccttcccccaccccaggcccagcgtgtccctggcctgggcctttcccacctggggctgccgtc

SEQ ID NO: 240003 - DNA, 487 bp, Homo sapiens
cctgcttaattaatgtgctctaaatctggaaatgattcaaatgtttgtcagttggtgattggaaaaacaaaccgtgggaaaaccatacaatgaaatacttaccaatataaaggaatgaactatttttattatatgtaatagcatgaataaatctcaaaataatgctgagtgaagaagtcagatgaaaaaggggccatactgcatgattccaatcatataaaaatttagaaaatacagcccatagtgacagaaagcatgtgagtggttgtctgaggttgagggtatgggtcagggagaggtgaaagggaaggatcaaaaagggtcgtcagaaaacctttggggtgactgatatgtgcatttttgattgtggtgatggtttcattggtatgtacatatgtaaaatcatcaaattgtacgtgttgaacatatgtaatctattgtacatcaataacatgtcaataaacctgcaaaaaagataatatataca

SEQ ID NO: 240004 - DNA, 392 bp, Homo sapiens
aacattactgaggacttgggttttgctgaacattgtatataggtactataaatacaaaaatgagtagacatgcccttggacccagataatcctttgagagtcacctttgagcctgaatcctggaagtctccacatataggagtaaataaaaaatcatcgtgttaaaacaggtggcttaatgctagaaacctccatccaacccaagcaccagaatacagataataattcacatttacctatattctttttcccagccactttttcttatccaaggaaaacacaacgatgaacattgagtttataattttcttgcttttttttgttcttaagggttgtttatgtttttaaaaaaatgaacttcattaaaacagcaccaagttttatataatctt

SEQ ID NO: 240005 - DNA, 542 bp, Homo sapiens
ccgcatgctggtcctttctttcctgacaggcgggcagtctccctccagcttctgggaggacagttcaaattatggaggagggggtgcatgtagggcagcagtgcccaggggagtatgggggagttgggggagcagaggctcatttttctttatagctcagattcccaagcctgtgactttgagaatctttgtcttccttgcaacatttcaatctgaggctcttgtggagagggcagagttggagccagatggaagagtggtgggagaggagtgggtggagggaacatggagaatgtttcaggtggtgtctttatttctggcaccttactttgcctactggagtttcccagtctgttccagacgccctctctagaccctgagagggcctgaggaggcatgttagttgccagtgtggtggagatggagtgccgggaggtggaggttgcagtgagccaagatcacgccactgcactccaggctgggtgacacagcgagtctctgtctcaataaataaataaataaataaacaaacaaatggaagg

SEQ ID NO: 240006 - DNA, 496 bp, Homo sapiens
attcacaggattacaaaaatataatatccacatttactcaaagaaactttaaatttggatcctccaacccaaattaaggatgtgagaactgactttgcatagttatcttagacagatctgctctttttagagtgttcaggttttattcacttcatgttaactccttacctgatacctccccaagaacaagtcacatgtacttgaggcaagataagtttggagcatatatgactacagagaaacggtaagagtgtttagcaccgaaattttctatgtgtactttttatataatactctaatggcaaattcactcttgttaaatgagtcattagaatacatttgattttttaaaatctgaaagatttttggctgggcttggtggctcacacctataatctcagcactttgggaggccaaggcgggaagactgcttgaggccaggggtttgagaccatcctgggcaacaaagtaagaccccacttctacagaaaaatta

SEQ ID NO: 240007 - DNA, 778 bp, Homo sapiens
taatcatttatagaactcctttagttggtttacttgcctcttagggtaaaaacaaaattagacttccagagtagtctgtgatcttggaaaagtctttctgaaaaatgattatagaactgttaagacatctcccatctcatctcatatggcatcatacttttcccaattattttcagatattttagcatcaaagttttctagaatgagttttgtagaacactagtatccctcattgcttaaatatattaggaggaaaaggattttttttattaaataagtttgggaatatatagagtggacaaaattagttttaaaattacaggtcatttgagaggtcttgaagtaccagtgtcttgtggatccctgaagggctagatgagggtggggcatgtagcctttctcaaatttatgtgactaccatacagtttgaggaaagctggtctatataaatgcattacctgtgaaacctggctttcttccacatctcctctgacttgctttgctatttttttccccatctcttacagtacttcctgctatcccccaaattgggggaattctttcttttttcattttaaaatatgatattctggagatctgaattctctctttttacatttttatatgtgtattccactttgagcaatattaatactagcttacattttaaaatacgatattctggagatccaatgtataacatgagggctatagttaataatattgtattgcactgggattttttttgagagtagattttagttgcccttgctaaaaa

SEQ ID NO: 240008 - DNA, 603 bp, Homo sapiens
cccaggatccggagcttcgggggggccgagtccgggtttggggcccgggaggcggggccagttaggtcgagggtccctgggatcgtcgggtcaggccttgggctaacgtaggcactctcgcagttcctccgccttcaggaaggtctttttagcaggggccttacgggtgcatgcttcggtcctggaggacttaggctagcctcctctccatcagcgccacccgtctggggcccgaaaggagggagctttccctctgtcccccagcctttggactgtcaccaaacaagccattcgttcaccaaatactttttaagcgcctaccatgtgcctgacaagggatatgtaacggtgagaaaaactaggtgtggtccaggcccttcagggactcaggggctcgtggaagaagtggatattgaagtacttatcacacaaaggaggataaaagtacgatagcgatatctaccacgaaggtgagcagacagagctagcggggcttgcaggaggagttttgatcttgcagggacaggaaggaggagttagctcctgcggggtgggattgggggtggtagtgatatagacgtggggacagagtggaaaacaaca

SEQ ID NO: 240009 - DNA, 264 bp, Homo sapiens
atacagttctttctattataaggagacttaaactcaccacactatgtaaagtcatacaataaagaccacagggcctattggaaaaatgaagttaggggcacaacactcaaaaacttcatcagtgacacatttgaaaaaaagatgggctgggcacagtgtctcacacctgtaatcccagcactttgggaggccaagacaggaagatcacttgagcccaggagttggagaccagtccgtgcaacacagtgagagcccatctctaca

SEQ ID NO: 240010 - DNA, 447 bp, Homo sapiens
gtttaaggttccctataggcagatcctgagatgaagatttaaatgcacaccacttattgaggaggtgatttcaggaaacaccggcaggagagtggggcagtatgacagggaaagaaaggaagcaaaaaaataaagggcatgttctcaaaggaatcagttggagagcagtcatgctggagacactggaagagagtatagaagatgtctcaatgtagtcctgcctagggatcaggaagtcgaagtatttatccactaattcttgtcaattgagaatttatttgaggggcattaactctccaaaacggtctccctgtgccggaaaaataaccctaagcagaatgttgtaggtatttgcagcaaatagccctcagtgtgtcctgaggattggtgtagtacataaatatacaaaattatttttatttataaaaaagctttctatgcatcagg

SEQ ID NO: 240011 - DNA, 406 bp, Homo sapiens
tcaggtaaataagaaggaaggtcttcagctaaaaatgaagagaggtgttggattcatccaagagaatggggaagaatgagttgaaaataaggaaaagttttaggatttccaggcagcacctagtgcccatttgatgtttgtagttgtaaacctaggtgagaccctacttagcatagttgtacacttttcctgcagctgtgttgagctgcttggatgtggcaatgtggaagggaatagctgaagtaggatggaggacaccaccattggaagtgggggaatcaaggcactgagaggtaaagattgtggtgaagattgaggttatcataaattaacagaatgacctagggacctgtagatgtctgtaacagggagagatagcaggtagttattgtttgaagacatgaag

SEQ ID NO: 240012 - DNA, 402 bp, Homo sapiens
tttcttttaactttttcaagggttatgaaatcattaaacattaaattccagttactgggacaagcatgaataaaggactaaagtccagaagttgattattttcataaataggatatgccacaaatgaccttacatacctgctgagccttgatgtctttctaaaaaatttatacctaagaagaacttaatgaagactggaagtagattattttaaattggcaggtaacaaataagttcagagagcaataattttttttttttttgaaatggagtctttctctgtcacccacactggaccctgtcacccaggctagagtgcagtagcatgaactcggctcactgcaacctctgcctcctgggttcaagcagttcttgtgcctcagcctcctgagtagctgagac

SEQ ID NO: 240013 - DNA, 419 bp, Homo sapiens
gggggatggagtctagctcagtcatccaggctggagtgcagtggcacgatcgcagctcactgcaacctccacctcctgggttcaagcgattctcctgcctcagcctcccgagtacctgggattacaggtgcttgccaccatgcctggctaatttttgtattttttgtagagacggggtttcaccatgctggccaggattttgagaccagcccctggcaaaacaaggagacctcgtctctacaaaaaattaaaaaaaaaaaaaaaaaacaggtgtggtggtgcatgcctgtaatcccagcaactcagaggctgaggtgggacaatcgcttgagcctgggagatcaaggctgcagtgagccatgattacaccactgcactgtgatccatcagactggccaacagagcaagactctgtcaag

SEQ ID NO: 240014 - DNA, 508 bp, Homo sapiens
cgtactgtactgtaagcagggctccggagcaaggcggcgtgtttccagaaatatgaagaaatacaccatgtgtattcattagctcttatttatggtctctgccctactttttgttttgattgtttcgggtatttattggcattccctaagtcagagagcctgcttcctacctagaccgaaccagtacgctttgaaaaccattcggagtgagatgttctcgggtggtggtgggaaagggagttttggccagacaggctgtggttggtagggaaaaaaatcaggaaaacacctacaaaaccaggtacactcctcccccatatatacacctgtatatatgtacatgcatacacgctcggccaagccaggccctcagaggctttggacaattactaaattgcttcttttcgtttccctcatcccgaggatggtagggacgaaaaggggagagttcagatctgtaaatatttttaaaaagaaaaaaaaataaaacattttaaacatcagctaa

SEQ ID NO: 240015 - DNA, 198 bp, Homo sapiens
ggtgagtcaccacacacacctctcccagtctaggaaacgggaatgaggacacgcacctggcagggctgtggggagactcaataacgggagggtgctgtaatatcagttgttaattccagaaagctaaccccagggaagagttcctaattttctcttgtatatggggtacaagtaaacattcaagcctgttgtcacttc

SEQ ID NO: 240016 - DNA, 377 bp, Homo sapiens
ccccaggctggagtgcagtggcacgatctcagctcactgcaacctccgcctgcctggttcaagtgattctcccgccacgtgtatttttagtagagacggggtttcactgtgttagccaggatggtctcgatcttctgaccttgtgatccgccagccttggcctcccaaagtgctgggattacaggcctgagccacctcgcccggactacattttaattatggtatgcacatatgttaaacttttatacagaacaatcattttataagtaagccaagttaaataattcatttttatgttcttacgccggagtcttcagatttatacaggataataataaaataagtagtaaaaatatgtatgcttgcgtatgtttcta

SEQ ID NO: 240017 - DNA, 437 bp, Homo sapiens
attcatagatgtctagggcttataacattcctggcacataacaagtcattattttttattactacttcggaagggaattgagtactataccctgaagaaggtgagtatgggaattctctacgggtctggaatgtccctatatttgtttattttgccttcaagtgactaactttaataccctattgtgattagaagttaaacttctgcaaccaaaaggaagcaggaagctagtatttcttgaagtgcttattacatgccaggtactgtgctacaaaaacaaaacaaaacaactgtaaaaaaaacttcaaatttggctgcgtgcagctgctcatgcctgtcatcccagcactttgaggaactgaagggaggattgcttgagtccaggagttccagaccagcctgggcaacacagtgagaccctgtctctacaaaaaaac

SEQ ID NO: 240018 - DNA, 348 bp, Homo sapiens
gaatgatccttttaaacttagattttaaactatctctgtcactttagaaacccaagtttccctgtctcacttagaataaaagccaaagtacttacagtggccttaaccccacacaacctggcattctcatgtatctcagatagtctttgccttgctcattaattttcagccatattagggcctcctggctattccttgagcataccagacacattcctcccttaggggctttgcagtggctgttctgtgccttggatgctctttccccagatttccacatagctaacacctcctttacctccttcaggtctctgctaaatgccaccctttcaatgagactgtgatcac

SEQ ID NO: 240019 - DNA, 697 bp, Homo sapiens
tgcttatttcactaagaaaacccaacaactgagactgcctagcccgccggtcctgtgcgcttttattgtgcttctaaccccagtagagtagaactaaattgcactgaatgtatagttaactctgtcttgaattctctgtttatgcaatgtgctcgaaagaaaaaaatgttaaaaatatatctataataataattttttgtcatttgtctttatgtccagctatgaatgtagattttgtgtcccgacagccctgttcctggtccaagtactttgtattgtatacgtgagtcataataataaaaagaagaagaaaaataatagaagctggaatgacttgctttttctccacagctcttccctattctctaccttctctctccttatccccctgtccaactctctggaaaaggtctgcttcactgctctggctttggggttcagaaactcacgtggagagaagcctgggaattgagaaagcatgctggcctgggagggcaggtgaaaggggtgaggggttgagaggaggaagaaaaggagcagtccattggttgagagagtaaggagtctataggtatgcccttgggggaatcttggctccaaacaaagtgggtttccagacgccaggatcccaatgggaagaaagatttcctcactcatccaccctcctcctcctcagccttgggctgggcccagacaa

SEQ ID NO: 240020 - DNA, 506 bp, Homo sapiens
ttttatcctatagccttttaaagtgcattcctgactttctgaattacaaaagcatctgcagtcttgctcagacctcaaccaatgaggattttggcagccaaagcctgttcaacattttacttgttgataaggcattacttttcttgtttcagaaagaaaggagagaaagaataaattaattgttgtattcaaggcaacttgcaataaaaagacatctacctggccgggcgcggcggctcacgcctgtaatcccagcactttgggaggccgaggcaggtagatcacgaggtcaggagatcgagaccatcctggctaacacggtgaaaccccatctctactacaaatataaaaacttagccaggcgtgatggcgggcgcctgtagtcccagctactcgggaggctgaggcaggagaatggtgtgaacccgggaggcggagcctgcagtgagccaagatcacgccactgcactccagcctgggcaacagagcgagactctgtctcaaaa

SEQ ID NO: 240021 - DNA, 552 bp, Homo sapiens
gaaataactataaagatgggccattttgtggttggtataagcaacatcttggcggtagtcagatattaagcttatgttccccagagagaattcctctgtatttcaatagcacctcgtagctatcttcattactgacaacattagttatattgcagtgcactttttacgtccacttccacaaactgaacacagggacagcctatctcattcccatattcacagatgggaacaggacaaaatattttattagagttattagggggaaaaaatcccattaagagcacatatgctgccttcataagggtttagatgcaacacagaacaaatgagctataacaactatttccatttcaaaaaacaattagaaacaggttattaaaaacaatcacctctactctgtgaaagctaaggaaatagattctcctcacttctgaatcattgaacattccaatattgatgtagaaagcatagagccttatttcatttgatagtaaagaataaagcaagcaatattgccacataacaaaccacacacaccacagacaaaaacac

SEQ ID NO: 240022 - DNA, 548 bp, Homo sapiens
tttttgtctctaatatcccagacatggcgctaaaactgaatattatatttaatggtaaaagactgaatggagccaagtgtggtggctcacacctataatcccagcactttggaaagccaaggcagatggattgcttgatctcaggagttcaagaccagcctgggcaaaatggtcttgacaagaggatagcttgagcccgagtttgagcccaatctgggcaacataacaagacattgtctctaaaagaattaaaatgccagccaggtgcggtggctcatgcctgtaatcccagcactttgggaggttgaggcaggcggatcacatgaggtcgggagattgagaccagcctgaccaacatggagaaactctgtctctactaaaaatacaaaattagctgggggtggtggtgcatgcctataatcctagctacttgggaggctgaggcggagaattgcttgaacccaggaggcggaggttgcagtgagcggagatcacaccattgcactccagcctgggcaacaagagcgaaactccgtctcaaaaaaaaa

SEQ ID NO: 240023 - DNA, 532 bp, Homo sapiens
ctgctagtgtggctgaagaggaacagatgtgttgattttgattgatttgcatttagaaattatgcaatatttgtaacgtgtcctagatcattgtgctcttcttttataaaatagaaataagcgtgtaggcgtggatatattgcaccccaccatgaccgaatagttattacttggaatttttcacacctagcagtggtgctgatgtttcaagtatagctttttgagagccatgattaccactgactcattccttttctatgacttgaaatcgtgtaggaaagggaagagtagataagtttaaagagatttccttgttgcagaaaacactaaggtataacaaaatgaaagagttgcaaatggcatggatgatgtgttgcccaaaccctcctctgagagatgtaaaacttgaagccaggaaaaagacatggctggtatttggagataggtgaggactagaaaccaggaataagaaggaaaaacaaaactgaaagctgcaaatgggttataaggatttatcgggaaacactgatgg

SEQ ID NO: 240024 - DNA, 179 bp, Homo sapiens
caaggtcaggtccaggctccccagatgtccccgcatcccttgctgcttccagctcccaccactgtcaactcacacccagtccctcaggtctcctttggaaacagttggcttggggaacagtctgccacctctgctctatcattgtctttgccagcacaataaacttatttttataggat

SEQ ID NO: 240025 - DNA, 372 bp, Homo sapiens
cagtccttatcttacgtgacctttaccatccaaagagatgactgtctcattcttgaaagattcttcccttgacttctgttttggctttactccgtctcagttttctttcagaatacattatcttttgcccattcattgaactatcattgtttcttaagagtttgatttatacctttttacgctttctaaaatgtttcaaattagataatattttatatacacatgaatatatgtatcatatatatgttaggaaccataatagccaaatgaattcttgtgaacccaccatccaatttacacactagacaattaccagtacctttatttttgtatattctctgtgaggctgaataatgacacagccacccacca

SEQ ID NO: 240026 - DNA, 496 bp, Homo sapiens
atccatattaatctgacaatcatacagctgtagaattataaattagttgataacttctttcctactcttataattataaattatgcttttaaggtgccaggagagaggagaacaggagagcttcatctctttgatgaagtcagggaaagatttttctgagaaacggatgtcttgagcccaaattgactaatggggagcattaaataagtgaaggggttggtggattctccaggtggagggaacagctagggcacaggacctgtgatcagtgggatcatggttctaatcaaaggcgtaaaggaacactgctgtggctggagcaccaagaacaagggagctgcacagggcttggtccacacagggtcttataaactcagtttaggattttggtcttcatcccaacttgaatggaaacccatagaagttgttcagacatggggatgaaaggattagatttgcattttgaaatttacttggactatgtagttgagctttg

SEQ ID NO: 240027 - DNA, 456 bp, Homo sapiens
tttttgtagatggggtctcgccatgtcacccacgctggtcttgaactcctgggctcaagcgatcctcctgccccagccttccaaagtactgggattacaggtatggaacaggctgacagagctggatccaaagggctcagaatggagcaaccaaggtgtattcacctgatgctttggtctccctaagctcttccatagaaacgatcatatatcacctcggcaattgttttacgatttctcactgtgtttctcagaatggtctcagactcctggcctcaagcgatccttctgcctgagcctcccaaagtgccgggattacaggcatgaaccactgcactcagcctgttttcaaccttatataaatggaatcctactgtatgtgctttttgatatctgggctcctttgctctatattatgtctgtgagattaataaacttgtttgttcagttacgtta

SEQ ID NO: 240028 - DNA, 421 bp, Homo sapiens
tttttgtagatggggtctcgccatgtcacccacgctggtcttgaactcctgggctcaagcgatcctcctgccccagccttccaaagtactgggattacaggtgtgaaccaatatgcccagccatatttttgatgaatctcaagagaaacggaaggggcactgcaaaatgactgattagatttctaattatccgggacgatttctcactgtgtttctcagaatggtctcagactcctggcctcaagcgatccttctgcctgagcctcccaaagtgccgggattacaggcatgaaccactgcactcagcctgttttcaaccttatataaatggaatcctactgtatgtgctttttgatatctgggctcctttgctctatattatgtctgtgagattaataaacttgtttgttcagttacgtta

SEQ ID NO: 240029 - DNA, 289 bp, Homo sapiens
  misc_feature (42)..(42): n is a, c, g, or t
gaaaaataataaattaaatataattttaattagagaggaagngaagcttgagcagatactaacacgatttctcactgtgtttctcagaatggtctcagactcctggcctcaagcgatccttctgcctgagcctcccaaagtgccgggattacaggcatgaaccactgcactcagcctgttttcaaccttatataaatggaatcctactgtatgtgctttttgatatctgggctcctttgctctatattatgtctgtgagattaataaacttgtttgttcagttacgtta

SEQ ID NO: 240030 - DNA, 400 bp, Homo sapiens
aggtacaaccaggaaaaggcccggagctacaaccgggaaacacaggatccagactctcaagttctctacatggctgtgcaaccccatcacagacacttcagtgaagattcagaactgcagcagaaaaaagaaatgtgatttccagagaatacaccgtaagcttcagctcatgtgaagggtatcttctgaagctcgtttccatgaaactcgccctgttaaatatctcccttcccgtgattcgtgagagagctagtctaaaaacaaaaaacctcccctttgctccaggtcggagataattttcctctagttgctgacagtttggtgaccaggcattactgaaaatgtgcacgttgaaccagcagcagatttgtgtttaagaataaactgacaaattttcact

SEQ ID NO: 240031 - DNA, 803 bp, Homo sapiens
aaggtgatgatgggtttccacatgactcttttcaagaccacagccgacgcctttaaaatcatgactggcttatgtgtcgacatgtattctcacactcaaatttcagaataaggcatgaggtggatgtatgtgatggcaccaactctgctttctcttttctagtgaccactcaggccctgcctgcacctattcttactcattttagggctccatccattactctgagccttcaacctgcagctctgcttttcgctgtctgcagatgctgaagaaaggcgtcactaaaggcctcgggctgctggctgcgatcagcaccgatgggagctgccaggatccaacccagtttttaaaaacacacttgatcaagattcacataccataaaatctgcacattaaaagcatgagattcagtagtgggttttagtatattaacaaagttgtgtaaccatcaccccaaaaagaaacactgttccagtagtagtcactccccactccgtactaccctccagctcctggcaatcactagtctactttgtctcacagatttgcctactctgggcatttcatagaaatggaatcctctctgcagccttttgtctctgccatcttcacctcgcgtcatgcttcaagggaatctgtgctgcagcatgtttcagcacctcatttcttagtttggctgaataacattccattgtatggataacaaattttgtttgcccattcattcgttggtgggaatttgggttatttctatcttttggctgttatgaataatgctgctataaacatttgtgtacaagtgt

SEQ ID NO: 240032 - DNA, 365 bp, Homo sapiens
caactggcctccagggggcattgttggaacatgcgatcatcccaaagcatttcagcttgaagaagatctaggacacagtttgttgttaccacctcagagcatttagatgggatgtgatggatggaattgaagttaaaaacccattcaccatttctaggtagtacagtaggctcctaatttacagaaatgcttgtgaaattgggaatcatgataaaatcctcatacctcctcctcttttaaccaaatctttctaaaatgcacaattataatttcttacctttaggaaaaagtaattatgttatatgtgttatatacactatgtaaatatagttcattaaatcattctttggcgtttgaagactttc

SEQ ID NO: 240033 - DNA, 488 bp, Homo sapiens
tcccaaaaatgtgtaagttctgtgatttcttgtactaaaagatatctatttacatagtgaaaggccaggccttgtaaagatcgtgacagtattcaatcctattcttgttttttttgtttcaatgtgttgctagttatcttatctcagtgtattgtatttatataactgcatatttgattaagatacctaacctatgagacatattaacataatgaacacatgtaagcacacaacccaatttaagcataagaacagtatcaataattttgcagttatctttcactctttttcagtcacacagagacaactatactcttaattttgtgtttagagtcctctattttcttaatagacagattgcacatggttaaaggtctatctttacatcaagagagcctgtgtttggatcttgttcaccccgcttatgtctcttttgaagttatgcttaagctttattccttgttcctttatggaaatttgagtatttt

SEQ ID NO: 240034 - DNA, 429 bp, Homo sapiens
ttaattatagcgtgtgaagtcatcaaagagatgaaaaaggtccatctgcaaaattttaaaaaataaattaatccagcaaactccagaataacaactggcctttgaataattctaagtacaatagcttatgttctgtggtggtggttttcgagttcgcccaggaggtggagggcccccgcttctggatgcccagctctgcacatggctgcctgcttgcatgtgcccccttctccctccctgaactctgttttcttttttgtttgttttgtgtttgagacagggtattgctctgtcacccaggctggagtgcagtggcatgatcatggctcactgtagctgcttcaatctcctgggctcaagggaccctcccaccttagcctcctgagtagctctgatcagaggagcacaccaccacacctgagtaactta

SEQ ID NO: 240035 - DNA, 439 bp, Homo sapiens
ctgtcctgtgggttgaatacctgtgtaataagagtacagaaagcaacaaccgagaaaatagatgagagagaaccatcagtgaaataagcccaagaaatgcatcagaattaaagggcatgaatttaaagattaaaaggtatcaccaattatttaataaaagaaaacatagtgtcaggccaattaatatctcaaaatgtcagaacaccatgatcatagacaagatcctacaggcttccaaatgggataggaaaaatgttattttcaaaggtcaggaataagaatgacaccagatctctcaataacagcactagaagctaaaagggaatagagcaatgtcttcaaattcctgatggaaaagcactctcaccctacacaagtatatccagataaaacatcaaggaagtatcaggataaagacatttttaacatgtaaggacac

SEQ ID NO: 240036 - DNA, 465 bp, Homo sapiens
cagttgtatcttagaatagataaaagcctccctatttttcttaacaagttctagattagacaactcagactaagtttttttgtacttcgtttcattctacagggtatccgtggtgactaataataataacagttaacattactgagtgcttactatgagtcgggtacatgatcttacataattcttacattaatcgtatgatgtaggtactaccattacctatgttttgctgtcgagaaaatgttggaagagttaagtatcttaccaaaatttaacattctgggagacagaggtagactgcaaaccctaggaagtcttacctttgctccctaatctctacagagggaaatgcaaattagaataagtgtcccaagtggaagagaaagaacattttactgttcgtatctttaggttacacagctattatagctggaccgtgagtttgactctgaattttctatagca

SEQ ID NO: 240037 - DNA, 729 bp, Homo sapiens
ctagtttattctgtttgggatttgtctggcttctagaatgtgtggggtcatgtctttcatcagtttttaaaattctgcattctatctaagtatttgctctgtcctattcttgcctctcctctcacagctaatgaagcacttaggatttttcactgtattctctacaggtcttctgtttttttttccagctgtttctcccatggtgcactgtgaatagtttctcctgagttatcttccagtttataaactaccccaattggctacattctattacatctatttactgagttttaaagtgcagtttttatgtatattcttgtaatgtttatattcagttcttttccagattagctccacaactttttatcgtatagtttcccatttcctgcaagtacattcacacaccttatttccttaaacaaagaaaacaaatctaatacctatatctgtgagtttgttttcattgcttcaagtaattcttgcctctggaatctagtttccttatatgactactttttactatgtgttactagacatatttgaaaagtaatttgaggcctacaatgaaattacttttccatgaaaagtatttacattttattttctctgtcacctggaggcattactagtgtgggaacaccttaaaggaagctcagtgcttaagattctttagatcactggggcaattctaaacttgcctgttcttttacattggttcttccacctctg

SEQ ID NO: 240038 - DNA, 381 bp, Homo sapiens
ttcccatcccttaacactattccaaaccctccccacttcttcaagctgctaacacctcctattttcaaggttccaaacaggggtatgtggactaagtctggcctctgccatgttttgcttaatctacacatcccacctttattactggcaagagccaagaatctgtggtctcctgtttcctgaagtctccagcaccctctgttgtttcctactccccttccccactccctattgttcccgctccctgttgtttcccagtccttcctgtgttccacgtcttggtctgggtggtggtcagctaagtctgttcagttagtaaaaattcacagagcacttattttgcagttttctgtgagcatgttatataccaggttaaaaaaa

SEQ ID NO: 240039 - DNA, 372 bp, Homo sapiens
ctgtcttatcatacaaatcttcagaacaactttatgaggaaggtgctctgatcatcctcatagtatgtaaacgaaaatttagcaaccacaaatgaaagaacttaagatcactcaactagtaaaatatgattggtgcctaagaaatttgattccaagtctgcatgcttaataactactacttctcaatttagttggttggatgaattaaaagcctgtaaagagaccaaagaatgagtcaaaacgataggaaaataattttgctagcaacatccacaataatttgtggaaatggttctaagtttagtgaatcaaaaggttaaaatagtcctgcctatgggtcttccagagataaacaaaatctgtgtcattggg

SEQ ID NO: 240040 - DNA, 263 bp, Homo sapiens
tactagtgcccccattattctaattctctttttctttcattgtactaatcataattggtagggttttttttacatatatttgtttgcattttctaatgtctgtcttccttatgtgatagatacagtgtctgttttgttacccactatgacatgccaagaatggtacctgatagataattggcctttgctgtgctgtatgaatgaaggaacactaactgctggacataattacagcctttctagaaagcaagaattatcaagaa

SEQ ID NO: 240041 - DNA, 426 bp, Homo sapiens
gaaacacagcgccttaacccaaaagagtgacttatatggcagggatttcagaaattgtgacttgccagcagagaaaatattagaagaaagactctacctgcataggtcatattttatcctactttgtaacaggccatctctgcttttgtgtatcactcataagttcctcttcactctaggtcatcttctgtgtagttactgaaataatcacattcacatacagtttacagtttttatcatgttatctgtgtacctgaagtgtttattacatacttgtcatatcctatctaaactcctcgacctagaattcaaagttcattttaatcttgaagtagatattaaatatgtattagatgaatgaattatgaatatcctaatcccaccaagctgatctgcataaataaagcctgtccattcctctcttca

SEQ ID NO: 240042 - DNA, 398 bp, Homo sapiens
cctgggctcaagtgatcttcccactcagcctcctgagtagctgggacaacagatgcgtgccaccacacctggctattaaaaaacacttttctttcctttaagagacaaggccgggctgggcacggtggctcacgcctgtaatcccagcactttgggaggccgaggcgggcggatcacgagttcaggagatcgagaccatcctggctaacacagtgaaacccccgtctctactaaaaatacaaaaaattagccaggcgtagtggcgggcgcctgtagtcccagctattcgggaggctgaggcaggagaatggtgtgaacctgggaggcagagcttgcagtgagtggagatcgcaccactgcactccagcctgggcgacagagcgagactagactgtctc

SEQ ID NO: 240043 - DNA, 328 bp, Homo sapiens
cgtgtgaagagacctgtcaataggttttggggccaacaggtggtgtttggttatatcacattccagaattccttcctctgagagcgggacaggatcctctctagaatgttgatcttatgacctacagtcaaacaaggaaaatgggaatccacttgaactgtgaaggatacccaagatcacagggaggagaaccccagcaaacagctcctgtgatggtgtctgggtgataaaagatgaccgagcaagacggcccttatcagatgtagaccctcagtcttggacttctcagcctccagaattatgagccaaataaatttattttcattat

SEQ ID NO: 240044 - DNA, 244 bp, Homo sapiens
actgttatgaagattaaattaatttatatatgtaaataagacttggaacatagattttctgtaaatgttagccattgttattgctcctattgacctgaagtataaaaacagaaatgtgaccctggtccttgaccttgggtggcatcaccagataagcaatagtttagggaaaaatgtttgtactgggtattttcattattcaaaatattattaataatgtgctattaagataatgttacaaaat

SEQ ID NO: 240045 - DNA, 341 bp, Homo sapiens
attttgaggaactgcagaaggggttagggctttaacatatggattttgggggaatacacttcagcccataagagcagcattactggcagggcgcgttggctcacgcctataatcccagcactttgggaggccaaagcaggcagatcacttgaggtcaggagttcaagaccagactgaccaacatagtgacaccccatctctactaaaaatacaaaaaattagccaggcctggtggtgtgtgcctgtaatcccagctactcgggaggttgaggcgaacctgggaggtggaggttgcagtgagctgagatctagcctgggtgacagagcgagactctgtctcc

SEQ ID NO: 240046 - DNA, 284 bp, Homo sapiens
ctagcttcatgtcttaaacacactgaattcctttatgatttaagagaggaattagtgaattccttatctttgtaggaaataatactttcagttaaaagaataggtgtgctacctgaactatgtgtttttatctttttattctatagattttatcttgtaaatctaaccatttgacagcatttttctaattcactcttcagagaaaaaattttttaattggaatcgttataaatacagatgtttctaaagggttctacatccatgctagattttcatgctgactt

SEQ ID NO: 240047 - DNA, 672 bp, Homo sapiens
cgggctactggatgaatgtagcaaactcaactagcaatactcatctcacacgtgccacgcggaggattcgccagtcgaacagagaaggtgtagttttccaattcttcagtgctcgtacatacgtcgatattcgctattgcctcaatacactgactgggagtgacaccccgatacgatcagggaagttcctcaccgtggcacgtagtcctccggagatcgcgcaagtctcgacaacggatgatagctctccaagaagtcccatttccgagatgtaatactcaatgcatgcgcttgaaatctcctcagtgatcctcattggtgactaggtgtagattatgcctccaagctgctaggctccatcggaggtcgagatgcacgctacagtcctaatgacgaacggttgcgttgtcttctgccgcacagactggtcgactaggattttcggcaccagaaacatagagacagagttagaatacattgacagtcaattgtttccacagtgctgggaactctcaagctgtagcagggaagacactccttatgtatggagagtcagctgctacgtgagcacctcagaagtcaccaacagcctttgtacaaagtcatacagggatttgaacttcaactcttctaaggtcaaaggaaatacaccaaaagtcaatatttgcattc

SEQ ID NO: 240048 - DNA, 1226 bp, Homo sapiens
agcaggagcagcagcagctccggagcagagaagcgcacacgtgtgtgcgtgcgtgtgtgtgtgtgtgtgtgtgtgtgcgtgtgcgcgcgctgggggcgagcccagcgcaccgcggggaggagggtgcgcttcgcagggcgctcggtactcggtcgggtgccgcaggggccgcagaggctgctgaggcggcgcggatcctgctctgggagctgcgcgccgtggcctacaccctggcgggcgcgcgctgacccgcttggttactccacgttgctgccgccgccgcttgcaaacgcttccagcctccagctccctccttctcctgctcctccttctcttgctccaaacgccaacccagccacagacgatcagccgtcgcggttgcgttcaccccctgcggatcacaacggcagcccttgcgacaccctggctggggagttttattcctgagggggttgcgcaggggctcccttggactcccaccctttcccaacctctgctggcttctccccaacgtggaattgctcgcttagggtaggtaggcacttgccaccctaaaatagatcctctctgtctcctcctgtctgcagccgggcagcccctcagtttgttcctggatgactccctagaccgtcaggctaatattctccatccccctcccctgcctctttcacttgcgctctcgctctgctgtctctttctctctttctctttctatctctatctcaatctgtctttctcttgtcaggagcttctggagctccgctcggagcgaaccttctgctgccagcagataacatcacgatcttgccggggaggggagatttataagttctctctgaaccacgtgtctgccttcaacaaagtgacgtgctaggattacagtcagaagtcctctcgttacttagaccacgagctctccccgaaccgttgagggagtgtggaaatgaggaccgctgtggttactcaaagtcaacattttcatttcggcatgactctgcagccatactgaccagacagatgatttaaactggaaactctgttgaatgtactcccaaacccaagatctctatactgttctctacttcagatgttcctgagttcagaaaagtcacaaagaactttctatcacttttggaatttatacttcagttgtgtatggggcctaggttattagtagagcactgaataaataaaataataatagctaacatatactacacttagta

SEQ ID NO: 240049 - DNA, 665 bp, Homo sapiens
gtgtcttccgaggtgaagcagagagaggcattgcagctttttcctgattccttggattgctcactttgagagaagccagctgctgtgctctgaggacactcaggcagccatggagagctccccaggctctcactgtgccaggacctacttgccagtcctgtgagtgagctaccttggctcacctgtcgcgcatcaatcacctcgcatcatatggcagatgccctgctgcttctcatctcacctggaccagggattgctacactgctctagtgctatcagcttacttatgatctacttcacctaccacatctgtctctgtgcgcgctttcaatactatttttttatctgtcggctcgtgcctaatttcgtccccgctattattgctcatgtctgagatgctccccaccgctcgcattcctttcatcctctctctatggtttctatcccctctgcctctacccgccttttctcatttgcagacttctcttcccctcatctctcttgtctgcaccgtcgctatttcccatcgttttgtcttcccttttctctgtccttatcatccttctcctgcttccccattctcctctccttctccctctttctgctctcttctttcttcccctctagctatctctattccttctcctctgacctcctcacccccg

SEQ ID NO: 240050 - DNA, 413 bp, Homo sapiens
cgtgccaggtgcattccatctaggccatgtgcagaggcttgggtgagatgagttggcagagaggttgggtgagcaaagtgaatgtcaacttgatagatctgaaaagccgccctgggatccttgagtacaatgaaaatactaaaatcatggaatgggtacaaggagtgttttattaggttggttcaaaagtaattgtggtttttgtcacttaaaaaatgtcatggcaaaaaacgcagctgcttctgcatcaatctaatacaccgctaacactttcgtctcatccagggatgtttgtggggagtggccagtgttcagatacatccgtgcacagtagcagagttactccagatcctggaggctctgagtctccaccacatctctccaggccactgatggtccagacatctttgtgt

SEQ ID NO: 240051 - DNA, 516 bp, Homo sapiens
ctatacagcttaaaatgccgatagtgctgaggttgagaaatcctggtttgacatattattcctgtgttaaaattaatatatttaaagtaatttcctcggttgttaacatggcatttttgtcaagcaattttgttttctctgaaacatacctcagattgtttttagtttttccaggggaaactttattcattttttactagagaaaagaacatggcaaacagtgaatctgtgtttcaggaagggtaacgtcgtttttcttttaatttcccttttgaagctctcagggtgctaccaacatcttggaaatctggataatttgagtattactgagggaatattttcattctacatgctacaaatgtttaatcattttatttatctaaagttcctttcttggccaggcgcggcgtctcatgcctgtaatcccagcactttgggaggctgaggcgggtggatcacctgaggtcaggagttcgagaccagcctaaccaacatggcaaaaccctgtctctacta

SEQ ID NO: 240052 - DNA, 156 bp, Homo sapiens
gtatgtgacttagaaactaaacaaacactttgctatccaggaaaatcaataatgctaataatgcaaagaaaaattgcactgttcaagtttaacatgcaagggagactttatttaaaactactacaatagaggagagattgaactgaactccctcta

SEQ ID NO: 240053 - DNA, 1104 bp, Homo sapiens
atactattgatggtgttagtttgaaactattacatgtagtaggatataatgaaaatctaattatgttaatgtcactggaaaccaacattttcaacataagagaaaagagatacgaatataaaatcaaagaagaaaaaactactatcagtatagtcttggatttggaaacatctgtataaactcatgatgcttttttctctttaaaaagtattctctatttctaacttctaaaaaggcctgggaacaataactagccctgtgatgctgagcacctctagtacccgcttcaaaggttctaaatgtatttcctattaaaaggaacaagggcttcttggagaaatggctgattctgggttcgtggcaggaaatgcataagatgggttcagaatattttgtcatacaaaaagcaagttgtcagcactactaacgttgtgtttaaaggacataaaaaccaacttgaggactgtgctgcacaaagatggggtattttaagtatcaaaaagaataatgcctacgatggattgaaacatacaaatctgaaacttgtgtttcaatctatgagtttataatgatactaagagcaaacaaacaagcaaacgtgtaggtctgttctgtaggttggtagcttatcaatgtattattctgaaaggcaggttaaaaggaaaagaatctgtctttcctatacaaactgtatttcagagtaactaaatagacaccgaggaaaattcttctttactgaactccagccaataaatgaagaaggtatcacagaattaaatatcatcattttgcatgccctaatcaattaatgcctgtaggcctggggtgtccaatgtggcagccactacccacaagtgcctactgaacatttgaaatgtggcttatcggaattgatatgtggtataagtgtaaaatacacactagatttttgaagacttaatacagaaaagaaagattgtaaaatatcttggtttttatataatatttttgatataacagattaaataaaatatattatttaaattaatctcagtatttctgattacttttttaatgtgcttactttaacattaaaaaatatacctatatgctttgctttctatt

SEQ ID NO: 240054 - DNA, 491 bp, Homo sapiens
atactattgatggtgttagtttgaaactattacatgtagtaggatataatgaaaatctaattatgttaatgtcactggaaaccaacattttcaacataagagaaaagagatacgaatataaaatcaaagaagaaaaaactactatcagtatagtcttggatttggaaacatctgtataaactcatgatgcttttttctctttaaaaagtattctctatttctaacttctaaaaaggcctgggaacaataactagccctgtgatgctgagcacctctagtacccgcttcaaaggttctaaatgtatttcctattaaaaggaacaagggcttcttgtaaatatggtgttagtgtttgaccctactcctggatagttcccaacatcttccctgtggcaggtttcctggctgagcccgagcctccctccctgtttattgtggtcatgatcagtatgtgtttccatataaaacttttctcaacggaagtatgtagt

SEQ ID NO: 240055 - DNA, 378 bp, Homo sapiens
aagtattgtagaaaaactatatgaccacttctattggagtcatattttattttggactaaaaagctgtggcaaacattcagcattgcttgaaatccatttatatacccccaatttatttactatttgatttcccatggtaaatgatccatagtctcctctcttttctcaagccacctgaaacaattgcctcttcatcaacagataataagtctccattcacacaaaacaattgagaccagcagtagtgagtttcctatacttctttccagcactcctcaacattatctgtatctatactgatttaagtctttagtttagtcttcagtggtaaagtgttgctttcaaattcaggttagctttaattctttcattttccc

SEQ ID NO: 240056 - DNA, 352 bp, Homo sapiens
ccccagccagcccctggtcacacccctgcatcctcacaccttagagtcagggcccagccagccaccttcaggaccctggtcagctccgccagcccacagcctccgcgggtcaggaagggaaatgctgctgttttctttgctggcctggcatgttcctctctctgaagctgaaccacaggctgtctcaggggaatgtgtcccttgactcagccaggaggcacctcccaccctcatggtacagctccaccttccccaggctggcttctgataattgtgctttcggaatcttgcattggaggccagttatcctaatgtgttgggattttggaaaaaagcctcagcaggtgaaatc

SEQ ID NO: 240057 - DNA, 625 bp, Homo sapiens
cacaaagtaaatagccagtaaatggaagctgttataatctattattagttatcattgattaggtcttattgttctccagatatttcatatatgcatttcatttaatcaggcacttcaagtatagcatctcatttaatcttcttaccatccctctagatactgtttaaagagatgatgcttaaatcacatagctagtaagtgtcaaattttgaacatgatcatcctgatgcccaaagttcaaacagtgctcttttttatgaagccatcatcactatggcaatactgataccactaatgagtcaatcaaactggtattactgatcaccttccatgttgtgtaatccagtttaaaaaagggtgatatttcctctactgttcaggaacatagagcttaatgaggccatggaataacatccacaaaacaatatcatattaatataagctctgcgtgatgtgaagcatctatgatatggactctgagtgtcgcagcacttagcaagaatatatggagtggctctcgccaaaatgcctcatgcaatatggacttaagggagaaaaacaagttaattgcccatcttcatatttttcctttccagagttctttcagtcaacaactctttggaag

SEQ ID NO: 240058 - DNA, 344 bp, Homo sapiens
ggactcagtcctaggccccagggtccctctaaatccctccaggctgcagctctgtcaagagggatgtccagagggtctctaagaccctgaagcttgactttgcaattgcatgacaggaataaatatcacagctcctctgacatcactagtgcagcgtggctccccatcccactgctgccctcgttcagggacaggctgaaggggccaacgaacccaaccctcccagaggagggagccttgctccaccactgggcacacagagtcatccaccatgccactgccttccacaagggatgtgagccgttgcactttaaaaataaatgactgtatattcatcatacaaa

SEQ ID NO: 240059 - DNA, 334 bp, Homo sapiens
ctcccccatgatccaatcacctcccaccaggtctctccctcaacacccgggaattacaattcaagataagaggccgggcactcacctgtaatcctagcactttgggaggccgaggcgggcagatggcctgagctcaggagtttgagaccagcctgggcaacatggtgaaaccccatctctactaaaatacaaacaacaacaacaaaaattagcgggcgtggcagcgtgtgcctgtagtcccaggtactcaggaggctgaggcaggagaagtgcttgaaccctggaagcagaggttgcagtgagctgagatcgtgccactgcactccagcatggc

SEQ ID NO: 240060 - DNA, 214 bp, Homo sapiens
tcccaagccacaaccctgaagttaagcccacttctatgaggacagctttccaataacagccagttctaactgcaaccttgcaagtagccttacgaaactgcaagcttgcagtcagtgccgctcctgtgaagaccctctcctagtactggccagtgcacactttgccacctgtgataagccctgtaaccaataaacttttgtttcaaaacctgca

SEQ ID NO: 240061 - DNA, 543 bp, Homo sapiens
gagtgcaataaatgcttttattagtccttttattaatgacggttggtatttgttgagaagctgggacaatagttattccagtaagaggatattaagctccctcaaacaggccctgtatatctaacaggctctggcccccagcctcccctgacgcagctctgttacactgcagcacacccctggcctcccagcaactccaagaagggagaggagggatgggggaggtagggataatctggtgtcattaaacacacaggcctttgtggaggttaccgtacaccaacagcaggaagctttttcttccttctgagagcatagggagcctatgtgattttgttttttttttgtttgttttggtttttttgttttttgctacccctgtgctcctggctattttacctccagagctgctggtgataagttggtaaaggaggacctccttaaaccatttgttaaaccatttgagactgttcctagtacttgttttaagctattttacatgatttttaatgtaataaacacatttataatactaaaaaaagg

SEQ ID NO: 240062 - DNA, 517 bp, Homo sapiens
actatctcttgaacgtgaaaagttattgatgcagtgaggtcgaatgcacacctactgcttcctaagctctggaacatgaatctccttcctctgtcatctccccagaattggaacctccttaatccaaccatctcactattggtcagtctagtgattgagaaataggaaaagccacaggttgaaatgatgaaatgtcattacactgaaagataataccaaagtacaaagtcctaggcacagtcttgtcaattccctcttgtctaagtggtgtggcaaatattattgtcacttttcagagaaaactgaggtgtagagaaataaataaatgaagttttttacagtcattccacaagttactgagcaagtcttagaagccctgactccccaaaccacaaaatctcctttgataatcattgctgccataacaccttcttttactgctttcctccttgaatccagagaacacatatttataatcattttaagagcctgaggaaatgacttcagcctgtgcaaa

SEQ ID NO: 240063 - DNA, 431 bp, Homo sapiens
gctgcagtgagctatgacggtgccactgcactcccacctgtgtgacagagcaaggccctctctgaaagaaaaaaaaaaattgtcctagattaagaaccactgggttatttcaaggactaaagaagttgatttaggccagatgcagttgctcacgcttgtaatcccagcaccttaggccaaggtgggtggatcacgaggtcaggaattagagaccagcctgaccaacatggcgaaaccccgtctctactaaaaatacaaaaattatccaggcatggtgacacacacctgtagtcccagctaccaggaaggctgaggaatgagaattgcttgaacccgggaggcagaggttgcagtgagccgagatcaagccactgcactccagcctgggaaacagagcaagagagagcaagactccacctcaaaaaaaaaaa

SEQ ID NO: 240064 - DNA, 156 bp, Homo sapiens
ctgcaaaacctgcttttcttccttaacccctagcatttttatcctcttagctacagacaggtttccatggcgttggttaaaaattaaggcctattgagaccatagtatttgctttccagtgagtaagaagcaagaactttaggattaaattcagca

SEQ ID NO: 240065 - DNA, 698 bp, Homo sapiens
ctgactctaaaaataaataaataaaataaaataaaacatctacagtgaactctggtgggtaacagggtctttggtccaccgggcagtctgcttaggcagaaatgacctcacagaccgcctgagctcatcctctaccaccagaaactgcaccaggattagcaatttccaaagaatgtagatactcctcacagaagaaacagcaaccaatgtaagaatgcttccctggtgatacaggtactaagtcaggatctaacgtgatctctgatgctccctatgaaaagaatcactgtggaatatcccaaactacagaagagctgtgaggcagaagcacctctggactaatacgatcacaaaccctttgagctgctttttacaaaaatactagttttcagctgcttctttaatttatgctgcatacatgagtaaatatctttttaaattttttaaatgaacttttcaaaagtacacaaaaataaaacagtagaatgaactccatgaacccactggtcaacttcaacagcacatctggcttcttccatgatccccccccaaatacgacacattgtatccacagtttgtattgttcttcaaaaaataaggatttttaataatataaccactaataaagtaggaattgccttaattgcagatgtgcaacccgcagatatgaaggcccaactgcaatgtgacacacgaga

SEQ ID NO: 240066 - DNA, 575 bp, Homo sapiens
cagtttttttaaactgtatttccactgtatttgcataattagggtaaaaaggatgtaatgagttagtagcaactcattacagcaactagcatgggtccttcttattgggcaactaaatagtgttacccaaatttaacagctgtccacatagaacacttaaacgggattgaatggctgagaaggggaggctagctatcaggctgtgtgttttcttttctccaaagctgccgattggtgactgaatgcagctttggaccatgccctgacactgcataaagggctctttggagccagctctactctaaacagcgtgctccgcttttgttttctccttcatctcaaacatatacctgtctcctctcccatgttacctaaggcaaagagagttgataggattatagtatcgttaaggcaacttaacttttctcaccattttaaataaaattactattaaaaatccacaggaagaaagtctatgaaatttgcagtttactttttaatcagatattaaatttcacttcattacttcacaatttaattttttcagtgtctctaaaagagagggattaaaagag

SEQ ID NO: 240067 - DNA, 285 bp, Homo sapiens
gatttatcattaatatgaacattattccaattttaatcttatattaaagagttcttagattcattgacatgcttgccaaaatgctaataggtaaggtctattaaaatgcattatcagccttttcatgatctgtgtagtgctgatgaaatatcacatttatgagaaaaatctccagtgctttcaagatccctaggcagctctgtcatattggcatcaactgggctgtgtgcttagtttccttgattattctgaaatccatacattcatacacttagcttgtcatgc

SEQ ID NO: 240068 - DNA, 646 bp, Homo sapiens
tccctagtcagtgtgtgtgttttgaggcagggtcttgctctgtcgcaaaggctggagtgcaatggcacagtcatggctcactgcagccttgatctcctgggctcaagtgatcttccgacctcagacccctgagtagctgagaccacaggaatgtactaccacattcagataattttaaaattttttgtagagatggcatcttgctatattgcccaggctggtcttgaactgctgggctcaagcaatcctcctgcctcagcctcacaaagtattggcattacaggtgtgagctactatgtttggccgtgtgtgtgctttctaatgcctattgaaggtgtgttttaagtgcttatggcagatgtctgccatgcaatctaaatggcaaaccaatcagctggatcagtcttacttacaacacacctggcctgtccctcaacttttctattctttcaccaaaatggaagttccttatgttagagaacttacagagaaaaggaagacaaaggaaatgattaggttcagtgcttagaacttcatataatgagatacaaaatctcattactgacccactctgccagctagaagagcacttgtagatcatggacatttaggtggggatatagccacctttgatcctttctgttca

SEQ ID NO: 240069 - DNA, 462 bp, Homo sapiens
gtagtaaagccacaatgaatgtgtgtagaacattaaaaaaaattaagatttctttaaataactgtttggtaataagtgagaagactttttttcctgtaatttttcttcgatttttttttctttagtaacagaaaaaatgttgatctaggcaactcaggcaacaaagtgatgtcctcttccccaccccacaacctccaagtgtcccttcaatattacctcaacttgttgtttgctttgtctgtgggattgtgagcatttgtcctttctatttaaggttatgtgtgatgattttcttctatgaaaaaaaaaaagcttctcgcaagaaatggtttgctgaagctggtgaaatggactggttttgttgacaaatagtcttggtctgaattgctgacatttctcagccttttgctgggttgcacaacattgtgcaactttatgtggaaataaatgagtttattagca

SEQ ID NO: 240070 - DNA, 1398 bp, Homo sapiens
tgaacaaataattcaaaatgaaactaagaaaacaattttatttatttataatagcattagaacaaaatacttatggataaattgaaccaaagaaatgcaaaacttacactccaaaaacttaaataattgttgaaagaaattaaagaataagtaaatggaaagaatccaatgtttatggtctggaaaagttaatattattaagatggaagtagtcctaaattgatttacagattgaatgcagtccctatcagaatttcaggtagcttctttacgtaaattgacaagtgaatcttgaaattcatatggatgttcaagggacttagaatcacgaaaacaatcttgaaaaagaacagtgttataggactcacagttcttcaatttgaaaacttactgcaaagctacagtaatcaagaaagtaaaatactggtgtaaaaagagacataggttgatggaatatagctgaagttccagaaataaaccctcacatgtatgtatggtcagttgcctttcagtgtgaagaccatttaagatagtcttttcggccgggtgcagtggctcacgcctgtaatcccagcactttgggaggccgaggcgggcggatcacgaggtcaggagatcgagaccatcctggctaacacggtgaaaccccatctctactaaaaaaatacaaaaaaattagccaggcgtggtggcgggtacctgtagtcccagctagtcgggaggctgaggcaggagaatggcgtgaacccaggaggcggagcttgcagtgagccaagattgcgccactgcactccagcctgggcaacagagtgactctgtctcaaaaaaaagaatagtcttttcaacacgtgctgggacaacaggctagcaataataaaaagaatgaaattggatacttcctcaaatcatacatagaaatgaactaaaaatgggtcataaacctaaatgtaagagctaaaactataaagcacttagaagaaaacataggagtaaatcttcatgactccgtgttagttaggcaaggccttcaaaaaaagcaacaaaagcacaatcaacaaaagaaaaagtagataagttggatttagtcaaaagaaagaacttctgaaatttaaaccatcaaaaaagtgaaaggtcaatcgacagattgggaggagatatttgcaaatcatatcttaaaaaggatttgtacccagactatgtaaagtactcttacaactcagtaataaaaaggcaacccatttttaaaatgagcaaaggctgtaaatcagtagttcttcaaataaaatgttcaaatggccaaaagctcatgaaaaatgctcaacagcactagctgtcaaggatatgcaaatcaaaaccacaaggaaataacacttcatacttactaggatggctataata

SEQ ID NO: 240071 - DNA, 450 bp, Homo sapiens
tccagctactcaggagactgaggcaggaggattgtttgagctcaggggttcgaggctatgtagtacataatcacacctatgactagccactgcattccagcctgggtaacatagcgagcccctgtctcttaaaaaacaaaagatgtggccaggcatggtggctcacacctgtaatcccagcactttgggaggctgaggtgggcggatcacttgaggtcaggggttcaagaccagcctggacaacatggtaaaaccctgtatctacaaaaatacaaaaaaaaaaaaacacaaaaaaattagccaggcatgtggtggtggcaggcgcctgtaatcccagctacttgggaggctgagccaagataattgcttgtacccaggaggcagaggttgcaatgagctgagattgcgccactgcactccagcctgggtgacagagtgagactctgtctc

SEQ ID NO: 240072 - DNA, 215 bp, Homo sapiens
cattagaagaggtaaagcttagtaatggattacctgctttttcatatgaaaataaattttaataaaatgagagtgcagagtaaaattcctgaacttgaattattataatattctaagttgtaatttgtttagtattttttatttcaaagttacattctatttcaaagggagagaaaataattttcaaataaatatactttaagtttcttcattta

SEQ ID NO: 240073 - DNA, 909 bp, Homo sapiens
ggaagttggaagactagcaaatgggccaatttgaagggagcataaagtcaggagatgagaatagtagggtggtgggaaggataggttttgaggccattaaatataagttgaaaaatggggccccactttcataggcccaatagtgcttcaaaagggaaatattggtgggttttgcttttcaacaagaacttaatataactagttgtgttttatagagataagcctggaaggggggattggaggagagcaatggttctctgtacattagaatctcctggagggctggtgtctgagtggcaccaccaaagattctgattcagctgttctggatcagaatctacagctcacacctgtaatcccagcactgttggaggcctaagccagaagattgcttgagcccaggagttggtgacaggcctgggcaacatagcaagatcccacctctacaaaatgaataaataaataaataaataaataaaaaacaaaatttgagttggtaatttataaactatggtgtctacctaccagagatttttcgttataattaaaatgtgatatggaataatgtattgtttggcaagctggcttcagggttcccaggtaaatagataaataaggaagtgcataatgtaagaacagtggctgacagtagcagtggcattttttatttttaagagcagacatggggtaactggttaaggtattgcagtaggtcagagaggataacagggacccaaactctggaaccccagggatgagggagaagtcaaaggtgctaccagagtttgtgccacagctccactgtcccatggttgtagtttcatctactgataaagcagtgcaaagaggaagcgtgtggtggctgagatgggagtgagatttgaggaaagaacgcttatgggtaggaaa

SEQ ID NO: 240074 - DNA, 343 bp, Homo sapiens
aaaatcagtcttccatatatgtgtgggtctgtttgtggattttccattctgttccattaatctatttgtcctgataccaataccatattgtgttgaccttctgtggccttaataataattaatgcaatcaggtagtcttaattctacaactttcctcttattcaaagtttttataactactctaggtcttttgcattttcatatgaattttcaaatcagttcgctaatttcttcaataaagtttgctaggatgttgattggggttgtgttgaatatatagataatttcagaagaattgatactttaactgtattgatttttggacccgtgcacatatatctat

SEQ ID NO: 240075 - DNA, 223 bp, Homo sapiens
tttctggagagccttcatacaaatttacgcatcatgtgatccacaagacataatttcatcttcattaacaaagaccttcttgttacatatctcagtcatctgagttctatcatttgttttgacctagaaaccctaatggaatgtgtaattatactaagaagagaatataattcagtgataaaaatttatctctaatatgattgtttattacagtaaaatttct

SEQ ID NO: 240076 - DNA, 360 bp, Homo sapiens
tcatagcagtaaatagtgaatattgagcacttagtactactttttaagcactttacatgcactgtacatgggtattataatagcttagtctttataatctttaaaatatgaggttaaagagaattttagagctgaggtaataaagacatagaaatgaagtaatattccaaggctaagcagcaaagggcagagttcacacccctgactattatattaattgactgctagtaccgtaacttctaattgctacagtaactggtttctgccgtttgtttctttctgtttgctgtgtatacacaaagatgaaatggtctggttccttcctactttcagcttcatcacacttcactgaaaaaggtc

SEQ ID NO: 240077 - DNA, 442 bp, Homo sapiens
ggcagactgaagccaacagtgtgtgagggtattgagcctgatatgtaaactattttgatgtcacttgtcaaaaatagccatctgtactctgatatcctgtaaggggaatgactttggttataaggttataaaaattaggagtatggctgggcgcagtggctcacgcttataatctcagcactttgggaggccgaggcgggtggatcacctgaggtcaggagttcgcgactagcctggccaagatggtaaaaccacgtctctactaataatacaaaaattagctgggcgtggtggcacatgcctgtaatctcagctacttgggaggctgaggcaggagaatcacttgaacccgggaggcagaggttgtggtgagccgagattgggccactgcactccagcctgggtgataagagtgaaactctgtctcaaaaaaaaagaaaag

SEQ ID NO: 240078 - DNA, 363 bp, Homo sapiens
tgaaagaatttaaaattaagagaaacttaaaatatacatatacaataattttgtaataaatttatataaacaaccaacttgtaacataaagcatggtgacctttgtttttataaataggaagcaaagctctgttgagtccagagaagaaatgatgaggaactggcatttgaggtggatctgaaataatgtgtaagatttggacagatggagaagtcaacaagtcacatggtgacctatattatgaagttagcagaatctgaggattgggagctgaccaagaatgtggagtgggttgttaagttagcagagaatatgactaaaatagagaaagaagaattaaagagctatgctgcactgaatat

SEQ ID NO: 240079 - DNA, 591 bp, Homo sapiens
  misc_feature (354)..(354): n is a, c, g, or t
cttttctgtttgttggccagtccccccttagatcatgtgtttttataaaatgtcacttgggtttcttgttgaaagaccaggaggtgacacagctatattatttgctgtctgagctcttctgaactgaagaagagatgcacagtgggcattcactgatagacgctggaagaaatgacatgattaatcactgatcttgatgtgcatctgttatttatgatttgtgggttgaaaagctagcagtaaagtttgcattttatgcagttacagttaatataccatggttgttgaaatttgaaccatgttgttgagagactggtgtctttaagctaagctaactgaaatcagagcatattngagcagagcaaaagaaggaccgtctctacttccatttccccttcttagccattgtgctattattctcaaggagaaggagggaatcattttatttctacatatgttataaatcttacaatatgttgttattatttttgctttgaactatacctttaaagagatctgaatagaaacaagaaaagtctttatatttactcacataattactatttctgcaacatagacctcatctctact

SEQ ID NO: 240080 - DNA, 476 bp, Homo sapiens
cggtagcgccgagcgagtcacggaccatgaagagcgttcgtgccgcgcggcccaaggccgggatgggggttagccacatcctgccgcgctgagggggaggctaacgggcgcgggcggccgggcccagccggagcccaccgcgatggcgagggaggagtgcaaggcgctgctggacgggctcaacaagacgactgcgtgctaccaccacctggtgctgaccgtcggtggctcggcggactcgcagaacctgcggcaggagctgcaaaagacgcgccagaaggcgcaggagctggcggtgtccacctgcgcccggctgactgctgtgctgcgcgaccggggcctggccgccgacgagcgcgccgagttcgagcggctctgggtggccttctcgggctgcctggacctgctggaagcggacatgcgacgcgcgctggagctgggcgccgcgttcccgctgcacgcgccgcggcggccgc

SEQ ID NO: 240081 - DNA, 734 bp, Homo sapiens
aagtgatcctaaaaattttcaggaaaaacatctaacaatttaaccataaagagctttggtgaagtctgacacccagtatttagctcttttgctattattcttttttttttttttttttttttttaagatggagtctcactctgtcgcccaggctggagtatagtggtgcgatctcggctcactgcaacctccacctcccaggttcaagcaaattctcttgcctcagcctctcaagtagctgggattacaggcccaggccaccacgcccagctaatttttgtattttgtagtagagaccgggttttgccatgttggccaggctggtctcaaactcctgacctcaggtgatccactcgcctcagcctcccaaagtgctgggattacaggcgtgaaccactgggcccagacttgttttgctattattctttaataactgtttgcaaactacaaatattgaaaggtgagcatatgtacaaagacaaaattaactagtagtctgagctgaaatattgtagcttaattctagtctatcaattttgatctgaaataataactctgagggcagttttgtcaccatcagcactcattccaatattcaaaaggaaaatttttgtttaatttatataacatcttacttatagatgctttacttatagaaagcacctatcaattataattagcaaaacaggagtcaagggcattgttttattgtgttacatgtcaaggaaaggaga

SEQ ID NO: 240082 - DNA, 383 bp, Homo sapiens
tgcatgttaattcttccataaattatatagtacaggataaatgtgtcaatactgctttcattaaataattttaaaattcatttgccaatgcaaaaaacaaagatcttttttaaagaaaaaaaagttatgcaaagaacaaaatccattttccaataaagatgttaagaccacagtgaggaaacaaaaaatattaaaattatttgtcaatgaaaatctggtattcactatatttttctgttaatatgaatgtctcagcatcagttttgttggctcacaatatattcatgcaatttcacaggatgtggcctacaagttaacttttattttttaccaatgaagaaaagacagaaatctaatattaaataaagaaattcgtactaata

SEQ ID NO: 240083 - DNA, 385 bp, Homo sapiens
tcaaagcaaatctagaaaatattcttagaatatggagtcggatgttgttttctacgggccataccattactacttattttataagccattttatcttaacaattttctgaagttttttaatgtttccattcccactaacaatttcatgtcttgtaaactgttcaaaccagtaatatatgtactattttgtatctttgctaatatcacttagaaaaaattagaacctgataagctcaagtttcataaataatgtaaacacaagataaaatgtcacagtgccaggctgagacaggagaatggcgcgaacctgggaggcggagcttgcagtgagccgagatcgcaccactgcactccagcctggatgacagagcgagactctgtctca

SEQ ID NO: 240084 - DNA, 1393 bp, Homo sapiens
tatgcatgttttttgacagttgtagtcagaaagcagaattaagtttggggattagatcataatcccaaaacatacaatcacaaatgttgaaatcctgacatccaaattctggggaagtgattagtgtgttttgggttgcatgcaggatagttgcatcatgtcagttgtatcatgttaggcacaactattaccatgttattgtctttatttggaaattaaatatggcttaaggagatgcgtatgagtgccaagctgacaaggggtggacttgtggacctaattttaggtatcagcttgaccagattaaggaatatcagaaacctggtaaaacattgttttgttttacacattgagggtgtgtctatgagagtgtttccagaagagattagtgtataaatctgagtgtactaggtggagactatctgccctcaatgttggcgggcaccatccaatcagccagtggccaggagagaacaaatacttaagacaaaatgggctgggatcggtggctcatgcctgtaatcctagcactttggaaggtcgaggtgggtggatgacctgaggtcaggagttcgagaccagcctgaccaacatggcaaaaccctgtctctgctaaaaatacaaaaattagccaggcgtggtggtgcacacctgtggtcccggctacttgggaggctgagacaggagaattgcttgaacccaagaggcagaggtcgcagcagtgagccgagatcacgccactgtattcagcctgggtgataagctgagactctgtctcaaaaaaaaaaaaaaaaacaaaaaaaaacaaaaaacaaaaaaacgcaaaatagcaaaacggactctctgggttctgctgcttggatatcagaaatctgactccatgaaagtgcattatcacaatactgactttgtgtataagcattgagtgtgtacataaaatgttgaaacttcctcgataaatgagatatccttttcgtacatctgcatttgtgaaagataaaatttcttgagatctcagctctttgggtgactgcatatgcagtggtgacccagcacagtttccatcaatctcatcaaaagacttgaggttgttgggcacagtatttcagatgaccagagttaaaaagctgggtatacacaattaacaaccaaagtgatatgcatttatacctttccctttatgaccaatttctttataaatatggctcatctgctcataactgttagacccacccaaatgttattagtaacctgagtgtttatgcttgcaaaaatgtatgttattattgtctgttttattatattaagtggtgtataaagtattctgttgtgtttttatgtttctcaaataagttcccctttaaaaaataaatatctttaagtttttaaaact

SEQ ID NO: 240085 - DNA, 2291 bp, Homo sapiens
cttatctcccttgatcttgtacttcccagtctccagaaccataagagatgaatttctgttgtttctaagtcacctacctacattatggtattttgctagaacagctcaaacgaactaagacatatataatggacttatgtaatccatcgcctattactaggtattttgatttatagtttatttgtcctctgttatatcagcactgctgtgaacttcatctgtaccaaaatatttccatacagtctcaatgacttgtttgggataattttttgaataatatcaaagtgtgacatttgaataagagaagaggcacagtgttccaagagctagaaggtgaaggtaagccttgcttccatcctgcgatgtagcttcgtgtctgtgaatagcaagcaacttcagatgaataagctatcaacatactggaactcggtggtgcagcttccttgtggggatgactcttaggaatcatctggattttctgaagaaaacaaatcatttgggttctggccttcattgccctgcccagcgggagtccccgaagggctgtgctagaatttcagagcatggttggcacagcgttggtgaaggttacaggattgtctagacaaaagggcccaggggaggcacagaggctctgttagtgggtggaagggatgatgctgtgtgtatgtattgagccacaccctggatttcagtaggagccagaataattctgaggcttgggtgtgggcagctgtgctaaacagggaactcagggtggtttcaagccagtacagagctaggacctgggatctaagattggagcagacacacatggagaagcagatagcggaatcaggatcagctgtctgagtgggaaggtcttagagaacccttgctaggtgttcaccaggaagatgcccacacctgtacactggatgggggtgcatgttcctgggccaggagggaccacgctgggtgttctgcttgctgagacagtggtttgggtggaggttcccattcctggaatgcctagaactttgctgcttggcccagtatgttctgggctcccccatttaaggcaactatgaccactttcattgccaccacctcctcctagcttgaaacaacctcccctgctttgctctatctgtgccacaattaaggagcttcccattttcttcattatattgcgggtagttatatgtgtatcttaggaaaagtagtatggtgtgaggaaagcacccaaggactttgagtccactgcctcttcacttaatgttctggctcctccaattgctgcatcacccttgggtaagctaattaacttctctgagcctgagcatccgcatttattaaacagggattagatacttacctcgcagggtggttgtaaggattagaagtaatgacatataaagcacccctcccacaatttagtgtctggccagatggtgggtgttgagattgtccgttattactgaggacttaatgtggtctagtctgtaagggttgacagatcattgtggcagatcccagacatgcttattatgttagcagtaggggccctgaggtcaaaaggcttaggacagctatcctgcctcccagacctgggaggaaaagagagagaaagaggggctccagggcagttgtcagagttaggaaggtgctgagtcgccacaggcatcagaggaggattttctgaatgggtacagtgaggacccagtggtgctctctcctcaaacctacctgttgggaaccagatcagcccagcaggctggtagcagagccatggcctgggaacctgggtcagcctcactgtcttagctccagactcacccactccctttgcaatgctgtgctgtgtagtggtaaagcctgcacacgctaggtcccattcctgcgccattcttcctgcttgtgtgacctcaggcaagccccaaacagccttgtgactcaatgttctcatctgtacaatagggattatggcacctatcgcatagggtccttgtgaggatcaaatgtttatttatgaaaagcatttagagactgggcacggtggctcacgcctgtaatcccagcactttcggaggctgagtcaggtggatcacttgaggttaggagtttaagaccagcctgaccaacattgtgaaaccctgtctctggccaggtgtggtggcacgcacctgtagtcccagctatttgggaggctgagtcaggagaatcacttgaacccgggaggccaaggttgcagtgagccgagatcgcaccattgcactccagcctgggtgacgaaagcaaaactccatctc

SEQ ID NO: 240086 - DNA, 506 bp, Homo sapiens
atcattctgtcaacatcatagagtgtacctacaaaaacctaaaggggatagcctactacccacctaggctatacagtgtagcctattccttctagactacaaacctatactggcaagttacaatactcaatacagtaggtaattgtaacacaatacgtatttgtgtatctaaacatagacaacatagataaaactataatcttatgggaccattgtcatatatgcagtctgtcattgaccgaaatgtcattatgcggtagatgacagtactgctttttagatgctgctttttttcctgtttgtattctgctctaaccttcctaaatctcataaaattcaaagtacacagaatggtttctaagtactaacttttaaatttttcaagtaaatgaatctgtttggctaggtaccatcccttcggttcattcaggttggcttatttctgccaccaattctcaaattcttattttcctgttctttcctgaagtgccccgccacactcctgt

SEQ ID NO: 240087 - DNA, 200 bp, Homo sapiens
tttttttgagatggcgtctcattctgtcacccagtctggagtgcagtggtgcgatcttggctcactgtaacctctttcttaatctttttctctttctctcattagcacctggggctgatggcttatgaggaaattgttatagtcttttagtaggtaagttttgtccctatagtccccttctgtcgtcttgctttcttttt

SEQ ID NO: 240088 - DNA, 442 bp, Homo sapiens
cagtgtataggagtgcttattcctcacactcataccagccctgggtgttactaacctttatatatttgccagtatcatattcagacatagtatcttgttttaatatgtttctctgattactgatgaagttaagcaaattttcacgtgtttattggccatctgtctttcttttttcatcctttctttcaagatgggagtctttgccatgttgcccaggctggactcgaactcctgggctcaaatgatcttcctgcctcagcctcctgagtagctgggactataggcgtgagccaccatggctggcttgcccatttgtatttcttatgtgagtattttttctttttttttgaagtggagtctcactccatcccccagagtggagtgcagtgagtcaagattgtgccagtacactccagcctgggcgacgaagcaagactgtcta

SEQ ID NO: 240089 - DNA, 244 bp, Homo sapiens
cagatccttaatattgtgtgattttccaaccttaacatgtctttctgaaattgtctattaaagcagaggaaatacctgccaaaggaagtatgtattgcattaatcaggacataactaatattctcctgttcagaataatacttatttatgtgtgaaagcaacagggatgtgatccccaacacagaattttcatgaccttctattgtatacaaataagtacataacagttacttggttagacatt

SEQ ID NO: 240090 - DNA, 276 bp, Homo sapiens
ataaagtattttataaagtgtattttcctatcaccttctcaaagaaagtaggtggaacttgagcttgccaaatcttctcagttccttagtgtaattaccaaagtacattgtttttgagtccagagtagtagtatacaaagttgttagtgtctgagaccagagctttagaccactttcccaggccctctggcatccaactggtaatcacattataaaagatggataaaagacttaattgattgagcatgaaaacttctcttgaagtacaaattctaa

SEQ ID NO: 240091 - DNA, 1704 bp, Homo sapiens
gtcccgagcaaaaacaagtgtttgcaaacccaagtccaacccagaaatcccccgtgcagcctgtagaggacctagctgggaacttatgggagaagttacgtgaaaaaatcaggtcttttgtggcatattctatcgcaatcgatgagatcacggatataaataataccacccagttggccatattcatccgtggtgtcgatgagaatttcgatgtgtccgaagaacttctggacacggtgcccatgacgggtacaaaatctggcaacgagatctttttgcgtgttgagaagagcctgaaaaagttctgtatcaactggtcgagattagtaagcgtggcctccactggcaccccagcgatggtggatgccaataacgggcttgtcacaaaactgaagtccagggtggcgacgttctgcaagggtgcggaactgaagtccatctgttgtataattcatccggaatcactctgtgctcagaagttgaagatggaccacgtcatggacgtggtagtgaagtccgtgaactggatatgctcccggggactgaaccacagcgagttcacaaccttgctctatgagctggacagccagtatggtagcctcctgtactacacggagattaagtggctcagtcgcgggctcgtgctaaagagatttttcgaatccttggaagaaatcgactccttcatgtcatccagagggaaacccctgcctcaactgagctccatagattggatccgagacctggccttcttggttgacatgacgatgcatctgaacgctttgaacatctctctccaaggacactcccaaatcgtcacgcagatgtatgacctgatccgggcgttcctagcaaaactgtgcctctgggagactcatttgacgaggaataatctggcccactttcccaccctgaaattggtttccagaaatgaaagcgatggcctgaactacattcccaaaatcgcggaactcaagaccgaattccagaaaaggctgtctgatttcaaactctacgaaagcgaactgactctgttcagctccccgttctccacgaagatcgacagtgtgcacgaggagctccagatggaggttatcgacctgcaatgcaacacggtcctgaagacgaaatacgacaaggtgggaataccagaattctacaagtacctctggggtagctacccgaaatacaagcaccattgcgcaaagattctttccatgttcgggagcacctacatctgcgaacagctgttctccattatgaaactgagcaaaacaaaatactgctcccagttaaaggattcccagtgggattctgtactccacatcgcaacgtgatggagagaaaactcctggcagggccctatggtgggaaaggctggagtcttctagtcccaagggattgggagatgacaaaatgaattttttttttcttttttgagatggagtcttgctctgtcgcccaggttggagtgcagtggcgtgatctcggcttactgcaacttccagctcctgggttcgaacgattctcctgcctcagcctcccgagcagctgggactacaggcatggtggcacatgcctgtaatcctagctactcaggaggctgaagcataagaatcgcttgaacctgggaggcggaggttgcagtgagcagagattgcaccactgcacttcagcctgaatgacagagagagactctgtctc

SEQ ID NO: 240092 - DNA, 1403 bp, Homo sapiens
  misc_feature (580)..(580): n is a, c, g, or t
  misc_feature (646)..(646): n is a, c, g, or t
  misc_feature (770)..(770): n is a, c, g, or t
gtttgccctaagcagttcccaacttgacttttccctttaccttaagtgattttggggccccaagttattttcctttcacagcctactttcttccttccagaagtgactgtggacaattccacagggtttggacttgatcagggcagaaggtgaagctgcaaggtattagatgtgggaatggagaaaaatacaggctggagctgtgggtttgagtgttgtcctcataggaggtgatggctgaggggtaggtaagtgagaggatgagatccccgaggccgacagcacagagtgacaggagcatagggcaggactttgggtcacccaaggagacagtgatgcttttgaagaagtcagaggaggccccatcagcaatcagaggattgctctgattggcacctcagagctggaggacatcaaaaaataccgctgtaagaaagagacctggaaaagtctttagagattgtctatcccaccctacccatttgacacatgagaagatggaggccaagagatcactgagaaaataaatggtagagcttgggcaaaatcagtgctgcccaaaatggtgtttttccaacanagacatttaaaaggttccttccacaaggatcaaacaccttggggttttgatttttatcttaaaaanttatataaatttagccttctacaggccaggcacggtggctcacacctataatcccagcactttgggaggctgaggtgggtggatcatgaggtcaggagatcaaaaggatcctggctgatatggngaaaccccatctctactaaaaatacaaaaattagctgggcgtggtggtgggcgcatgtaatcccagctactcaggaggctgaggcaggagaattacttgaacctgggaggcagaggttgcagtgaaccgagatcgcgccattgcactccagtctggcgacagagcgagactccgtctctaaataaataaataaataaatttagccttctactcaagaacttatctggctttgtcttaatgtaaaaataatttctttttgctaaattattgagagaaatttactatttattagtgtttatcagttttctttaaactcaccactttttgatgaatatgaaaatctaaaaacttggccgggcgcagtggctcacacctgtaatctcagcactttgggaggccaaggtgggcggatcatctgaggtcaggagttcaagatcagcctgaccaacatggtgaaaccccttctctactaaaaatacaaaaattagctgggcgtggtggtgggtgcctgtaattgtagctactcgggaggctgaggcatgagaatcacttgaacccagaaagcagaggttgcagtgagctgagatggtgccactgcactccagcctgggcgacagagtgagactctgtcct

SEQ ID NO: 240093 - DNA, 570 bp, Homo sapiens
actactggcctcccaaaatgctgggattacagacatgagccaccttgcccagccaacattttcttaaaacctaaacatatactacaatatgacctggtagttgcacctctggacacttatcccaaagcaatgaaaacttaggtctgcacagaaacccttacataattgttcatagcagctttatttgcaatagtggaaaactggaaagagcccagatgtccttcaacaggtgagttgttaaacaagccagtacatccacaccatggaatactactcagcaacaagaaggaataaactcttgataaacccaacaacttggatggatctcaagggcattatgctgagtgaaaaagcccattttgacctaaagggtgtaattgcctttatataacattcttgaaaggacaaaatttttggagaccagattagtggttgccaggaattagggatggtagggagaagagggtgtaggtgtgactataaaggcattgctcaagggagatctttgaccacagttgtggtcaccctgatctacctacgtgatgaaatgacattgaactatacacacta

SEQ ID NO: 240094 - DNA, 259 bp, Homo sapiens
gagacggagtctcgctctgtcgcccaggcgggactgcggactgcagtggcgcaatctcggctcactgcaagctccgcttcccgggttcacgccattctcctgcctcagcctcccgagtagctgggactacaggcccatgttcttgattgggtatgaggactggctaaccctctctgaccactgatgttgaaatcagacgtgtaagttcaaatcctttatgaagaactcctgaccttgagcgaatcccttcacatctctg

SEQ ID NO: 240095 - DNA, 1944 bp, Homo sapiens
  misc_feature (5)..(5): n is a, c, g, or t
  misc_feature (8)..(8): n is a, c, g, or t
  misc_feature (480)..(480): n is a, c, g, or t
  misc_feature (829)..(829): n is a, c, g, or t
  misc_feature (1048)..(1048): n is a, c, g, or t
caccnaanacacaggcatgaaatacactcatgggcttgtccacatgcacacctgccacaaacacccatcataagcctccaggtaaacaatatgggcatgcgcacttatacacacacttgcacacacatacacatttttggaggcttgaatgcacacccacgcccaacacacaccccctcaggcaggcacacatgggtcccctaaacatggactcagtcttcctacaggagaatttctattctgagcaaacacccagcatctgcagtcaatggcaaacagatgaatgggacaaaattcactcatgtgtcctggtggccctaccaatacagccctgaaggagcaggcagcaggcttatcccttcaccagcaggccttcagaagggcaagaccagggtggggatcaggtttggccaggagaacactcagagcttctgggtactgactcaaagccaggggccgacagccttgtgcattcctganaagtaggtcaccatgacaaggagcactggctcacatgctgggacctacggtgactggaaaagacttggggaaaatccagctgttgtgagacagccagtgttagtaggtgctgccttcccataccagtgagttaggttgggtctatgcagcaccggagctatggagtgtgtgtcagcggcaagggctcctgctcagcacagcaaagactaggagaagaagagggcagtggcttaccagggactgtagcgctgggaaggacgggtgaggcaggggacacattatgaatagtgttattttttagcacaccagtgtgttaggcactgtgctgggtgtttttcatgtattatcntgcaagatacagccctgcaagttagattttattgcctccattttacagatgaggagactgaggctcagagggcttaaataaattactctaggtcttcagctaataggggcagagctcagatatgagtcaaggcttgtctgactccagatctcagactttctcaacatcttcatgttgaagctaaaacttgcattttaaactatcaaaagcaagaggganctaaggagacatggcaactaaaggtactgtggtatcccggatgggatcctgggacagaaaataaacatgaactttagttaatgacaattttaattgtgatacatgtactttactaatgcaaaagtgttaataatagaggaaactgggtgcagggtatacaggaactatttatactatcttaatgattcttcaaatctaaaactgtcctaaaataaaagacttattttttaaactttgcatttttgccagcagcaggaagcagtagataaccaacattccaaggtgcagcctgtgtataaggcctgaagaggccagggcccctggaaagtttctcaaaataagaggccattctggactttgtaccactgagttcccatcacctacataacttgaaatagagacattaattgcagggctgtgatcacagccaacaccaccttcctaaatggggcaaaagggcgctgaagtcgggcagagcagctgcaaactggcatgaattcccaaggctgtgacagagaattcttgctgggtgtgcctgtacctccctgacaatgtggcctggccaagctgacgtccctccattttctcaactgttgccactagaatgtagtaggaacaatgtataagtcttatacttcttttattaaatttattcttagatatcttattcttagtaatactactataaatgtagttgctttcttgatttcattttctgatattttatttctagtacatgaaaataaaattcatttttgtatattgatcttatgttttgtcaccttgctgagcttgcttatcagtcctaacagttttttagtggattccttaggattttctatatactgcaagattatggcatctacaaataaagatagtttaagttctttctttcc

SEQ ID NO: 240096 - DNA, 747 bp, Homo sapiens
ggctcgctgcaacctttgcttcccaggttcaagtgatcctcctgcctcagcctcacaagtagctggcattacaggcatgtgccactgcgcctgcctaatttttgtatttttagtagagacagggtttcaccatgttggccaggctggtcttgaactcctggcttcaagtgatccacccacctcagcctcgcaaagtgctgggattacaggcatgagccaccgagcctggccaccttaatctttttaagcaaatacagaatggaaactgccctcacaggattaaggagagttacaagccaggctttaggcagcattatatatagttagctgttatccagggtgcacaagtgtactttgacccacttccctgcagctgctaactcactgaacatcactccacgtgctagaccacctcctacctgtttctccatggttcttaccatgagtaagaatttctgacgctagactcataagatcgttttgcccaagaacgggttgtttttcagatcctgaattctgacgtccccaaccaaggaacccactcagcacaagaatgaggtttcttggtctccctgtctcatgacttcgcccttcacttcttgaccaatcatcgatccccacactgcagcccctgtccagaggacttaaaaaccctgccccccaaacctctcagggaggtggatttgaggcttcttcccatctcctcattcagatgccctgtgattattaaactctttctttgctgca

SEQ ID NO: 240097 - DNA, 617 bp, Homo sapiens
ctggtgaagcctttggggtctttctcaaaataatgttttaaaatttatgaaataaactacatgtgattacaaaggaaactacttatattgaaatatacttagaatattaataaaaaacaaacatgctgcagtaatatatgtacttctctattaacacatcaaataacattatatagtaacaaggttcttcaactacagtaagtttgaagtaatgacggacaaccatttcaggatatctgcaacaaatgtaattggatatgaaaatatctgtgatttttaattgtgaaagtcacgggtactgctgctctactgtgggttttttgtttgtttgttttttgagacaaagtcttgctctgtcacccagcctggaatgcagtggcgcgatcttggctcaccccaacctttgcttcttcaggtataagcgaatctcctgcctcagcctcttgagtagctgggattacgtgtgtctggcaccatacctagataattttgtatttttagtagagacagggtttctccaggttggtcaggctgtcttgaactcccgacctcaggcgatctgcccgcctcagcctcctaaagtgctgggattacaggtgtgagccaccacacctggc

SEQ ID NO: 240098 - DNA, 403 bp, Homo sapiens
aaaaatatttcttgataattatggcatgctcttttttagtcaatcaagtaagaaacttttgaagagacatatagttaacagtttgtgggaagggagttctgaaaggaggcatttggggtgactttttaagtaggtttgcctgacattgctctactttgtgaaatgaccaacttaaattaatgtatacttttagcccccgaacctagtattccttattacttgtaattcaaaggaattgtgctgttttactttgcatgctttctttaattacaaaattgtctacagtatcttatatatagttgttataatttttacatatttttttccatcttgaaaatgattttgttttcatagtagtgtttagcattcagtattttactgtaataaagtgtgatatgctata

SEQ ID NO: 240099 - DNA, 494 bp, Homo sapiens
ctactcttccagagtgaggggccctcttcatttgtagccagttggcagagtgtgattctggcaccgggcttggaactgacatcacccataaccttacctaacatggggaccctgccgttcaccagtaagagatgtgccaggaactttacactcattattgaattctcacagcaactaagagtgacttgcatttgccgtatgtagaaataggctgataaagaaagggacttgcccaaggttacagagcaagtaaatgcggggtgtaggacctgaactactgcccaaattcaagtcctgtattttatccaactataaaagacttcccaaatgattcatttatatttatagggtactttactgtttaccaagcacttttatttcatacacattttctgattccttgaaaatctccacacaatatattttaaacatagtcacccaaacttgtgtgtgtgagttggcacacaccctaataataaaaatcaccatctttt

SEQ ID NO: 240100 - DNA, 379 bp, Homo sapiens
ggcgtgatctggctcactgcaacctctgcctcctgggctcaagcgattctcctcactttgtttttgtattttgtagagatgtggttttgccatgttgcccaggctgggctcgaactcctgagctcaaatgatccgcctgccttggcctcccaaagtgctgtgattataggtgtgagccactgcgcccagccatgcctaaaatatttctaattaccactttcaataaataagaaatgaaccataaaggataaatgagattttacaaaattcaatcatttaaggacaaatttgagttctgaatacaattttcatacaaatagtgtttttgcaaataatggccagctccatgttattagtacattgcattaacaggcttttg

SEQ ID NO: 240101 - DNA, 1718 bp, Homo sapiens
  misc_feature (115)..(115): n is a, c, g, or t
  misc_feature (565)..(565): n is a, c, g, or t
  misc_feature (725)..(725): n is a, c, g, or t
  misc_feature (1000)..(1000): n is a, c, g, or t
  misc_feature (1015)..(1015): n is a, c, g, or t
aaagattatattattttgtttccatatatggtatagtaaatgtgtcaaagatagaagcaaagtgttagaaatccagaggaagaactaacaaattttaatagttttctatttttgngtatattaagcaagataaaacagactttttactgcgaactgcgatacatgtaaggctaatgcgtgattaagaatggcatagggaagcatctgtacctggtcttggctttcttgtgacttcatcttcctcagctctgtccttcatatctaggatgcctggacattagcagcagttaagtcttaggagctaaaatcaagtagaagtactctaaggagaatcctgtaagcgaagctaagaaacctgctcttacttccttaggtggactggttgtagcattctaataatccttatacctaggatgctgttgatcatctcttcagccatttaaagtcctttttgcttctctcttagtattctgaatcttcccctgagtaccaaccagaacccagccatagatggggaaggcagaagaagacaagaagggagaattaagctacagtagaaagatcntagggttctggagtcagacctcagtccaaatcctacttccgccacttcggacaagtgacttaatcagtcttcagagtgaacatgaagtatctaataaagggtctgaacatagtgatacggtttttttttttacttaatattacttccctcttctctcagncattttcactatgtaaatagtagagcattctttagtctctgccactgatctaccttaccacaactagtctgctgaacctcaaaaattaaatggatctaagcggggtgtggtggttgcacctgtagcaccagctacttaggaggcagaggcaggaggatcacttgtccaggattttggggctgtaaagtgccgtttgtgcttgttaatagccactgcactccagcctgggcaatatagcaagaccccatctctgaaaaaaaaacagatctatattnaagatctgcaaactnttcccgtaaagaatcagatagtaaatattttaagattcgctggccctacagtctgtgtcatcactactcaactctcttggtgaagggcaaaagcagctgtggaatgatatgcagaccaatgagtgtggctatgttccaatataattatttagaaaaacaggtggtgggctagatttggccccacactatagtttaacctctaatctttgtctttaaccattaaaggtagttccattttgagatttcatagtcaaaatacagcccccttaaaaaaaataaactaactgaaaaagacctcattatgagttggacagtgaatggagttacaagatgatgtttcccaaaattgatgacatatattgtggaggagaatggtactataaattaaagatcaggtcccaccaaaagaactcacatgaacagtggtcaaaagccgggtgtggtggctcacgcctgtaatcccagtactttgggaggctgaggcaggtggttcacttgagtccaggagttggagaccagcctggccaacacagtgaaatcctgtctctactgaaaattagctgggcgtggtggtgcatgcctgtaatccaagctacttgggaggctgaggcaggtgaatcacttgagcccaggaagcagaggttgcagtgagctgagatcacaccactgcactccagcaggggcaacagagcaagactgtctc

SEQ ID NO: 240102 - DNA, 2116 bp, Homo sapiens
  misc_feature (620)..(620): n is a, c, g, or t
  misc_feature (801)..(801): n is a, c, g, or t
  misc_feature (1105)..(1105): n is a, c, g, or t
  misc_feature (1615)..(1615): n is a, c, g, or t
acgcaatggaattctactcagcattaaaaaggaatgaatcactgatgcaggcagcaacaaggaagaatcccaaatagccaaggccacagcctagaaacttctccttggaggctaagcctgcagcacccagctgagcacagaggacaatctgaggagctaagtgaccggctggacactccattcacagaagaaaggccatgtgaagataagatgagaagacagccatctaccagccaggaagagaggcttcaccagacaccaaccctaaaggcaccttgaccttggacttccagcttccaggactgtgagaacgcaaatgtctgtggtttaggccatccagtctgtgataccttgttatggcagtccaagccccagtgaagtcagacagtccggctgggttctaatctctactctatattacaggagttatacggccttgggaaagtcacttaactgctctgaaccttaactttcttatctgttgaaagggcccgcttcacagggctgctgtgaagatggaatgccctatggcagggaccctgcatagtgtccagcacagagggcaccacagagggctcaacaaccacatgggccctctgaaagacttattcattaaaaanatgaccactctgcactttgggaggccgaggcgggtgggcagatcacctgaggtcaggagttcgagacaagcttggccaacgtggtgaaaccctgtctctactaaaaatacaaaaattaactgggcatggtggtgggtgcctgtagtcccagctactcaggaggctgaggtgggaggattgnttgaacctgggaggccgaggttgcagtgagccgagattgcgcactccagcctgggtgacagagtaagactctgtctaaaaaaaaaaaaattactctcctctcaaagacttacaatctctgaagacagagcaggcctgcaattgtaattgtgagtaatagggccccaagaggtgtttttctaaactctgcttgcagttagtcgcattcccagagggacatttggcgttgatgcatcccgtggcatattcctttgtgaaatgtttggctttgtcttaaaaccacatcatgctccaaagtggagccncgctctcatgtttgcaacttagttaccagaagcgctcacaacctgaccttttagaccatgtgtgtcctttctccaaactaaaacagcctaagctctattctgtaactgaaaacaagaagccaatcttggctgtccattctgtgagtcagatgctgccaggcttagtggcagcaccaggggccgctgcgtagtgaaggtcctcctcgcagcagtgtgctccagcagccaggaacgatgtcctgtgtggctttgcactcaggaggagaacattcggggcattttcttatcaaagagcacttcgcagcactgtcctgctctcctggactctgtagggcatggggcaagggtggaaatgtggagggcagggaaggatgcacaggctggtttggggcctctgctctctgggctcaccagcctctgagctctccaccctgcactccccgccgccaggcttctcaaggcctgtccctgcctcccagggcagggcagttccccagggtctgttgattngacagtaaatgcaaaactcctctgctttcttcctgtggaggagccatctcttggccaccggaacacaggaatatttgttgagtgaagggaacacgatgcagagtccaaaggggtgattcagacctgggtttcagtcctacccatgcccacagttccccagttccctgttttctctgggggagctcccggcaactgccgcaatgaggcaactgggaaatccctttgttggctgggcaaggtggctcacacccagcactttgggaggccaaggctagtggattgctttgagctcaggaattcgagaccagcctgggcaacatggcaaaaccctctccctacaaaaatacaaaaattagctgggtgtggtggcatgcacctgtggtcccagctacttgggagactgaggctggaagatcgcttgaacccaggaggcagaggtcaccgtgagctgagatcgtgccactggactccagcctgggtgacagagtgagaccctgtctg

SEQ ID NO: 240103 - DNA, 1016 bp, Homo sapiens
aaatccaaaatattgttctgtttctcatagagggctcattctcatttctacagtcaagtatgttgatgctcatttacttatgcaattaagccagatataaaaatgtaggtgcaagtataaacctgttagccgcccttaagtttgttatctaggcctctgaaatcctattggctcactttaatatttttcctatgcttttactgtttgcctctggacaagttctggcagtgaattttatgtttggtcttctgatcttcaactatcaaagggaagagatgaaaaagatggacaatcttttcaaaactgttagcagtaggcaattctgtttaagaatgagcagtaatacattacattatacatttaagaatcttattgaaaccttaaaaaaattatatttttatttgacttccaataaactagttagcgttctaggcagcatacaaagtttctgttaaattttaatgggtgttatttctaataaaaactatgtaaatatagataaaatagagacaagcttaagatgactgaccacaaaatactatttttaaatgctaacaggttaaatccattcaggaaaacttaaattctacttttgctgtttcttactccctgaatggcactttttttgctgggggcagggagtagcagtagatagttgccattgtctctacctcctcatactaattctttttaattaaaatgtccagtaatgctctgaaaatcatttttggaacatttaactattcagtaaaaagattaaaaatgacttaataagtatacttttctaaatgtaataaaaattatattctacactgtactttcatagcacttctagtttaacatgaaaaatttcagggtgcttgctgaaatgacaaagcactttggtatggctatcctatgctaaaattctttcctttgaaaattcaaactcagtatttctaaaaaatcagcaaaagaaactatcatcagaatgaacaggcaacctacagagtgggaggaacttaaacaaattttca

SEQ ID NO: 240104 - DNA, 219 bp, Homo sapiens
acagggacccgggtgcctctcaggttgagaggggtggtcaccatccccacactcaggccccctctgtctccaggcctgctgcttctgaacaggcctggggcagtccatttctattgggaaaccctatcaaagttagccccgggtttcagccaagttcacctcactgctcacagacattcattattaacagactgtttgatagcactttgggctcttttt

SEQ ID NO: 240105 - DNA, 422 bp, Homo sapiens
catttgttgtttcctgactttttaatgatcgccattctaactggcgtgagatggtatctcactgtggttttgatttgcatttctctaatgaccagtgatgataagcatgagggatagcattaggagaaatacctaatgtaggtgacaggttgatgggtacagcaaatcaccatggcacatgtatacctatgtaacaaaaccgtacattctgcacatgtatcccagaacttaaagtataataatttaaaaaaaaacttgatagatgtagacaaactgccctccaaaatttccatattcatttacattcccattagtactctcaaccaatataaaatatttaaacttgtatatttttctcttttattatattttaaattttatatctttaatttttccagtgaaaaagattaaagtgatttatt

SEQ ID NO: 240106 - DNA, 477 bp, Homo sapiens
tgtgcccggccaagattctgcattttaacaagtttccaggtgatgctgatgctgcttgtccaggaccacactttgctgagcaaggctttattaaagactcaaaaccaaattctttcccccagcccttccttttgtctcctgcctatgttcagcacctgtttcatatgtggtcagaatagcagagtttctcacaacccagctccagccctcggccaggatccctggtgaccccggcaaacacacacttctttagggtcacgggcaggttactgagtcaagactgccaaagcccaacaatgatattttccttcactccccatcgtcctccctctctagccaccccaaacccgggactaatcttggagctgcttaataataacaaagccagcagcagagtaaggcaagatttcaaagcagagtttttcttgtttggcaattacctaattcaggatgcgattcacagatttgcaaaaccca

SEQ ID NO: 240107 - DNA, 643 bp, Homo sapiens
gtaagtgaggaaatacaaagttccaggtgcacagatgggacctgtcaatgtgtcagacctcatggtagagggattgaaattaaaacatcaacatcaatatctgcagatcttctcccttgagataatcagtttccataaaaaggcatcttcctagttgctgctttggtggtgtggggtggagggtgggtacagcaacgaagtctgtctaccagcatttagtacactgagtgagggaagaccatcgcagggtgggaagttttcagcttcacttcgcaacccaggctctggaagtatgtcatcttccaattgcttcatcattgcctactctcctaaccacaggcatagcgcgtcagaagactgaaacccaactcagccaaccatctattcacatgccatcatccacgagtttgttgacatctctcatttgctgttgtctctcctcattctttctgtcctcataggtttataagttttcattttctttctttaaaaactcattttaaggacaccattatttttaaaaaaagcaatagaaaataacaagtatgggcaaagacgtggagaaattggaaccgtcgcacactgctggtggaaatgtaaaatggcagagttcttcaaaaaattaaagttccattatcatatg

SEQ ID NO: 240108 - DNA, 321 bp, Homo sapiens
aacagaccaataaagtaccacacttagttcctaaggctgactctgtagttatttactcaacaaaaaacatattgagtatacagcctgggcactgggaatacagcagagaacaaaacgaagtgttagtccttatgaagtttcagtctggtgggggaaaataagtaatcaaaaataatatatttactacatcagctggtgataaatgctatgaaaacaaaaagcaaaggtggaaagagacagcaatagggttggtcctattttattagagcctgaataaggtgagagagtaaaccatgatgttacctaaaagaagtatgatcc

SEQ ID NO: 240109 - DNA, 485 bp, Homo sapiens
gttttgctctgtcatttggagaccagactgaataggcacaagcaagattctgggtgattttgctgcctcgtattagctaggtttttctccctcatgcaaaaataaaataggaatctaatggtacttattcctgtggctatgtctggacgatacgtaaagtatcagagtcccaggtgaggccaggactggctggtccagaggctggaggggaggatttcagaaacagcactgtcatcctttcatatgccctacctcctctgtctcaattttaggagtataataaatgttctcttaaaaagcatgctgggcagaggaaataaaaaatgtggtatggatggtggttaaatatctgccctctaatacatatagaatcgtttttacatttaaagtcaaatctgaagctgatttaaaaattcctacagtgggtaagagctaagaaacctttcccatgaaaatctgacctttggttaacttcccagatctgt

SEQ ID NO: 240110 - DNA, 127 bp, Homo sapiens
caaaatgaactgaaaataaaccacagacttaaatgtaaaatgtaaaactatacagtcttttagaaaaaaaataagaacaaatctttgggatctataggtaggtatagagttcttagacttgacacca

SEQ ID NO: 240111 - DNA, 354 bp, Homo sapiens
caggtcttaaataatacggaagaaaggcatggtattgagaggatgtgtcctcccacagacagactacaatgagtgtagtatcactgttttaaagtcacttctcactttgtaagatgagcatgggaggagtcaaaagtagaagatagaaaagaaataagagggatccccataagactgcaagaaaagttaaaaagatgatgagtataaatgaagttacttttgaggcaagcaggaagaggtggcaagaggggccagaaaaatcaaagattatacctgatgacctggttttttttgtttgttttgttttttgttttttgttttgagacagagtctcgctctgtcacctaggctgga

SEQ ID NO: 240112 - DNA, 440 bp, Homo sapiens
gctctccgggactcctctggagcagcctggggggacgcggggtcccgtggggacattcgtgaaagggcgtggaggaaaccctgagccgcacacgcccacggccaaccaaccctgcagccagacaggcccaggggccactccagaggctgtgtcaggccctgcgggtgcgcgccacgtttctgagtttattgtttgcgagcctctgagctctgggccttgaagccccccgcgtgcccccgctcccggcaagctgagcccagcgtgggtgattgacaggccgccctgggaaccaggagcgacaggtgccgcgacctccctgtggtgggcacggcccgtccgcccatcgcccctctcagcgccttttcttccccattcacttttttacaaagtcacaggctgcgatttccaggtgcgacgcctcgaccccccggatgcagccg

SEQ ID NO: 240113 - DNA, 239 bp, Homo sapiens
aacagggcttccaagggacagttatgcatgctgcctggatcccggcacctggccctggcgcgagcctatggcccacttacacatcagctgaattcacacctgaccactgcagtttgttctcttgaatttcttggaatttccttatggaggctagttcacttttgtaaacagaaaaagttgtatttttgccataggtataaagtaatatttaataaatgcagtggcaacaaagcaaagct

SEQ ID NO: 240114 - DNA, 692 bp, Homo sapiens
gtcttttgtgtctgctttctttcacttaggataatgctgtgaagtttgtagcatatatcaatacttcagtactttttattgccaagatttgttttttaagattattttatcattttctttcccttgactccattttttctcttttcattgtgaaatcaattctaaggtctcctgtcataattattatgatttcaaggagtgaaccagtatatttttgtgatctacaagcaatcatctgtatgatctagagcatttcacagttgatctacatgttagaagagctttttggactttaaaaaatgtttttagaaagtgtgatgttagctattgccagtggcaagcccagctgaaccaggtacatcatcatgaccacagagtagtccatttcaatatagtttgtatcattaacattttttaacatctaaaaaagtttaggtcatttctatgctttcattagtgattcttcactaggaaggaacctagtgaagtgccagtatgttatcagaaataaaattcccagtctatccattgcttatatatttgtaaacaccaaaatgcatgaaagatgaagttctggtatcagttacagggttgacatagcttgatcaagaaaatgtacatgtgctatgttaatcttctttctttttgtttgttatttttgaatttttttttttttttatttcaggaccctt

SEQ ID NO: 240115 - DNA, 331 bp, Homo sapiens
aaaagatagatgtggtgattagtaaatcatggatgatcatagagtaatttcagtagatggttgggggtcaaactggagtataatgggttaagaagtaagtcaggaagtagagggctcttcctggtgttagggacaatataaatgaagacatggagacaggagtgggcttggcgaacacaggatgatgggcatcagcctgagtgaccaggtgttcgtagctcagagtggtagggagttaggttggatggacgaggttagagtcaagatgtggaggcctttgaattccaggatgaattgttgaaacttgacctatcagggaattaaagaaggt

SEQ ID NO: 240116 - DNA, 388 bp, Homo sapiens
cccacaaaggcctttcccaacgcctccccagccggcactcgggggcacggccccgcgcccgcgcctcgtcgtcgtcgtcctcctcctccccgcccgcgcggtagtagctctgtccgcagctgctgcagaccgagggcgcgcccaccgcgtggatcttcttgtgtctccggagcgcggcgccctgcacgaagccctccccgcactccacgcagatgtgggccggctcctcgccccccgccgccccgagcccgtccccgtgctgggcccgctggtgcgccaggagcccggccccgtgcccgaagcccttcccgcactccagacacacgtacggcttgggggccggggcgcgccgcgaccggggccccgcggcctttgcccccgcgcccgc

SEQ ID NO: 240117 - DNA, 2895 bp, Homo sapiens
  misc_feature (2313)..(2313): n is a, c, g, or t
tttaagtgcaaagttcagtagttaagtacattaatattgttgtatagccatcaccgtcatctatctccagaactctttctatcttgcaaaactgaaattctgtacccgtaaacagtaactccatttctcttctgcagcattggcaatcaccattctccttcctctctctgtttttgactgttctgcctcataaaagtacctcatgtgaatggaatcatacagtatttgtctttttgtgcctgatttatttcactcagcataatgtcctcatggttcatccgtgttaatagcatgtgtcagaatttctatcctttttaaggctaaatgacccattgtatgtacgtatcactgtttatctattcatccattgatgaacacttgatcacatatttttatttaaaacatttttaaagccaggcacaatggctcatgcctgtaatcccagcactttggaaggttgaggtgggcagatctcttgaggtcaggagttcgagaccagcctggccaacatggcaaatcccatttctactaaaaatacaaaaattagccgggcgtggtggcaggcgcctataatcccagcttcttgggaggctgtggcaggaaaatcacttgaaccccggaggcggaggttgcagtgagccaagactgtggccactggactccagtctgggcaacagagcaagactctgtctcaaaaaaaaaaaaaaaaaaagataaaagatgtttaaaacctcttttcccggctgggcgtggtggctctcgcctataatcccagtactttgggaggctgaggcaggcggatcacctgagatcgggagtttgagaccagcctggccaacatggtgaaactccatccctactaaaaatagaaaaattagctggtcatggtggtgtgcgcatgtaatcccagctactcaggaggctgaggcaggagaaatcacttgaacccagggggcggaggttgcagtgagccaagattgcgacactgcactccagcctgggcgacagagcgagactgtctgcaaaaaaataaacaacttcttttccttcaggagagtcaagatggttaggacacttttcagtcagagggttgctgtgtcacgactgttgctctttcttatttcattgcatttattacagctctttggtttttgttgttgtttttacgtttttcagagacaggtctcattctgttgccaaggctagagcacagaggcacgatcacggctcacggcagccttgacctcctcctgggctgaagcagtccaacctgcctcagcctctgagtagctgggactaaaggcatgtgccactgggcccggcatattctgttttgatctcagtatcagttaggatgctttcactgacaggactctggctctgtttctgtctcccatgtcatgacatcctggtcaggcaggactggggctctgctgtgcttctctgagactctcttgtacccagctggcctccatggaggtggcgtcatcctcagctcagtttgactaattctaagatacacttttttccttcacatttgctcctatagttgggcttcattgtacattctgtggtgtggttataatttattggctatattttatcctttctcagtgcacataaaataacagtggatcttacaatgaatgaaatttagcaagtgttgagaggaagaaagaattggacttcttttccccttaggagcaaggaaaatttccccagcaggtccccagtagacccacatattgttgccatggattgggtcatgtgtctatttctaaaccatgaggaaagagtttaacatgattagcacttgagttggaatggatgctggggaatccacagctaaggccatcatgtctaaagacatgggatacaggcagcagtgagccttggaagtgcatagagatttcagtcgtctgtctagttattatttctgtctagattttgagcatttctaaattgtgtgtcatttacatttttaaataacctattttaactctgtaatgaaagaacttaagaagtgaaggagttatgaagtgaagtgaacacaaaaactatcagggtcacatagtttatagaagatacttctcatcccagacctggggttataactgatacagactgaaagaagctgcaggaggacagtgtctgcttgttcaagtagagtcttttgttggtgtgttccattaggtgggcctgactgccgcctcggggctgtattttcggtctgggaacctgatactcaacctaatgccactcagtttcgtctcccattctctactttctcttgcactgtattttactacccantttttccctctcactgtgtatttccagtgtcttgagatctttgtaccagacttttattttatagattttttttttcctaccataaaagaaaatgtagttcctaaggaaaagatgcttacattcttggaaaaggagcaaatttactgtgattggatttttgtataccaccatttaaaatcagatgtttggttttttacatcagattttaaatgtattctgtgtgcttcattttcaaaaagaaatgttttggagcaccaaaaataataaaacttttaaaaatgaattggcaacatttacctttttaaaatttttgacttttggctcacgcctgtaatcccagcactttgggaggccaaggtgggtagatcatttcagctcaggaattcgagaccagcctgggcaacatggcaaaaccccatctctacaaaaaatacaaaaattaggtaggcatggtgatgcatgtctgtagtcccagccactcaggaggctgaagtgggaggattgcttgagcctaggcggttgaagcagcactgagccacgatcacaccattgcactccagcctggtgacagaaccagtcttt

SEQ ID NO: 240118 - DNA, 771 bp, Homo sapiens
tgccgctccttggaactggagaagccaaatgaattccctctcacatctcttaccctctttccaaatgcccttccttatcaactttgtctctaaattcttcccatcttacatggcccggttggaagtataacttcatttctccagtccaccctggtgggttggtgggttggttggttggttggttggttttttgggttaactccttacatcctattctgaagtttgtctttgtttttgtctccaaaactagtcaaaattctcaggtcagtagccgtctcctgtgcatgtcctccctgcacctagctcaaggctggatgcacaggagacatcctatctgctttctcaggccactggctttcctccctgaatggctcttgctttagcagggggcagtctcaactagtagaaattttaccattgggaatgatatcaatgaagtttttatagactgtgggctttccatagtggatggaagagtaacagcagaaagttacgattgagagtcccagggtaaactagagacaaaagataggggcagggttaaaaagtagaaccccaggctagacaatataacaagaccccatctctacaaaaataattttaaaaattagctggatgtggtggcatgcacctgtagtcccaggtatttgggaggctgaggtgggaggattgcttgagcccaggaggttgaggctacagtgagccatgatcatgccactgcacttcagcctgagcaacagagaaagaccctgtctcagaacaaaacaaaac

SEQ ID NO: 240119 - DNA, 494 bp, Homo sapiens
cacttttgaaaatgttggtagaattataggaatgtctgtttgattatcattaccaaagtgtcatgacagtatgcctttgtagtgaactcggattttcaggagtttgaatagttggatattttaaaatctaagaagaaaaggcctgtttccaatgttgttgaagaataatggactctattaaaaagtggagaaaaagataatacatgtggtcaaggttgaccacaaggcccaggcacaactaccttggcgataatcttctagattcgtaacaggttagagctgactttttgtttttgttgttgctgatgctgtgtgattcagacttctcagcctaaccaggaagagtaagtggaaatggtagatgaagaaggggtagagctggtgtatctataactttctgatatttgtctgccaaacttgatatattagtaatttttttatctttagctaagatcaagtcacccctgaaacaacaggagattctagttttaaaa

SEQ ID NO: 240120 - DNA, 440 bp, Homo sapiens
cacttttgaaaatgttggtagaattataggaatgtctgtttgattatcattaccaaagtgtcatgacagtatgcctttgtagtgaactcggattttcaggagtttgaatagttggatattttaaaatctaagaagaaaaggcctgtttccaatgttgttgaagaataatggactctattaaaaagtggagaggcgataatcttctagattcgtaacaggttagagctgactttttgtttttgttgttgctgatgctgtgtgattcagacttctcagcctaaccaggaagagtaagtggaaatggtagatgaagaaggggtagagctggtgtatctataactttctgatatttgtctgccaaacttgatatattagtaatttttttatctttagctaagatcaagtcacccctgaaacaacaggagattctagttttaaaa

SEQ ID NO: 240121 - DNA, 344 bp, Homo sapiens
tgctttctgccaggtctcggataaagagatttaggagaatgttattaagcagtacactatatgtcattttgatcaggtggtatatgtttttcctctcagtgctagttgatcctggaagcgtcctcactgacaagctggtcagggtatgttgagtgtaatttgaggtctcattaggaatgtagtgagatagctttgtgacagactcacagcacatagtgaaagacacacaggtagatggatggcaagctgtggttgttgcctgctcttcatttctttcacaattagaagttgagagtgggccgggcacagtggttcatgcctgtaatcccagcactttgggaggc

SEQ ID NO: 240122 - DNA, 331 bp, Homo sapiens
tgggagtgagagaggagactagtgcacaggtaatgctagccaaggtgaagtgttgagcagcaaccactttactctttagaagctgtggaaaattccaagctcccacactatccttcttggtcttttcttgatatagagcttttgcaatgtgcaagttcctttcagaatattcataaaagtctacaagggttgtatcaaaagaactccacatccatattgaataaactcccactagccaaaaattggataaattgaggatcaataaggatcatgactacagtgtgttgaaacttcttaagtatatttagattcatgagcttatgggatacta

SEQ ID NO: 240123 - DNA, 517 bp, Homo sapiens
ctgctgtgaccctagaaatttaggaactttgactaagctccgttgctctgaggggaggggatgcggacatgtttttgacagccatggtaccctgatgaaaacccttccagcaccctgcttgggttacagctattggaagcctgggcacactgggcctggcagaggaggtggtgctcagaaagggccacagagcaagagaggcaagatgcttcccccactgccacccatcagtgagaggcccctctctccagggttaacacttcttaccagaatagactctattttgcccagaaataccttcactcagtgtaaaagatcagggctaattttaaagccacccaaacttccctgtgtttatatatttatgagtgcctctgatgcagctcattttgagaggtgatgttgtcactgcttgttgttaattcattcactgtggcattagagttttactgacactgtaacagttagttgagacagtctgaggtctcagttcactctgccttaacagattgccttc

SEQ ID NO: 240124 - DNA, 508 bp, Homo sapiens
aatccttacaaaaataaattttttacattttacattaaataattaattttttatatttttacattaaaataacattttaccttcaaggcattgaacaatatgactaaatcaattatagtttattgtcccaagatcctggctcttttctgagtttttatggacagatataaactactttcagaaaatggcatatttatcagttcaaatatatttctattattcgttgtctactattatcttttttttttaagaaaaacttgtatgtgtgaaaacagcttgaaagagaagagaaaaaaggagagggttcaagtggttttgaaatttctccagggtagcagtgtcaatgaaagtgttgcttagtgaggaaatctttcaatgggccaatattttcttaatctttatttcaaagttacctaggttcactcaaaagacaggctggggagacacgtggactcagaagatatcaagtacaaatccctttattacagtattcttataaaggaaaatc

SEQ ID NO: 240125 - DNA, 590 bp, Homo sapiens
ctgctttgtgtcacagagtgggacatcacaggctgctgcccacgtggctggcattgcagccatgatgctgtctgccgagccggagctcaccctggccgagttgaggcagagactgatccacttctctgccaaagatgtcatcaatgaggcctggttccctgaggaccagcgggtactgacccccaacctggtggccgccctgccccccagcacccatggggcaggttggcagctgttttgcaggactgtgtggtcagcacactcggggcctacacggatggccacagccatcgcccgctgcgccccagatgaggagctgctgagctgctccagtttctccaggagtgggaagcggcggggcgagcgcatggaggcccaagggggcaagctggtctgccgggcccacaacgcttttgggggtgagggtgtctacgccattgccaggtgctgcctgctaccccaggccaactgcagcgtccacacagctccaccagctgaggccagcatggggacccgtgtccactgccaccaacagggccacgtcctcacaggctgcagctcccactgggaggtggaggaccttggcaccc

SEQ ID NO: 240126 - DNA, 638 bp, Homo sapiens
cttacttatttgtgggatctaaagatcaaaacagttgaactcatggacatagtagaaggttgattaccagaggctgggaagggtagtgggggataggtaggggagttggggatgattaatgggtaccaaaaaatagttagaatgaatgacacctactatttgatagcacaacagggtgtctatagtcaataataatttaattgtacattttaaaataactaaaatagtataattggattgtttgtaatacaaagaatgatcacttgagggggtggataccccattctccatgatgtgattattatacattgcatgcctgtatccacacatctcatgtacccataaatatatatacctactatatacccacaagaattaaaaataaaatttttttaaaaagtagaaagacttcaaataaataacccaatgatgcacctccaggaactagaaaagcaagaacaaatcaaaccctaaattagtagaaagaatgtaacaaggctgggtgtggtgacacctgtaatcacagcactttgggagactgaggcaggatgattgcccgacacccacctgggcaacaaagtgagactgtgtctacaaaaaaagtttgaaaattagccaggaatgatggcatgtgccta

SEQ ID NO: 240127 - DNA, 635 bp, Homo sapiens
tctcctgcctcctccttgctctctcctagagtccaaacccaaatgggccagttggatctgatgttcgtcagttctttacttctatttcctggggtactcaggagggcacacactatagataacttgggttagctgcataaaattcaatgtctcattaagttgcattaaactgagcttagatgtgtaagtttgctaacggatgggtttttttgttaagaactataggatttatgggaccaagtctagcgagtccagatatcaaaatcattataatgttatatttgctgttattagaatataatatagcttattatacaataaatatgtagactgtaaaatatatttctcactagtacctcctattttctttctctgttgaagtttttaaatcccacagataattaaattggcacctttatgcttgttcaaaaattaaaataatctattaaataagttcaaattaaagatttttacttcaaatgactgatttgtgatttgcttttaatttcttaaaatgttaccacataattcatctaaagtataaaaaggaatagcaaattttagatgttgtgcagatatataatgcttgtgtcagaattattataatattgataataaactttagatattgcttc

SEQ ID NO: 240128 - DNA, 407 bp, Homo sapiens
ccaaagcaaaaactgtgacgatatcttcttatgactttttgataaaaactctaaagctttttttatattctattgtttctttaaataatattttcaataatttttttttctaaaaaatgacacctgccaaaaattcaagcttagggaaatgcaaattaaaaccacaagatattactacacacttgttagtataactaaataaaaataataactgggaatattaagcgatgatgaggatgcagagcaagtggaaatctcatacattgctaatgggaatgcaaaatagtacagcccctttggaagacaatctggtagtgtcttataaaattaaccatacccttaccacgtgaaccagcagtctcactcctgagtattttttcaagagaaataaaaacatattcacatga

SEQ ID NO: 240129 - DNA, 451 bp, Homo sapiens
accctcagattcacactgacaaaacttctcttacagctatgcacattctgacatacaaaggccacaaactcagtgctctggtgctacagctggtggagcctgattaaaggcagagttcccgcccatgcatgcagacaggaagatcaacttacagaccccttcaacagtgtacagcagggctctggaccaaggtgattcattttagctatcctaaaaaggagatcacccacagagcacagaattaaatctgtgttattaaaaaaacaaaatatcaggcccacactaacaatatcaccacaaagaacaaatatttctatacaagaaaaacaacaagtcgtttctgttcacatgtcatattctcattacagccagtcctaaccatcccatttaaaattgtaatcctttccctagtactcctagtccttcttaccttgcttatttttttccatag

SEQ ID NO: 240130 - DNA, 252 bp, Homo sapiens
tgcttgaattttctcattgaaataagaatctgggtcataaatcgagagtgaggattaaaggttgaacataaagaagaagatgtgaaatagttatctccgacagtggaagaatgattcagttagggaaagaattactaggcaatccacttgaggttgggacaagggatttaaacaggaacaggtcagcatgttgtgtgcatatattgagacatcatcaattgtgaatttggggttttgaatttaaccatgggt

SEQ ID NO: 240131 - DNA, 425 bp, Homo sapiens
tctgtacaaagaatcttaacattttaagtaaattgtatttgcctttttatgtttaatcataaaagccatctaatacattacagaataaagaagtagtcgtcatcttggacctgctacccctacacaaccaaacttagccagtgaaggacattttcaaaagtatttatttgtaatctcattatttttagattttctatttttaaatattccatttcagatattcttcacattttttacacaggtgtttcaaagtcgtatctgtaattagagtgtacacagtattctcaattaatatcatataaatccacatgagtctatgttgcttaattttctaaacccttaaatatggatatttaggatgtttctagtatttttaactgttatagaaatttgtaatgaataattgcacttatgacttttttata

SEQ ID NO: 240132 - DNA, 357 bp, Homo sapiens
gggacacatttccccctgcctcgcggcagccccgaaagacccagctcctgcctcctgatggcctctttaggctcatctcatgcctcactgcagcctcccccaggccaggctcctagctttcggcggcttcgcaggtccggctcctgcgtctgacggcctctttaggcccggctcgtccctcacaatggcctctttcaaaggcccagcttttccttcgtggcggcctctccaggcccaaattggcaagcctcccctgtcctggtggctgtctcccggcctactctccaggcccagcacactctcgcggctgtacctccagcccagcccctgcctgcagacagccgcttttgactcggt

SEQ ID NO: 240133 - DNA, 341 bp, Homo sapiens
tatgcgcctgtcactcttctgagcacttgatatacaataagtcacccacttcctttctgacacagatgtcctagtcacatgtgaggtaagagtctttcaaactgggcgtcacaaatggattttctccttgcagaatggcttcctccaagttagaaaaaattctttctcttactaatgtgggaagttccaccccctctaatatcagatgaccacaagaagccctggcatctccactcacgctggcctgagcatggctatgccctttgaactgtccctcccgttgtagtctctgggatatcatgcaatcctgtgactgctgtttttgattcattcagatgggt

SEQ ID NO: 240134 - DNA, 389 bp, Homo sapiens
ccaatggcaagcagaaggcagtggactcagatgagaaaaaagagagaaaagttttctcaaaagcttttactatatgactattagcttcttaaaaggttcagggatatgtctatgtatggtagaagttaaatttgaaaagaagcttcccgaattctgaatatttgttccatttcaattacaatgttgtttgtaagaataagagtaaataaactgtattgaaacatgaagtgcaaattcctcttggactttagtctcccatattcttctctaaaagaaaaagttgtacaaactggattagaacaatcaaccctaattatttatgtgcaggatttgtttctaggacacccctgtgagggatccagaaacagcacatctcacccaaacatttt

SEQ ID NO: 240135 - DNA, 357 bp, Homo sapiens
gcctcttgcttgccagtgaccactgctaataataatagtagtcatcattcactggaatcctgggtttttagggtttacttggtttatttatttgcttagcttgaaggaataaaaaaaaaccttgagaggaaacaaggaggcatttcacaaaggagaaaaatatatatccctttaggaaaactgagtggctcctctgatttctttgccgctcttgtccctcagcagcacttagctgttttcttctagctggaggtgagggactgagcacaggggtggtgctcagttagtttaaagggagcttctcaccttggcgctgttcaggccttgggttggttaattctgtgtcctgtgggaatt

SEQ ID NO: 240136 - DNA, 428 bp, Homo sapiens
ctgacaatatcacaattgcgtttgctgtcaggacaacctaacccagattctcagtccatgacatagcatgcaaatgtcatgctaacactcagatacgaacacatagccaatcctacatcaatgctatcctattcctggatagcatcgtgccataaggaaccagtttgcaggactcatcattgaagtttggcatttcagaagagaaagattagtgccttccttttttatataaaacagccttatagatttccatctaaaaataatttcttcatcaaatatattctaaaaaaaattttgcttactgcttatagctccctcttgagtattcaaatatatactaacatattaatagctctgagaagtcatattgcaaaaccaactctttaactttacttaaccagcattgcccaaatctgtttgaccacaga

SEQ ID NO: 240137 - DNA, 401 bp, Homo sapiens
gcaggcttttagataaggctggtctgatcaataatctgtaactgttctaaaggaggagacaaggtgagaacagtctgaagccttactggtttaatctttcctactgtggccaagtctgcaggtctcatctaccccttccatgatcaggacatttcacgcatcctagtctgtcaggcagtttttccagttgctgtcacttgatctcaactttcacacttttcactgggtcctatactttaagtcttctcaggctcttcctcttggaccatccattgttattaaaaacatctctagatagttgtatatttgttttaattctgcatgaaaatattaaaattatccattttgttttgcaagtaacatgtaaagttccagaaaaatcagaaaatgtgtgtcataaa

SEQ ID NO: 240138 - DNA, 388 bp, Homo sapiens
gcactggtgaggcagagagcaaagtgatgaacaggacatgtagaaaatggagacctggagagtaagaagagaaaggacaatgagactcaaacatacagaaggacaggggcatgcactgacaaaaacatcagaccctcctccaagagccacgtctccaatgacagcagcaacagaacgacctcagacaggctgtgggtggaggtgggaaacaggtccatcttaccttgcaaggggacagggcttgagtaaagaatagaagatggaaaattaactccgtacagaacacacgttggaaacgagcagcggagagaatgcctaaatccagtgctggggatctgcattcactctgcccagaacaattccaccactcagctaagggcccgttctc

SEQ ID NO: 240139 - DNA, 119 bp, Homo sapiens
gagtagaggccagttatgttgttgaacatcccttaatttgggcttctctggagctccctcatacatatttggtggaaacagtgcacaggcaatgctgggcccttctcagtgcatcatag

SEQ ID NO: 240140 - DNA, 638 bp, Homo sapiens
agttttccttataatatgtgcttttctattctgtgtttactacttatataggtgtttatagaactataaacatcttgagtgtacttttgtatttcagtggttttagctagcagttggcatttttggctatatcttattgtaggtgaatctgtctttgcttgaatctaaaggttatctcttttcagctttatctttatgagtctttttttgtaatgacattataacacatttttaagaagtagcttctaatatggtgaaatgaagcaaaacgatttagaaatatagtttaaactgacatgtagacaagattttaggttctaagtaggctctggttgaataaaaatataaaaagataataggtttttcacaatatgctttctatgaattattcagccaaattattttctgcaagctaaagtttttatgcccatttcatatgaaatcagctgagtctaggtctcagttgtctgttacttggggaaggattttcttgcatgacctcaggtgatctgcccacctcaacctcccaaagtgctgggattacagctgtgagccaccatgtccggcctcagatttctttttgtttacctctcgtagggacttatttaccctatgctacctactgaaagtcagttggg

SEQ ID NO: 240141 - DNA, 427 bp, Homo sapiens
cctttcttccctaagcttcagcataaataactcattaattgatattaccacctttaacaaggactctttacattttatagtactaataccagaaaattatggtatctgcctatgatgttgttaagatataaagtagatgacaacagaacatgattgaaagcaatgattagaaaaaatagtttttttatattaatattccaatgagttgaggcttcaatgaacctgttctcatctactatctcatcttcaaatctaccttgtgaaatagtcaagacagggattaatcatagcatttagaagtgaaaaagtgaaaataatcataataggaatgtgctcataacattcctgcttctcctacattttacttataaataaactgttgaacagagggagattagtgactgataaagccaagaacagaactaat

SEQ ID NO: 240142 - DNA, 345 bp, Homo sapiens
gaagctttttggagtcaactgaccaagttttaaatcaaggctctgtcatgttcttaatgggtgacctaaacaaagtggatgatgatgtctgtcatttacagttggctgtgaaagtcaaacaagataattttttaaggcatttgcacaattgtctggtacctagaaattatttaataaatggtgactattgccattgtcatccttcctatagtatctatactgggaattatggtgcaagccataaggttcattcccattgattccctattttctaggttgctatcaaataatgaagatatttgtgtggcaggaaggttggtgccaatattcccttagggacttctc

SEQ ID NO: 240143 - DNA, 336 bp, Homo sapiens
ttttctgaggaccctccagtgcataggtccaagtacttctgtctatttaaaaaaaatcaagaggaataagtttctgagctattatcattgagtacatatggaaacaaataagagaacaatagttactggggttcacttgaggtgggaaggtaggaggagggtgaggatagaaaaactacctgtagggggagggtgaagatagaaaactacctatcggtgactatactctctacctaggtaatgaaatcttttgtatatcagacccagtgacatgcaatttacccatgcaacaaacagcacatgtaccccctgaagtaaaagctgaaaaagaataaa

SEQ ID NO: 240144 - DNA, 408 bp, Homo sapiens
gactagcagtggaaagaagaggagggggagggaagagaacttagacccgactttaagaagcgttgtattaaagcaagataagaacagtacctttgagctggagcaaaacctggagtaaaaaaaagggtttttgcgaaagtggcgcgaagataatatcatgtgatccgaccccagggcgtctccttccccttttgccaaactcccctcccctcgaaaaaaggggggttgggggagctacatccgctcctcacaaactattagcataattaattgtgtcctacagctgcagccagagctcccgggtcaatgagtaaacatatcctcatcctcttcaacatcagaacaaaaaaacccattaccctgattttggaaaatgttcccaaataaatctcattatcttcaaaagtc

SEQ ID NO: 240145 - DNA, 695 bp, Homo sapiens
tgaaacatcccttggatttcaagtcagaatacttgatggaaggcaacgttacagacgtgttgcaggcagcgctaggttctttcagcaccctgctccacattttgctttgcattttgctttatttcggccaagtcattctttataagcagaggcaaatatcatggtcttcctttcagcaatgtggtcagtaagcaatccacagaaagcatgatttctagtgacaacgacagcatttctgaaggggttattctttgttagcctctctcccttttcctcaactagactatgcagtggatttaatcatcttccatcagcaacctccattaacatagtgctttacagtttgccccctgcagcaacccatggagatacatgtcatttattagcccatttttccagtgaggaaactgagtttagaaaagttgaatgacacacatactgctctaattgcccgagaacgttgaaacaaagagttatttgaatgacacaccattactttctgtatgtacacagtatctagtttgtggtttataaagggtctcaaagtatattgcaggattttatgatagaccggatttgtttattgccggcagttgctgtctatttccggtgacattctttaggttctagtaacctttggagagtgtttaaaaggtgcaaagtgatatgcctggaaagtttagtttcataactac

SEQ ID NO: 240146 - DNA, 436 bp, Homo sapiens
ccccgagacggagtcttgctctgtcacgtaggctagagtgcagtggcgcaatctcggctcactgcaacctttgcctcccgggttcaagcgattctcctgcctcagcctcccgagtagctgggattacaggcgtgtgccaccacgcctggctaatttttgtatttttagtaaaggcggggtttcaccatgttggccaggctggtctccaactcctgacctcatgatccacccgccttcacctcccaaagtgctgggattacaggcgtgagccactgagcctggccgatctgtttattatcttaactgtagtgatggtttcacaagcataaacacacatcaaattttgcactttcaatatgcgcggtttagtgtatgtcaatcatccctcaataacactgttaaaaaaagaaacattaaaattaaattgtaaattatc

SEQ ID NO: 240147 - DNA, 364 bp, Homo sapiens
ctttttgaaaagtgataacagttgaagaattttgaggccaacctcagacctttcagataaaaattgcctttgttaaaagatttgtcagtacggtggctcccacctgtaatcccagcattttgggaggccaaggcaggctgatcgcttgagctcaggagttcgagaccagcctgggcaacatggtgaaaccccatctctacaaaaaacacaaaaattagctggttgtggtggtacacgcatgtagtctcaactattcaggaggccaaggtgggaggatggcttgagcccagtagttggaggttgcagtgagcccagatcatgcccctgcactctaccttgggcagcaagagtgagaccctatctc

SEQ ID NO: 240148 - DNA, 452 bp, Homo sapiens
tgatgaacatgccggcagagaggttgaattccgaggtgaaccagtcattccaatccaagggagacagcgtttggaagctttaatctatgaaagtcctggatagcatcttccaatagaaggctgtttcatctacactgaagatctgttgtttactgttgtcaccttcatcgatgatcataaccagaacttctgggtgacttgctgcagcttctacatcagcacttgctgcttcaccttacatgtctatgcagtggagatggcttctctccttcaacttcatcaaccaacctctactaccttcaaatgtttcttgtgcatcttcctcacctctctcagccttcatgatattaaaaagagttagacccttgtctgaatcaggtcttggctcaatggaatgttgtaactggcttgaacttctattcagaccactaaaatgttctccacatcagcaa

SEQ ID NO: 240149 - DNA, 675 bp, Homo sapiens
tgttcattaagcatttagtgtcttagaagtgatatgtttactgcagaaaaatttggatagcatgcaaaaaatgaaacatactatcacaatcctatgatataacttaaaaatttctttatagcttcatggaggtatttgatgaaaattgtatatatttaaggtatataatgttttgatacatgtatacattgtgaaatgattaccacaaggaggttactaaacatctccatcaccttgttaaattgagttaaacaaatttacaagttgacaaattacatttacaaatttatgtaattttttacgctttttttttttctcctttttctggagaacggggtctcgctatactgcccaggcaggtctcgaactcctgggctcaagctatcctcccgcctcttgcctccctaagagctgggattataggcgtgagccaccccacccggcctatgtcatttttttatgtggtgagaataaataatctcagcaaatttcaagtatacaattcattattactaagatagccaccacactgtatgtcagggctccagaacttactcatctcataggaggcagctacttttaacattcttggtgtatatccatccttcaggattttctgtatatttctctaacagcaaaagtttttgttaagcctacaatttgaaatgcctgggt

SEQ ID NO: 240150 - DNA, 518 bp, Homo sapiens
ctggcttttacatttgttattcctatattctttacagtggcctttaccctttacccatcttgatagttaatcccttttactagttattctttttattaaattttccctactcaaattacttctgtaattattgtctcctgactagaacctggtacataaggccacttgatttttagcaaaggcaccacctacaattaagcacgaaaagaatggtcttttccagccaggtgcgttggctcacgtgtgtaatcccagcactttgggaggccgaggcaggtgggtcacgaggtcaggagttcgagaccagcctggccaacatggtgaaatcccgtctctactaaaaatacaaaaattagcctgacgtggtggcacacacctgtaattccagccactcaggaggctgaggcaggagaatcacttgaacccaggaggcggaggttgcagtgagccgagatcgcgccactgcactccagcctgggtaactagagcaagactctgtctcaaaaaaaaaaaaaaaa

SEQ ID NO: 240151 - DNA, 344 bp, Homo sapiens
ggattgagcatcacactaaaaaccttccccggaaaaagggaccaaaggatgtaaactgaaaattttagatggtcctggctttccagttagtctccttcacctacatctggatcatattgaaaccaaatgtttgtgctgcttctaacatcaagatgacacaccagcggtgctcctcttcaatgaaacaaacctggctggagtgcggtggtccaatcatagttcactataacctcaaacacctgtgctcaagtggtcctcccacctcaacctcccaagtagctgggacaacaggcgtgtgccactacacctggcttttatatttttttggtagagattgggtctct

SEQ ID NO: 240152 - DNA, 891 bp, Homo sapiens
aattcggccattatggccggggagtacactgaaattcaaagtcatgctcataactgttaatgaaagcagattcaaagcaacaccaccaccactgaagtatttttagttatataagattggaactaccaagcatgtggctcctggtcagtgtaattctaatctcacggatatcctctgttgggggagaagcaacattttgtgattttccaaaaataaaccatggaatttatatagtgtcgagacagatgagtaaatatccatctggtgagagagtacgttatcaatgtaggagcccttatgaaatgtttggggatgaagaagtgatgtgtttaaatggaaactggacggaaccacctcaatgcaaagattctacgggaaaatgtgggccccctccacctattgacaatggggacattacttcattctccgttgtcagtatatgctccagcttcatcagttgaagtaccaatgccagaacttgtatcaacttgagggtaacaagcgaataacatgtagaaatggacaatggtcagaaccaccaaaatgcttacatccgtgtgtaatatcccgagaaattatggaagtgaatcagttgaatttgtgtgtaaacggggatatcgtctttcatcacgttctcacacattgcgaacaacatgttgggatgggaaactggagtatccaacttgtgcaaaaagatagaatcaatcataaagtgcacacctttattcagaactttagtattaaatcagttctcaatttcattttttatgtattgttttactcctttttattcatacgtaaaattttggattaatttgtgaaaatgtaattataagctgagaccggtggctctcttcttaaaagcaccatattaaaacctggaaaactaac

SEQ ID NO: 240153 - DNA, 1318 bp, Homo sapiens
aattcggccattatggccggggagtacactgaaattcaaagtcatgctcataactgttaatgaaagcagattcaaagcaacaccaccaccactgaagtatttttagttatataagattggaactaccaagcatgtggctcctggtcagtgtaattctaatctcacggatatcctctgttgggggagaagcaacattttgtgattttccaaaaataaaccatggaattctatatgatgaagaaaaatataagccattttcccaggttcctacaggggaagttttctattactcctgtgaatataattttgtgtctccttcaaaatcattttggactcgcataacatgcacagaagaaggatggtcaccaacaccaaagtgtctcagactgtgtttctttccttttgtggaaaatggtcattctgaatcttcaggacaaacacatctggaaggtgatactgtgcaaattatttgcaacacaggatacagacttcaaaacaatgagaacaacatttcatgtgtagaacggggctggtccacccctcccaaatgcaggtccactgacacttcctgtgtgaatccgcccacagtacaaaatgcttatatagtgtcgagacagatgagtaaatatccatctggtgagagagtacgttatcaatgtaggagcccttatgaaatgtttggggatgaagaagtgatgtgtttaaatggaaactggacggaaccacctcaatgcaaagattctacgggaaaatgtgggccccctccacctattgacaatggggacattacttcattctccgttgtcagtatatgctccagcttcatcagttgaagtaccaatgccagaacttgtatcaacttgagggtaacaagcgaataacatgtagaaatggacaatggtcagaaccaccaaaatgcttacatccgtgtgtaatatcccgagaaattatggaaaattataacatagcattaaggtggacagccaaacagaagctttattcgagaacaggtgaatcagttgaatttgtgtgtaaacggggatatcgtctttcatcacgttctcacacattgcgaacaacatgttgggatgggaaactggagtatccaacttgtgcaaaaagatagaatcaatcataaagtgcacacctttattcagaactttagtattaaatcagttctcaatttcattttttatgtattgttttactcctttttattcatacgtaaaattttggattaatttgtgaaaatgtaattataagctgagaccggtggctctcttcttaaaagcaccatattaaaacctggaaaactaac

SEQ ID NO: 240154 - DNA, 1264 bp, Homo sapiens
  misc_feature (568)..(568): n is a, c, g, or t
aattcggccattatggccggggagtacactgaaattcaaagtcatgctcataactgttaatgaaagcagattcaaagcaacaccaccaccactgaagtatttttagttatataagattggaactaccaagcatgtggctcctggtcagtgtaattctaatctcacggatatcctctgttgggggagaagcaacattttgtgattttccaaaaataaaccatggaattctatatgatgaagaaaaatataagccattttcccaggttcctacaggggaagttttctattactcctgtgaatataattttgtgtctccttcaaaatcattttggactcgcataacatgcacagaagaaggatggtcaccaacaccaaagtgtctcagactgtgtttctttccttttgtggaaaatggtcattctgaatcttcaggacaaacacatctggaaggtgatactgtgcaaattatttgcaacacaggatacagacttcaaaacaatgagaacaacatttcatgtgtagaacggggctggtccacccctcccaaatgcaggtccactgacacttnctgtgtgaatccgcccacagtactacgttatcaatgtaggagcccttatgaaatgtttggggatgaagaagtgatgtgtttaaatggaaactggacggaaccacctcaatgcaaagattctacgggaaaatgtgggccccctccacctattgacaatggggacattacttcattctccgttgtcagtatatgctccagcttcatcagttgaagtaccaatgccagaacttgtatcaacttgagggtaacaagcgaataacatgtagaaatggacaatggtcagaaccaccaaaatgcttacatccgtgtgtaatatcccgagaaattatggaaaattataacatagcattaaggtggacagccaaacagaagctttattcgagaacaggtgaatcagttgaatttgtgtgtaaacggggatatcgtctttcatcacgttctcacacattgcgaacaacatgttgggatgggaaactggagtatccaacttgtgcaaaaagatagaatcaatcataaagtgcacacctttattcagaactttagtattaaatcagttctcaatttcattttttatgtattgttttactcctttttattcatacgtaaaattttggattaatttgtgaaaatgtaattataagctgagaccggtggctctcttcttaaaagcaccatattaaaacctggaaaactaac

SEQ ID NO: 240155 - DNA, 1263 bp, Homo sapiens
aattcggccattatggccggggagtacactgaaattcaaagtcatgctcataactgttaatgaaagcagattcaaagcaacaccaccaccactgaagtatttttagttatataagattggaactaccaagcatgtggctcctggtcagtgtaattctaatctcacggatatcctctgttgggggagaagcaacattttgtgattttccaaaaataaaccatggaattctatatgatgaagaaaaatataagccattttcccaggttcctacaggggaagttttctattactcctgtgaatataattttgtgtctccttcaaaatcattttggactcgcataacatgcacagaagaaggatggtcaccaacaccaaagtgtctcagactgtgtttctttccttttgtggaaaatggtcattctgaatcttcaggacaaacacatctggaaggtgatactgtgcaaattatttgcaacacaggatacagacttcaaaacaatgagaacaacatttcatgtgtagaacggggctggtccacccctcccaaatgcaggtccactgacacttcctgtgtgaatccgcccacagtacaaaatgcttatatagtgtcgagacagatgagtaaatatccatctggtgagagagtacgttatcaatgtaggagcccttatgaaatgtttggggatgaagaagtgatgtgtttaaatggaaactggacggaaccacctcaatgcaaagattctccgttgtcagtatatgctccagcttcatcagttgaagtaccaatgccagaacttgtatcaacttgagggtaacaagcgaataacatgtagaaatggacaatggtcagaaccaccaaaatgcttacatccgtgtgtaatatcccgagaaattatggaaaattataacatagcattaaggtggacagccaaacagaagctttattcgagaacaggtgaatcagttgaatttgtgtgtaaacggggatatcgtctttcatcacgttctcacacattgcgaacaacatgttgggatgggaaactggagtatccaacttgtgcaaaaagatagaatcaatcataaagtgcacacctttattcagaactttagtattaaatcagttctcaatttcattttttatgtattgttttactcctttttattcatacgtaaaattttggattaatttgtgaaaatgtaattataagctgagaccggtggctctcttcttaaaagcaccatattaaaacctggaaaactaac

SEQ ID NO: 240156 - DNA, 1975 bp, Homo sapiens
  misc_feature (194)..(194): n is a, c, g, or t
  misc_feature (395)..(395): n is a, c, g, or t
  misc_feature (742)..(742): n is a, c, g, or t
  misc_feature (994)..(994): n is a, c, g, or t
agatcattccatcaataaaacaaacaaacaaaacatattaagcactgtactagggaccataaaagtgcataattttctaagtacctagtgtatctgcataattacaaagaactgtcatggccaatagcagcattttttacatacacaactctgtaacgtaactacttgaattataggaacatgtgacaaaattntctggagtatttgtgttactataacaaatctggcacaatttgaaaccaatctagaataataatttttaaaagaaggtaggaaggggaacagaaatgtaagattatgcaactggccaaaatagaagcagcaacagctttcagtgtctgggcagcagaaagtgcaggattgcaaaacttggaaggagagcagggggtccacangctccccaggctccctcagtcacacagggcagagagtccgtctcgctgtgctgaggaggtccatccacaccatagactcaactacgatggcccaatgtctaacagacatggaattcagtccccaagtgatagaaaaaaaaaatggaatggacaaaatatatgcggataagtgacttaaattccccaaatttgttgcaaaacatctacctagatatctaagaagctcagcaaagcccaaccatagtaaatacagagacaaccacacctcactcagcaaactcttgaaaaccaaagacaaagagaaataaaactaaaaagtcgcaagagaaaaaatatacttataatanataggaaaacaaggatatcaattagagctgacttctcactaacacaatggaagccagaagaaatgggatgaaataatcaaggaataaaagaaaaaatatggcgaacccagaattctctaaccagcaaaaagtatcccccaaaaattaaggtaagagaaatatcttttagataaatgaaaattaagaaaatttgtcaccaacatatctgcattaaaagaacgagtaaaagaatttcttcaggatgaagaaaantgacaccagttagaaatattacgagagaatgaagagcaccaaacacagacatagaaatagaacacagacctaaaaatctatggtaaagagtatgtatttacccttctcaattattttaaaagactcttttcttaatgacttttggcagtttaaagcaaaaataaaaattgcactgtggagttcattaggaatattgtgtaaaatatgtatacattgtaccacaaagaaactgtgaggtaaatggattacacagttataagattcttaaactttgcattaagtgatatatatagatgctagatagactataaaaaattatggatgaatattaaaattctaacaatgacactaaaaatacaacacaaggagttatagcttaaaaggagtagaggaattgtaatggaatacaataaataaataaataacagaagggagtgaaaaagaacagaacaataaaatgtaacaaacaaaaagcagctgggataagtaaaacaaatagcaaaatggtagacttaaacaaacaacatcaataattacctaaaatatcaatagactaaatgccaattaaaaggcataaatgtcaggataaaaaaaagctaactgtttgtggatataaacaatatacattaaacatgaagacaagttaaaatatgataagaaagacctacaaggtgaattgtttgcataaataagctcacagaggctgggcgtggtggctcacgcctgtaatcccagcactttgggaggccaaagcaggtgggtcacttgaggtcaggagttcaataccagtctggccaacatggcaaaaccctgtctctactgataatacaaaaattagccgggcgtggtggcacatgcctgtaatcccagctactcaggaggctgaggcaggaaaattacctgaacccgggaggtgaaggttgcagtgagccgagatcgagccacagcactccagcctgggcaacacgctgagactctgtc

SEQ ID NO: 240157 - DNA, 184 bp, Homo sapiens
aggcgctgagggtttgccatcccctcagtttgcaggctaaagcatcagcccaaaccactgctccttacacttttaaaagaaaaccccttaggtaatgcatattttcaaatatgaggcaaatctcaattatgcacacttaatcataggttaaggtttttggtaagtaaaatattcttattttata

SEQ ID NO: 240158 - DNA, 4079 bp, Homo sapiens
  misc_feature (1033)..(1033): n is a, c, g, or t
  misc_feature (1220)..(1220): n is a, c, g, or t
  misc_feature (1849)..(1849): n is a, c, g, or t
  misc_feature (2480)..(2480): n is a, c, g, or t
  misc_feature (3087)..(3087): n is a, c, g, or t
agaatcctacctaatgcaacccgacttttggcctgagccattcaatggataattagtcctaactgtattgctggagtggaccattactgaagtcttaccttttttgtccttgcttttaccttgccttgttccagcaaggcttaagcatagctttaggtcctatgttatgcgcatgttatgtgattgtctgattgattacattataaactctgcacaggcggcatcacggtctttctgccctttcctgcctccctccgtccttgcactgccttgcttcatggagctttgcacttagcaggtgctcagtaaatacttgctgggtggttgacacaggattacatgttaatccatcatcttcaaaggctagaaccagacctatttaaaaaaacaaacaaaatccttccttttaaaagtggcattaccttcttaccctcacaaatgttcattttagtcgcctttattgctttctggggtagggggtcttaagggagtaactcagagagcctctttaacttaaaagaggcataataaattacagtctttaagagaagatcggatgcctgcgtgcctcccagaagtgggttaggagcacagaattctagatggctcctttgtttgcaccccaccctgtctgcagggctggcctcccacagcagtgtgtggtatcctacagatcactattaaataaacagtcccttgaaatcacaacattaaaaagtgctgtctatgtattgtaccaggagagccaaatattatggaaaaggccaaatatttccactgtgttaagaaaataagaacccagcagcatggaacttcccactcagtaggcaaaagatgtggtggagacttcaaaagggtggaagaaccatcaagacagcttgagctgcaacgggtgactgccccattaaaaaaagcaagtgtgtgtgtattccagatgcagctgcagaaatcgcaacaccacctttcaactgggaaataaatgaatgcaccaacgtatgtatcgtggctcacccaagcaatcgtccaactgtgnctagggctgggggagaggttaggaggagagaggacgaagtacagaacacaaacagtctttgttctccaaagacccaaaaggcagattcacaggaagagattcctcatcctggtctgaaatgaagatagacacttggccatagggctgatggctctagcagaggccctgcccttgggatctcggcagnatctcagccaggagggctccctgactctggaagtggaatattgagtgataagaagtttggcttctcccacccactttccaccaccaggtagagcttgtgaagcctgaaaagtctgtagggccaagcagcctgactttcatggaaggagacccaggagtcaacttgttttaattaaaaagttaggttgggttatctcagggccacccccagggagggtgatgcttccaagctgaccaaattctgagctgctgagctgcttactttaatgagcttggggaagctcatttgaggagtggtggtaaaatcgctcactggacttgcaacatgagaatgttgttcatgaatcatcaggaagaactcccaggtgtggagaatggactcttgttccttcagctgatttgggacctggcactcacactcgcttactaactttctctccctagcgtaagcattcgcttcctgcctagagtctggctacctacccatcatccccattacccaaaatacaaaaacagagaactgtagcatcttattacgtagactttcctctctcccaaaagatgtgccagtgcccctgcctgccgtgccaggccctgcagggatgatgatcatggtctccagcatttacngagctgtaattctgcacagggaaccaggccaggctctgtgcaccttcctagagcctcacagcagtcctctgcggggcacgactgttctcatccactcttgtcatccccgttttacagctgaggaaccagtggctctggcaggtgttgggacgtctgcccatggtcacgtagactgtgtggcagagccggaattcaaatctaggccccatgacttcagtactgctctatctgaggactatgcagagatggcatagcccctccttcaaaagctcatagtctagttgtagagagcagagctccttgcatggacaaataatccaccaggcccagcagaactgggtaccacaaaccgcatgggatgtctaggaaggggctggaaggaagtcacggtgcactgagaatgtggtgtgccaggcggtgtgctatgtacctatgtgtccatgacctctttaattctcaaagcactcctgtgaggttcactttacaaatacaggactgaggctcagagagtcatgtagcttgcccaacaccacacagctcatgggtggtggagctgggcctgaacccacatgtctttctaactccaaaccacattctctttgcatgataccatgatagacactccatttcngtagtgttaccgggagtgaaggccttgaaggatgggtgagaggtgagaagggagaaaggagggagtgggcattccaggctgagggaaaggaagaggagtgggcctgaggagcagcaggaattccaccagccccgcccagaagtggcccagtttttatcaccatcccaaatacatcgccttggtgtacatgaacttgctgagggcctagtttccatggctccgaagaggtgacatctccctcccacccctcatccaccctgagctccctggctgatttattcaatgtggtcatctgcaatggttgtggacctgtcaggatgacagattcgcctggggacatcctcctgtggaaggaactggattcatcccttgatcacttccatgccctgtgggtctctccctacctcttgctcattctacgagttatccctccattagccgggccgaagcatcctccaggcagggtttcctaattacctaatggtgaccatgctaccctttgccaaccttatgaaaagcatggccatgtccgttatctcatctgatcttttgctcttccaaccagcatttattaagtgcctactgtgtgccacacaccatatcaggngctgaagattcacgggtgaaccaaaacaatttcatgcctggagagaagggaggttacagagtagctgagatgactgacattaaccagaattacaaagtgcccggctctaaaatgtgctccgggacctggaaggaattacactcactagggggaaaattctagcatggacagccagttccatcagaatcctgggatcctctgtctcctaggatctgcatgtttctcagtagatctgaagctgtttgatcacctgcaggagctggggagtctgctggaggcctgggatggagttctgggcttagtctggagagaatatgtaaacaggtgcagcctccttaaggaaacctgagaggcagcaccacacagtggaaagaacagttttggagtccaacagacctggacatgcatctgggtttatatctgtgtgaccttaggcaagtcaccgaacctctctgagcccaagtatcctcacttggagaatagggatgatgatagcatggatgtgcctgaaatgcccagccaggagcccaacacatggtgacctgagcaaacatgggcatctttattagctagaggtcatgaaactctggatgtgcaaagcaggccaatttgtgatttgtttaatttacaagatttctcattttatgagaaaacttgctgacaatactttcatattgggagctcctcttaggtttgaaaaataaaataattggccgtgcacggtggctcacgcctgtaatcccagcactttgggaggccgaggtgggccgatcacgaggtcaggagattgagaccatcctggctaacatggtgaaaccctatctctactaaaaacacaaaaaattagccgggcgtggtggcaggagcctgtagtcccagctactcaggaggctgaggcaggagaatggcgagaacccgggaggtggagcttgcggtgagccgagattgcgccactgcatcccagcctgggtgacagagcgagactccgtctc

SEQ ID NO: 240159 - DNA, 483 bp, Homo sapiens
tggagtggcttcgaaagcggccgaggcagccgaagccgctttcgaagttagcaaacaaagcgtctccccagtaaccgcccggttccagacgaggctcctgccactcaggccgcggagtcgcagcgtcgcccagcccccggctcctcctccctgcgtctctcctccctccgctcccggctccccagcggataggagccaccaatcccagccacagacaacccttcaaacgaaatagcgaggcggccccctctaacgggcggcgggggcgctggccccctccctgcgccacatctgtcccgcaccgggcgcagcagctgattcatctgcagccaggtccgggaaggaactgtgctcccggcagttgcagggcagcgtccgggcgggtggcttgtccccaggaccgcgctccccccgagccgttttaggtgtgtgttctcttctgtcccgagcagtcagcaaaccacagaagaaaaaaatcgtaag

SEQ ID NO: 240160 - DNA, 392 bp, Homo sapiens
tgtgctgtataattccatttatataaaactgtagaaaatccaaattaatctgtagtaacagaaagcagatcacttctttcttaagggggaggaaaaactacatagagcacaagggaacgtttaggagagatgtacaggatcattattttgattgtagtaatgtttccactgacatatatatttcatcacgtctttcaaccgtgtcgcttattgaacgtcaattatataataataaaaattttttaaatcagaataaaagaaatctattaataaggttcttaaaaagattaaatgatatacattgggtgctgttatggactgaattgtgttatcccaaaatttgaatattgaagccctagtctgaaataagactgtatttggagataggtcct

SEQ ID NO: 240161 - DNA, 399 bp, Homo sapiens
gaaacacaaaagaaaaaaatattctataattgtacatatatgaagcacctagagtcgtcaaattcatagagacggaaggtggaatggtggttgtcaggggctgtggggagaaagaaatggggagtttggaaatagagtttcagtggcacaagaaaccacttcagtggaggttagttcacaacaatgggaatatatttaacagtactgaactgtacacacaaaaatggttaaggctacgcatggtggtgtgtacctgtaatcccagcactttgggaggctgaggcagatggatcacttgaggccaggagtctgagaccagcctggccaacatggagaaaccctgtctccactaaaaatacaaaaattagctgggcatggtggtgtgcacctgtaatccca

SEQ ID NO: 240162 - DNA, 277 bp, Homo sapiens
gtgggaaagacagattttcgaaacgtggccatttttctttgggcctttgttagctgcatcagatggaggaggtagcctggtggactccttcagtcctcgctcttggacacagagctgtctcccagcctttgttgttgttttctccaaggatgtcgaacacaggctgaaaagctccctaaatcaatttcacttaaaatggtgtccaccctcctactaaagagtgacaaagggtgttggttaggatttttatcttgaaaactgatttgtaaagtcatga

SEQ ID NO: 240163 - DNA, 704 bp, Homo sapiens
gccaaatgtattgcctaattgcagtagggctttcatccctggttttgacccagttgtttttagtgaatttttctcctgcctctttagaaaaggaattgaggttgctcgtacacatgcaccccagtgaagcaaggtgtttttagtaggggataaaggggacatatgggtcatgttacaaggtgaagctcaagaagaattagtgcctgtaaaggttaccaagaaatcccacaacactgttaaaggttctgaccatcctggcatccaaagcaaagaggagaatgccccttgcaggattaacactatcctaaataaaataatcacggctaacttttatagtacttagtgtgagttgagtgactttcccaaggtcttggagctcgcctattacatacatggcagagccaaatttgaacccaggtagcctggctgtggagcctgtactcttaccactatgctgtccttcctcccttacagacagtttacagccttttgacaggagacgtacagcctcttctggcacaaggtctgagaaaagtatcttcgaagtcccttcaggatgtcactgggtgaccaccatgaaccatgtccccaatggatcctttgattaattcagaccaccagaaagccaactattctgattgcattggtttgggcactgtggaatcgtttgatccaagagacaaaaaagggctaaaagttttatt

SEQ ID NO: 240164 - DNA, 286 bp, Homo sapiens
tccatagtgctaaggagaagaaaccctgtcctagggtcaaggttggatgctgacaagactaatttcaagtgatttcaaacgattgtggggaaaatacccagaagttgacaggagcaatatgtagatatttccttctgtaaattatatttccctaatgctaatgctggagcatttggaaacacgtgtataaatatttgaagcacaaaaccagagagatgctcttatgtatttagcttctagttttaaataatagatactacaataaaccttgattaaaccttgatta

SEQ ID NO: 240165 - DNA, 371 bp, Homo sapiens
ccttgcagagcagggctaactcataggcagtgtgcctgtaggcagcctgtttggacttccttaaacactttttttttcttaaatagagacaggttcttgctatgtaacaggtgaagctgggaatagcccttcctagaatgctgaggtgggaggatcacttgagcccaggagttcgagaccagcctgggcaacatagtgagacctcattgttacaaaaaaaaaaaaaaaaaagacaaaagaaaaattagtcaggtgtggtgatgtgcacctgtagttccagctactagggaggctgaggtgggagaatctcttgagcccaagagattgaggctgcagtgagccattattgcaccattgtactctagcctagg

SEQ ID NO: 240166 - DNA, 507 bp, Homo sapiens
agaggtgctgcattccctctgacgattgctcccagcaggtgtccacaaggcagactggactcaaggacatgcaggaagatggctgcagtgtccagtgttattcatccacaaaatgcagcaagtgaagtcgtgagcagaaagcacgggccatccaacctacatgtgggcgaaccgtggtgactacagggaaacaaatgcctttgcaagagccaaagctcccaagtggtctagtccacaagtggggatcttgcaagtctgaccctacagctgtgctttctgtactcaggtctggctgtttctccatcattttaaacatgttgcttccgtgaagcaccagtttgtggttttcatgagactacagcagcctgccaccctctttgagaaccaggccacttctgctcctctatttcaaaattaactttaaattacatattgattccagccctatgaaatttagcaaacagtgcattacatttaaataaattataataatcaagctccagtgtt

SEQ ID NO: 240167 - DNA, 242 bp, Homo sapiens
ctcctcccaccccactaaattagggatgacatcattctttaagtatacaagatggcttgcttcttcacaacaactaaaacaaataggcacagccctagaactccaccagaattatttctataaattaaatgttcccatctgttcccctgcactttaactcctacacagctaagcttctaagcagtttccatttcactctaagtttaagacacatatttactataatagcagtcagcttaata

SEQ ID NO: 240168 - DNA, 270 bp, Homo sapiens
tggtccttgtgcccctccctcagaaaattctggaactgcccttggatccctctaatggctttctgtcatggtctgaaaaggcttatcaacttattaactttaaattgttgaaaagggccaggcgcggtggctcacgcctgtaaccccagcactttgggaggccgaggcaggaggatcactgaagcccagagttcaaggctgcagtgagctatgatcgtgcccaccactgcacttcagcctgggctacagagcaagaccctgtctctttaa

SEQ ID NO: 240169 - DNA, 617 bp, Homo sapiens
aaaaagatctttgcttttaaaaaaagtgtttatcactgcggcctctgatctattagtagttcctgacccatcagatccattcagtggctcatgtgcagctttcataaaataaaataaacttgataagagtggaaaataatcttgtcttgtacagaaaaagttgttttttgaaacttttttcatgtatgtgactgtatgttctgagtcacagcataaagtgtaatttttactgtgggcaatacatatcggagaagttttaaaaaggatgctgaacaagatcatttcttcagcctcatgattctcagcatgtattgagtgcttaggggtatggaaaagtggggaaagtggagatgtgggttcaagtgccagctttgccattaacaggcgtaaggaagttgtgctgtctgctggcatctctacttcctcatctatgaaatggggcatgggatacatggttttaggtatgtaagttccgttagcccttgattccagcttttaaattgagaagttaaacacccatgactttccaccttacagattgtaaaactgatgttgaataagtttacataacctgaaacttcttacctccttcatcatgcaaaccaagtgaaccaaaa

SEQ ID NO: 240170 - DNA, 174 bp, Homo sapiens
agactcaaatgattgtcccacctcaccttcccgagtagctgggcccacaggcacaagccaccatgcctagctaatgtttcttttttttgagagacagagtctcgctctgttgcggtgagctgagattgggcccctgccctccaacctgagcggcagagccgggctccctctcca

SEQ ID NO: 240171 - DNA, 1857 bp, Homo sapiens
  misc_feature (116)..(116): n is a, c, g, or t
  misc_feature (719)..(719): n is a, c, g, or t
aaaacgtacttagggccattaggatcacatcaaaatatagtgcatggtaattatgcatgaaatagaaggttacctgctgtttaagtagctagtttcttgataatgttgcaataaantattgagagaaaattggtttctcaatagcagtggaacaccttgtttaagggacaaagtgaactgcattaggctgaaaaacgaaaagggggaaaataaaaatagattttatcatcaaagttgtcagtggatattgttctcagtcttaaagaattatttttagtctttcccttcatcaaaatggagaattatttgtttgcatgtagattgtggtagagttggtatgtttcagatttaatgaaatgcagaacagaataaatccctcgggaaagaaaggaaagaggggatacgccagacttagtatatgagagtagtcaaaagcctggctttaaaagtcaaagaaaccccaaagttgacacctggtccctatgctaactagctgtgtgacctcctccatgttacttaacctttccgacctcccagtttctttagtagcaaaatggagatgttattattaatataacagaccttgttgaaaagatgaaatgagacattgtatgtaaagcactttaggaggacatgtctgtcacatggctgtgctaaattagatgttattatcctgtcaacaggctgaatagcaagggggaaaagttctaaactttggnatcctgtcgtaatacacacagagatctcattccttgtgaaagaatcctcgttttggaatgggatgctgccttggggaactgccatgacaaggatatgaagttacaactgtgatggtggtcctttgaagaatatgtggagacttttctctatattggattattatatttttacttttgggaaataattacactttgaatcgtttcatgattatttggctaacaaaacaggtgatttctgtgagtatatatatgtatatgtgcgtgtgtatatatgtgtgtgtgtgtgtgtgtatatgcatgtatgtgtttatttatttattttaccatggacatgcccttgatgaaaaagaaatactttgcttggttattcctccaagtggaaatttggacattaccctttgttcatggtggggaagatttttagttattccacatatcagaattatctacgtgaatagttagcacataattaggattaaaaagtaactagttgcagaaaactcattattttttctaattctaagaaagtagcttcattttgggtattagagaaaagctcaagagattcactgattaatatgtattgagcctgttacatagctgacaatgtgctagtgttttcacagtttctatctaacttacaaaataactgaaagaggaagaaaaatattctattccatatgtattagaaaactatcctttaagttctaaagttggcttatgatctcctgaattgcacaatatttatctgcaaaccttgaaactatttaatcagagacttctgaccccaaaatgccaacattactcttggtggtctttcaaggtaattcccccttgtttttagtgtatccattgaaacactaaatggaaatatttagtgccctgatgctaagggaatattccaactagcggcactgattccactccaggttattaattaaacagtagcaatcagcccatctgatctttaatattctattgctgctgactgatgcccagacatcagacattttgtaatctaatacaaaattgctctgtgcttaggactaaagaaaaacaacacataatttatactatgttttatctttattttcaagttccagaggatacgctggttgtgtctttcaatgattaactt

SEQ ID NO: 240172 - DNA, 363 bp, Homo sapiens
aggctatgtgtttaagaaacataaatgaaatttatgtttagacttgggtcccatcgaaatccgaaacacttctgatccaagcattttatgtagggatactcaacttgcagcagtcattcaccattcctccctacccccagccaccagtaatctactttcctttattatggatttgcctattctgcacattatatataaataggaatcataaactatatggtcatttgtgattggcttccttcatgttttcttcaagtttcaactatgttgtagcatggatcagtagttcatttctttttattgtcaaataatattccgttgtgtagacataccatattttgtttatccattcatctatcaata

SEQ ID NO: 240173 - DNA, 533 bp, Homo sapiens
ctccagcctgggcaacagagtgagactctccatctcaaaaaaaataataataatactgtattgtacacttaaaagtctgttcaaaaggtagatctcatagtaagtgttatcactataaaataagattgaaatttaaaaaaacacacacaataagagaccaccacgagtacactaggatggctaaagttatgcaatttaaaagactgacaaggccgggtgtggtggctcacccctgtaatcccagcactttgggaggccgaggcaggcagatcacctgaggttgggagttcgagaccagcctgatcaacatggagaaacttcatctctactaaaaatacaaaattagctgggcgtggtagcacatgcctgtaatcccagctacttgggaggctgaggcaggagaatcacttgaaccggggaggcagaggttacagtgagccaagatcgggccactgcactccagcttgggcaacagtgcaaaactctgtctcagatgatgatttcacaggtgatatatggcaaaagtggccaaa

SEQ ID NO: 240174 - DNA, 489 bp, Homo sapiens
cagtgttgtaccttttaaaagagcttagaatgctaggatgattcttacccttgcaatttcaactgcagattttgtatttttattaagacacgaaacaaatttccattcatttttactaatatgtagatattttgcagaattcttttgtgttcatgggatacataaagtttgagtatggacattggaagcatacaggtctgagtttgaatctcagttctgtcacctgttgcttgggtaactcacctgagttcacagctttagtttatctgaaaaggactgtgtcttaatctgtatgttctccttggcatgtggcccagtcaccgttacatagtgggcatttgtttattccacaaatgtctgttgctcatatactgtgtgccaagcactgtcttaggtaatagagatacaagtaatcatacaaataaatatgaaaaatgaaccaataagtattgtgaaggagaagtatgggtgctatgatagtttataata

SEQ ID NO: 240175 - DNA, 406 bp, Homo sapiens
tcgaactcccgacctcaggtgattcacctgcctcggcctcccaaagtgctgggattacaggcatgagccaccgtgcccggcagaaagtcttttttaaattcccacttcctctttaattgagaaagaagtagctgcagatttgtccccaatccaaacaagaaggctcatcactgccccctgcgggtcctgttgggcataccccaatgcactgggccatgccctggtgccatgccaggcctctgtgatatccctgaggaccaagatatgattatatctgactcaaagtcagatagccagtcttggaatcccagctttacgactgaggttatgagacttgggcctcccttctgtaaaatggagatgatagtattacctgtttgtgagtaaagtctttggcacagaaaca

SEQ ID NO: 240176 - DNA, 495 bp, Homo sapiens
gctggtcttgaactcctgggctcaaacaaccctcctgcctcagcctccagaagtgctgggattccgggggggcccaattccgagccccccccccccccgaatctgtcctcaccaaaagaagaagaaaactttgcatctgaggttgcgactgagcaaacagaacattaacttagggaaatttctccgtccgtgcattaactgaaggaaactgccgtgttgctctctgcactatttagagagaatgtgagttaggaactgttggaagagacatgaatagatatgaaatttttgtcatgacaaaactaatgctgtgttaataagaaacagatgaaggacccatctgtttcattcctttctcttcttaagaggatatagccgaattatggttaagtaaccctgaggacagttacatgatagcctttctcatgtcaaatgtgtggaaagagagtgtgaggtcgaagtttcaggtattgtaaataaatatcttgtgacctg

SEQ ID NO: 240177 - DNA, 402 bp, Homo sapiens
ttttttgttttccagtcccattttccactgctttggtcagggagtgagtcccctgatgtcatccgaggatatgaggcatcgctaaatctggccatcccctgaagcacccagcctcaccgacttcctgaagcgtggatgaacgctgctgccacaaatgtgctgtgacaaccgctgacaaggagagtgagtgatgtttgtgccatcctgctgagcacgagggagctgcttggggaagccaggggctggggcatctcaatagcactgagggcagcctcgggggggcttcacagcacacccacccccagatcactgctgattctgggggatgcatgacagagctttctgaccttgcacttccctttggctgctaaactgaatgaagcctccttcttagacccaacc

SEQ ID NO: 240178 - DNA, 481 bp, Homo sapiens
gttccccaggctggagtacagtggtgcaatcttgagtcactgcagcctctgcctcccaggttcaagcgattctcctgcctcagcctcccaagtagctgggattacaggcgtatgccactatgcacagctaatttttgtatttttagtagagatgggtttttaccatattggccaggctggtcttgaactcaagtgacccacccacctgggcctcccaaagtgctgggattacaggcgtgagccaccacgcccagcctaatgtgattattgatacagttggtttaaatctgctatcttggtattcattttttattctattctttattccccttttcctcttattctttcttttagattatacattttcctatgattccattttatcctcctgtgttagctttattagatttagagtttatagcatacatctttaacttatcatagtgtactcagcagtatatttcccttctcccttcttagc

SEQ ID NO: 240179 - DNA, 360 bp, Homo sapiens
gcagtctccagagacaacactggagccatcgtaggtgagtccgacttccccagtgaactggctcaaggacctccctttctgtgactcttcaaaggtgtggttcaaacagaagagcacgttttaaatccaatgacactgaagtatgagcttcatatattgtttcagataaaaatggcttcttaacatatatattatttattaaaattaaaaccaaactaaatagttcatgcaatgtatagaaactaaactaatagatctttgcttttcttaaacaataagcttgattaggatgtctgtttttacacctaataaagcttttggctagcacctaatgcattaaataagaaggatttttacatt

SEQ ID NO: 240180 - DNA, 465 bp, Homo sapiens
tacactcatatgtgaaagaaacttgatagagatttttctaaatttgatgataattacaaagatttgcacaatattaccaataacaagttgtaaaactgaaagaaatttttctacactatcaaaatttttttaaaaatctatcaaccatgctaaaggaaagactagtccatttctatattctctttatagaaaattctgttacaaaattagtgttatatatagagaggtgattaaagagtatgaccttaaagtacaaaggaaaaagtgttatagagatatgtacaattagttaataagatacattttttgattttgttatctttttgtgatgcattgttaactttttaaaatttgtaatttgtagtgactttctcattcaaagtaaacatttgtatgtatttcacacagagtcctgaaatgctgaaagtacagatgcaataaaattaggtattgattgaaatactc

SEQ ID NO: 240181 - DNA, 629 bp, Homo sapiens
aaataatggcaaatgtgatattggatttagggttacatttatagataatatgttagaaaccataattttatatttctctttcccacttataatgggaattaagtatgttcattttagcttttctataataaataccagcttagtctaccacagcaaataaactttttttaaaaaagcagcaacaacaaaatacttcactgtactcttttcttggtttattgagatattaataaactgatagttttgtctcatcaaatattcttttgttctgaaacactgatgcatttattttggcttctgaagttttataagaacatgttatttggggagtattgatgccaactttattgaaaacacttattttactaagctaatgactaagctaattgactaagatgcaggattatagtaacctggttgatttcactacattcttccttacaaagcagaaggtgaaatggaaattttggaggaggtggagtgagatttgtatgtcacaatctattttcacaggatgcagtgccttcgttttcattatactttcagtatggttgacttcttaaactagtttgaagatttagaatttgaaatgagaatatatgattagaaaatacaggagctgtgcattt

SEQ ID NO: 240182 - DNA, 331 bp, Homo sapiens
ccctgtaaatagagtctgtagcaaaataagagctgcttcctccaacttatcacaagtcgccgttggtcctctctaaggagggctctcttctgagttcattgtacaatagttggaaacgtggtgatgtgctgttcgtttatagaaagctgactttttataaatatatatatatactaaaaaaggaaagaaatcccccacagtgtgtgtcgtgctagtgccagagaccatctgtagggatatatcttcatattgtgtgtttcaaattatgcattccaggctctagtgggttctttcaatcttgttcctttatttttttcatttggtatttctc

SEQ ID NO: 240183 - DNA, 315 bp, Homo sapiens
gatcccagctgaaatggcacattctatttgtcatcacatctccttaggctcctcttggctatgatagtttctctttccctgtttttgataaccttgatagcttcaaggagtgctgatcaggtaattggcagaatgcccctctagtggaatttattccatattgctttttaattatttacttgtatgtatttctcccatattttcctatgatgttttgaagggaaagaccaagtcatctgtgtatctccaacacttagcattcaataaatatctgttgagtgaataaataaatgggtgaaaagtgaataaaactga

SEQ ID NO: 240184 - DNA, 759 bp, Homo sapiens
cccttccatgtatacatcagtcactgttctgctgctattgctaccttttctacctcttaatatggaattcttgaagagatttacaggaagtggaaagaaatacacgctcccaaatggcttgagtttaaaacatatgtcttaatgatagaaaagaatcatatccctggagtttctagatgttattgtattcctattatttcaaaaatatatttttgaaaaattaatgtttcccagttaaactaagtacatgttcactttaagaaattttgctgtgaaagccagaaaaaaaatcctctgaaatttcactacccataagcagcttaccatgtttcgtcttttggatgttggtttttttttttttttttttttttttggggagtccaaaatcaactttttttttttgagacagagtctcactttgtcaccaaggctggagcacagttcagtatctcggctcactgcaacctccacctcctgggtttaagtgattcttgtgcctcatcctcctgaatagctgggactacaggcattcaccaccacacccagctaatttttgtatttttagtagaaactgggttttaccattttggccaggctggtctcgaactcctgacttcaagtggtctgtctgccttggccttccaaagtgttgggattacaggcatgagccaccatgcctggccccaaaatcaaattttaaaaaattgttttaaacataccaaaggtagctatccatgctatcctttctagctaaacata

SEQ ID NO: 240185 - DNA, 355 bp, Homo sapiens
gtatatttggggctagaatttaccccagaacttatttataacttttagttcctctctacatgagttccttagcagtgagttcaataaatgttttggtataaggccaccctggttcaaagaggagaaggctgttgtccttgcttctctgcggtgccttcttcctcccaggccctcagacctgcctctattaagtgggagaagggaggcctgggtaggtaggtcccagatcttcagattgcccggggaatgggtctggagtcctctaggcgttgttgtaagcattttgctgggcctttaatgtaactttccagtacaaatgatctctctttaaaataaaacaaaaaagctaagctta

SEQ ID NO: 240186 - DNA, 370 bp, Homo sapiens
ggggtttcaccatgttggccaggatggtctctatctcttgacctcgtgatctgcccgcctcggtcccccaaagtgctggtattaaggtgtaagccaccgtgcctggccccatttattttaataacatattctgggtagttttgtcctgggctgtgttaattatggatttctatttattgaactctgtgcttatttatggagaaaattttaagtagctatataatgattttgaggaaaaacctctaccaaattttaagaaatttggcatttgtttaaagtgcattgtttttttttttcctgtgtgttttgtttttaaccacctggatagaaggacttgcctcctccccacattgagagttactgccatagt

SEQ ID NO: 240187 - DNA, 386 bp, Homo sapiens
tggcccagtgctgtctttgcccctgcttctacctcctcacccaagggtgtacactccacagggtgtgcaggaagcatgacgcaggcatctgcacggcttcctggtgctgcctccgtggccctctgtggcactgtgtgatgccttgtcttggaattgtaagtaatcaattctttctttctatgtcatcagtcacccccataaattaacatccctgcttcaatcattgaggctggggggtttgatcaggaaggagcatgcagagtgtcgggggtaacagcagtattctatttcttaaatggattggtgagttcaagggtatttattgttattcttcagactgtacatatatgcctttgtctctatggcatgttccacaataaaaatga

SEQ ID NO: 240188 - DNA, 170 bp, Homo sapiens
cagccgcccagggaggaggaggctgggctaatgcagcccttagtcagcagctgggctcggttttgaaacaaaagccaatgtcctccctcggagtccgcggccggtcagctcctagggggaagaaagccatgctgcccagccggttagtggcccaacttacttttccagag

SEQ ID NO: 240189 - DNA, 434 bp, Homo sapiens
gagagctaaaggctacataataagttgtgagcctacctagggtattagcagaggtgtcccaaggaagctccctgtgagccaaaccccaaaggatgggtggaaattagctcaactaagtggagaggtgggatagtcatgggccaacgccccaaggcaggaaagaataggcctggtctgtgggtctgagaggatggagagggctgaacacgggccaaaggagaaagttagggagggaaggtggagtccctggcaggggctcagctcagaacagggggagccccaaaggatgtgaggcaagggagcaatgaacaaatctcaccattgtgagatctgaaattcagaacggtggcataggccagagtaggacattgtgaaaaagaaacaattagagaagcagaaagagtgcttggaaatgtcaattatgctgctgaatt

SEQ ID NO: 240190 - DNA, 481 bp, Homo sapiens
tggttgagaaggtggggctgcaaggtcatgttctttagtggggatccatccacatggaaaaatgaagctggtgtaaaagagggtttccctaatatcattgattacacctcatctgctacattatctttcaaaacaaaacgactctgtgaggtaaatagtggtatctccattttatagctgtaaaaactgaggcttagaaaagataagtgatgggtcgggcgtggtggctcacacctgtaatcccagcactttgggacactgaggtgggtggatcacgtgaggtcaggagttcgagaccagcctggccaacatggcgaaaccctgtctctactaaaaatacaaaaattagcagggcatggcagcaggtgcctgtaatcccagctacagggaggctgaggcaggagaatcgcttgaacctgggaggcagaggttgcagtgagctgagatcgtgccattgcactccagcctgggcaacaacagc

SEQ ID NO: 240191 - DNA, 476 bp, Homo sapiens
cttacatggcaaatggaactttgcagaagtgactatgtttaaggatcttgaaacagggagattattcaggtggccccaatctaataatctgaattcttatacttggagaatctttccagtctttagtcagagaaagagatgtgacgatggtagcagactcagacacgtgcttcatcactggctttgaagaaggaagaagaaggctgcaggccaaggaatgcggctaccctctagaagctgcaaaggcaagaatggtttctcctctagagcctccagaaaaagcccaggctagctgacaccttgattttagtccaatgaaaactgtgtcaggtgtctgacttccagaactgtaagataacaaattttgttgttttaacccactaagtttgtggtactttgttatagcagtaatagaaaactaatacagttttgttgttaaactatacaagatttaaaaaatatattgttaacatgca

SEQ ID NO: 240192 - DNA, 419 bp, Homo sapiens
tcttttcttctcttcttttccttctatactggttgaagtattttaggatgtttaccttagcatctagctataacattgtttttgtttgcctcaatgtgaagagagggtgatacttggtgacagtccattacaaatgtgaacctaaggctgggtgcagtggctcacgcctgcaattctagcactttgggaggctgaggcaggtggattgcttgagtttgagaccagccagggcaacatggcaaaatcctgtttctataaaaaatacaaaaaattagctgggtgtggtggcgcgcacctatagttctagctacttgggaggctgaagcgagaggatggcttgagcccaggaggtggaggttgcagtaagctgagatcatgtcactgcatccagcctggacaacagagccagactctgtctc

SEQ ID NO: 240193 - DNA, 2121 bp, Homo sapiens
ggttaatggaggaagagatggaaggctcgtgccatgatttggtactgggtcatctgactgtccatgcagttagctacgcattctgcagacttcctccatccccagctcccacagttacaaaaagttctttcctgctctgagttctgaaatgctcacattcccagctccaagaggattcccaaaatgaatgtttaccttctcttacagttcagtctagccttcacatcttgggaggggttagagggggcagaggaaaggaactttagctgcctaggtgcagtttaaagagggtctaggtactgtggctctcagcagcctttgaccctggggccactctcttcatcttatggaggacaaggcctttggttccctggaggttcactgaaaatcactgacatgaggcagattgattaataggataaaagtcacacaaatttatttaatgtgagtacacatgaaccttcaaaatgaagacccaaagacacaggggaaattgtccatttttatggttgggtacaacaaagtatggacagccatgtagaaatatgattgaacaaaaagggtatgatctaatgctaatagactgagtggggaaaccaagcaaggcctgcctgtctggattcttcttggcctctctgagcatgcattcctctgtgaacccagaaaatctgagacagctctcagtccagaaagtttattttgccaagtttgagggccagcctgtgacacaacctcaggaagtcctgatgacatgtgcccaaggtggccggggcacagcttggttttatacattttagggagacatgagacaccaatcaatatatgtaagaagtacattagctctatccagaaagatggagacaactcaaaccaagccccctaccttccaggtcacaggtagctgacagacagatggctgcattcttttgagtttctgataagtctttccaaaggagacaatcagaatatgcatctatctttgttatctctgtgagcagagggatgactctgaatagaatgggaggccctgagcggttcccagcttgaaggggcccaagatattttcttttcacaccttccttctggatgtggggcaggaccctctctggaacaacgtagaacagatcatttctttatggtcagtttttacacagaaagatgaagagaaaattagagtaatgattttaggtttcatggctgactttgggaaaagggggttctggtttatacggctgccttggagaaggggaattctagttcctagttcctatggcttgccttgtgggacaatgagactgagacaggagggcaagagaagatcagagaaaaacttttgcttctggggcagtatctatatctatctctctatccatctacatatctatactggttgaattgaagtggtagtcattataacaatctttcaactattctgcatgcctgaaaatctgtataataaaaagttgggggaaacgctttaaaggctgccccgtgacaacatggattacctctttctctatttccctaatattgtgcattatcaacaacttaatcacatttcattgtaattatgtgctaagaaactttctcccataggctgtgtaaaagtacagtagctgcacacagtaggcactcaataactgcttgcatgcctgaatatcctctcctatgaggctgtccttgagaattaataagccaccggagtgggaagacgccagagttaaccatacactaccctttgatgcttcattcttcataacacagaagctcatgagcgagcacaggaaaggcgccgtggctgggaggaaagacaataaatggctatggactgaatgacagctcagtttaaaactcaggagatccagcctctgtggtcatatgattaactggctgtgtgaccatgtccaaacactaacctctctgtgcctctgttttctcacttgcaaacagggagtaataatgtgtcttggccaataagtggagaaaagtgttttgaggccgggcgcggtggctcaagcctgtaaccttagcactttgggaggccgaggcgagcggaccgcctgagctccagagttcaacaccagcctgggcaacacggtgaaacccgctctctactaaaat

SEQ ID NO: 240194 - DNA, 1907 bp, Homo sapiens
  misc_feature (631)..(631): n is a, c, g, or t
  misc_feature (1354)..(1354): n is a, c, g, or t
  misc_feature (1700)..(1700): n is a, c, g, or t
  misc_feature (1816)..(1816): n is a, c, g, or t
  misc_feature (1902)..(1902): n is a, c, g, or t
atataaaactcttcagaacagcacagggtgatttgggtatagctatctccagataccttggcccttgttcttggagttttaggaattcagagaaaggaagaaaggatctgaaggacctagtgaagactctccttgaggccactcatttcagggaagcgaagggaagagggtgggagaagtagcttttgttgtgtacccaacagaccagaaatctataatacaatatctttttcaagcctcatgattggctgagttttacaaatgaggaaattaaggacagagaagtaaagtaagtcatccaaggtcacacagcaaggaggtggcagagccaagaatcgacccaggcgggtcagattcaagcttgcgttcctgtcactaggcataggacaggaagtggggtggtaagatgtcacccctaggccaagggggcagtggtttaaatgggggctcaggtcagaaaagcatcctatctatggtaatgcgggaacctggctttgttctgatactgaactcagatctgagacgccacccaggtgtatgttatatgggttctgagaggtccagcagcaagcagggcagttgggcccaccccagagcagctgtacgcccttggagatggcctgaaattggncaagctctggaatgagggtctgggcattgctcccagcatctgaccttggaaggaagcagaagcagagctgtggttttgaagattttccttccccaacggagacccattgcagcctgttatgaaggacccagcacaggtagagagagccaacaaggtggaatggggggctctggcttggtgagatgggggaggagaaagaggggtcactcctgccaagctgacctcagctgggtaatgtgatcagcctgtcatggttctgagccctgatttgggaagaacaaagaggccaggcccctctgcctcctctagcccaggaatgcagctgggggccaggccgtgaccaatggggaatgcaggttgggagcgcagcgaatgcagtttgtagagcaaggctttcatgcactgatgggagccccactcacaaagccaggctgacatgcccccgcgcttccaactttgatatcccagccccgccttgggggagccgcacatccccaagctgtctgtgcccaactgccccgctgtggccctcgagtgatgatggggtgaagagtggagagctcagatcccaactcccctcaaccccaccaggattcctagacaccaacatctccttgtccgtctctctccacctcgggatgtctgaggaatggacagggggaaacagcctccagctcctgagggctgagagagatggatggagagacagaaagatggaccacnagagaggccgcgggcctcaggcagcccctgctctgagcaggtcacagaaactccttgaggccacccactccagggaaatgaataatgttagaggtgggggtttcactcctggcttggacatctgaatactttctgcattccaaagctgctagctccccttctccagccccagtctcttttcccactggccgattcactcagtgtggggtccttcaggactgcccttttctgccttctcaattatccactgccccctccctcctggtgtctctgtgctcctgcgcttcctctcctcctgggtgttaataatgacagtgctttacagtttacaaagcacaatcacctncagtaactcgtttgattcttataggagccctgtgcagcagggactctgatcctcattgcatgcaggaagagaagaaggaagaggaggtggaggcttgatgaggaggtggtggcctntgatggcaagagtgagatggggagaatgtccagcgggagaagtaagggccaggagcttgaaggaactgtgaaataaagatatttcnccttg

SEQ ID NO: 240195 - DNA, 1061 bp, Homo sapiens
ttttttttcttttcagtactttgaaaattgtcattccactgtcttttcacctgcattgtttccagtgaaaaatctgtcatcctcatctttgttcctctgtatgtaatgtcttttcttctcctctgttgcctttaggactttttcttgatcacttgttttgagcaatttgattatgatgtgcctttgtgtagttttcctcatgtttcttgagcttcttggatacgtggatagttttaaccaaatttggaaaaattttggccatcattttttcaaatatttttgccacaatttttttgtcttctcccctcttctcccttggggagttacatataatattagaccatctgcatttgtcccgtcgctcacaaatgcccattttttttttcttttggtactttaaagaaatctcttacattttacattggatagtttcttttcttttcttttttttgaggtggagttcagtggtgtgactttggctcactgcaaccactgtctcctgggttcgagtgattctcctgcttcagcctcccaagtagcagggattacaggtgtgtgccaccatacccagctaatttttttgtatttttagtatagacagggtttcaccatgttggccaagctggtcttgaactcctgacctcaaataatctgcgcacctcggcctcccaaaatgctgggatcacaggcttgagtcatcatgcctagccacattggttattttctattgctaacccttcgagttcactaatctcttcttctgcaaggtctaatctgccatcaatcttttccagcataattttcatctcagacactgtggtccttatctctaaaagtcccctttggtcttttataaaaaatcttccatgtctctaattaagatgttcaatctttcttctaactttttgaacacttggaatatagttataataactactgcaatgtccttgtctgttaattctaacatcttctggttcagtttttattggtatttatcttcattgtgagttatatttccttgcttctttgcataactgaacatttttgattggatgccagac

SEQ ID NO: 240196 - DNA, 159 bp, Homo sapiens
gagttagaattgagaactccacagagggctttatgtgtccccaggaaggtactgtgagcttattgacaaggaagctggattcaagggcagggaggaaacaccttgttagtagatagagcagaatttgatatgttggatttcattttatggttttaggat

SEQ ID NO: 240197 - DNA, 478 bp, Homo sapiens
gagtcagagatagagaatcactttactaaagttacattttacctaaattcatggatgtttccagaaaaatatgatgacttccaaggagtctattagaatgaatccacacatactttcggaaaaatgctaagggccatgcactaatactatctctgtttcattgtttgagaagaacttcaacatgaatgctgttcactcttttccctagttagagactaagctaggcttttcgtactaggtttaagaagctaaatcgctgtataatacttcccagattcaggactgaaacatttaacttaaaacataaaaatgatttattgttgtgtctcctgtcttccctgataacttattaattgccacttgggctgaactgcactgtatttttatgcaaatcaaatcggcattccataatgttcctgcttcccaatggtaattataacagtttgtgttgcattaaaaaacagttttgccaagaatt

SEQ ID NO: 240198 - DNA, 492 bp, Homo sapiens
tcagggaattagtttcctcatctgtgaaatggggatcgtcttaccgattgcagggggttgtcgtgacgagattactttcagctcaacatagacatccacttgggaggtgctcagcctgccctttgggctcacccagccttcccgggaggactgagccctgtgagctagaacccaggacacccatgggatctcccgcacgacctgggcctggggcttcaagacagaatccctgtgactaaccctgggccccgagaagcagccttgccagccaagccagtgctgttctgagatgggctgcagacggggctgggggtcccagtgaagagctcctgccaggggctccgaggccgcctcagtttcttctgatgtcctctgctcaccccccacgcagagcctgcagcaaagaatttgtgatgtaatgaagcacctgctgcccctctctcccctacgaccctccttaaccaaaataaagactcctgaataagatcatga

SEQ ID NO: 240199 - DNA, 411 bp, Homo sapiens
cgcagccctcgcggctgctctctctctggagtagccattcttttattcctttacttttcctgataaacttgctttcactttacagacttgccctgaattatttgttgcacgagatcaaagaaccctctcttggggtctgggtcgggaccgcttttcagtaacatctttctggtgatcacggaagagactatagtgtggaaacacccgacccaaaggctaactttgagcccggtgtggtggcacgcacctgtaatcccagctactcaggaggctgaggcaggagaatcgcttgaaccccagcgacagaggttgcagtgagctgagatcgcaccactgcactccagcctgagcgacagagcaagactctgtctcaaaaacaacaacaacaaacaacaacaacaaaaaaccaaa

SEQ ID NO: 240200 - DNA, 410 bp, Homo sapiens
tgtttgtcatacattaacatcaacaacaaaacatcaaatgtgttataaacactaaggaaagtagttattatgaatttttttttccccaagccaccaccagaacctttgcagaaaggagagaattctcatttaagaaggtttgcttagtcgtcagtccaggaagtgtctttgtaggtatttgtcatctattttgtaggaacctttatggggctaccctgcagaaggttataagtccttctttctctgagtacaatttcttttcttttaggtttgttttctaactgaccttgacagcatttccaacaggcaaaattatgagttgtccctggagaagtgcttcatttcagacccaggttatagtacaagagacataatgaaactagaaaaaaaaaatagagagtcagccaaat

SEQ ID NO: 240201 - DNA, 591 bp, Homo sapiens
tgtcacccaggctggagtgcagtggtgccatcttagctcacagcaacctctgcctcctgggttcatgctattctcatgcctcagcctccggagttcctgggattacaggcgtgtgccaccacacccagctaatttttgtatttttagtagagatgtggtttcgccatgttggccaggctggtctcgaactcctgagctcaagtgattcacccgcctcagcctcccaaggtgctgggattccaggtatgagccaccgcgccctgccttcctttttttctttctctccctcctctcataccctccagccaccaacgaagcctggaacccattgcttttgcaatactatttttctatttcacatgtaggtatctggaacccctgccagaggcctccaaatttttagctacacaatctgtgccatgctgtggtcccttctgcctctcccagggtgatctggagagacagaaactgcagagccaggctgaaggatcagctctccttacccccaagatacttcagagaagcaaggatctttaacttttaaagaaattcaaaccagtgaaagagattccacatcagtggtcattaaca

SEQ ID NO: 240202 - DNA, 683 bp, Homo sapiens
actgattaaatacctgtaaataccgcaaggaagtttcacaagatagagtaggcaggagaatgaaatttcctgcgaccatgtacaatgtgtactccaccttagtaaagaaaacaaacaaataaaaaataatataaatcttacttacagaacaaataagggtctccaagctaacagtcacaacccaacaactcttgacctctgccttatccccaaccctccaagaaaaccctagaaagaaaagtagaaaggtggggcagggagaatacacacaggggaagatgttgatccaaggatacaaagttccagttagacaggagaaataagtttttgagatctattgcacagcctggtaactatagttaatatcaatgtaatgtatattttgaaattgctgagaaagtagattttaagtaatggttgtaccataaataaaggtgtgttaaatgatagatatattaattagtgtgatttaaccattctgtaaggcatacatacattggaatatcacattgtaccccataaatatatacagttattatttgtcaattaaaaatatatggaaagaaatcaagattaaaaataacagctttgttctgcctatcgacccagaaaggacttatagacatggacaaggttcagtgtgagcatacctggttcctggccttctggtcctggttctcggg

SEQ ID NO: 240203 - DNA, 623 bp, Homo sapiens
actgattaaatacctgtaaataccgcaaggaagtttcacaagatagagtaggcaggagaatgaaatttcctgcgaccatgtacaatgtgtactccaccttagtaaagaaaacaaacaaataaaaaataatataaatcttacttacagaacaaataagggtctccaagctaacagtcacaacccaacaactcttgacctctgccttatccccaaccctccaagaaaaccctagaaagaaaagtagaaaggtggggcagggagaatacacacaggggaagatgttgatccaaggatacaaagttccagttagacaggagaaataagtttttgagatctattgcacagcctggtaactatagttaatatcaatgtaatgtatattttgaaattgctgagaaagtagattttaagtaatggttgtaccataaataaaggtgtgttaaatgatagatatattaattagtgtgatttaaccattctgtaaggcatacatacattggaatatcacattgtaccccataaatatatacagttattatttgtcaattaaaaatatatggaaagaaatcaagattaaaaataacagctttgttctgcctataaaaccgtaagtccaattcagc

SEQ ID NO: 240204 - DNA, 468 bp, Homo sapiens
gtgcctggcacacgcagcagacattgagcaaatacattttttgaatgaatggggaaaaaacgttattgctagaacataattttgtagaaacgcagtaacttgaagttctgctctaacaaagagaaaataatttgctgttagcatgttgctgtggattttgtggccaatacttggtgcatcctgtgagactttcccaggaacatgggaatcagattgcctgggagaagcaaaccccagacctgcaaatagtgggtcagaacggaagtgtgctgttacctttaaaaagagcaagtgggctgggtgccatggcacacacctgtattcccagttacttgggaggttgaggcaagaggatcacttgaggccaggagtttgaggctgcagtgtgtctgtgaatagcctctgtgctccagcctaggcaacaaaacaagaccccctctctaaataaataaacaccccatctctaaa

SEQ ID NO: 240205 - DNA, 386 bp, Homo sapiens
cagtggtgcgatcccggtccactgcaacctccacttcccgggttcaagcgattcttctgcctcagcctcctgagtagctgggactacaggtgtacaccaccatgcctagctaatttttgtatttttagtagagacggggtttcaccctattagccaggctggtctagaactcctgaccacatgatgtgcccgccttggcctcccaaagtgctgggattacagctgtgagccatggcacctggccacacacgtctttttaaatttaaatgaggatgtggccatattacagcccaggttttctctgactttagagtaccttttgggacatagggccttcctctctaccctttctgtacacagccatcataaacctctttcaacaagcc

SEQ ID NO: 240206 - DNA, 428 bp, Homo sapiens
ctggttccatagagtgggccctgcagacagcctggactcggggattgagagagaaaggtggaatcaagatgagcatctggaggaacgagggtgccatttgccaagtctggggaacaaacccaagaacttcatcttaggcatgtcgcacttgagaagcccatggagatgtcgagtactgagctggctacctgatctggaactcagaagagttgtttaggctgaagatgtaaacatgggcatgatccacacacagccctaatcccacttcaagaaactctctctgttcagtccctagggcactctgcatttatcccatcctgattcccatagctgtagcctcactcctactcccttctgtactgtaagcggtctgagggcaggcattgttccacatctctttttagccttataaagtgtagtacatagca

SEQ ID NO: 240207 - DNA, 388 bp, Homo sapiens
ccagaatgaggcttcaaggtcccaaggcaccaccaattgtaggcagtggttggaagagaactccatcagatgtcctcacacccataccactgacccataaggcagcagccacaaagggccccaacagcaccccctatggagagagcttaacatcgtgctgactgtaaaagatgcttaaaaggaccctgcccattacacagacacttgattgaagggttattccagagctgagccaataaattgatagccgtcacagacacattgttctacatatataccctggcattatcttctgataccacatgtaattttatagttgctgattctgtaagaaccatttctcagataataaaacagtgcctataaaatggccaacatatctcttgaa

SEQ ID NO: 240208 - DNA, 482 bp, Homo sapiens
ctgtccctccagaaaaggataacctttggtcccctctgctttggaggaatagaggacagcctgccttgtgcaaatcttttccaagctttcattaaagatcacctctaagcatttccactttacagtggaagcgagcagatgccttcttgctgaactctgacccacataccattcatcttcccaataataatgccaagtgacactcgaacagcaggacaattagatcaaatcctagagcacacccagaggagaaaaaaacagcatgtctaaataccaccaacaaaagtttaggagaacagacttagaggaaggagagaaaaaaaggaaagttcttaaaaagagaaagtgccctgggtgtagtggcaggtttattttctcagtagatccttgaaagaagtagaattgcagcatctctttgcttaaaggacaagtgagagtaagtctccatccaccaggtaggggagatcaggttctcctgaaga

SEQ ID NO: 240209 - DNA, 410 bp, Homo sapiens
cccatgaagatgtggctgctgccattcctataaacagctgggatgtgtgggacctgcacacagagtgggggtgtccccggggcaacctgcggtggcaatgcaggacttcctgagttgtcctgtcaaatctggagatcagtcacatccagccctatctggcccttacctctctgctctcaagtttgacatgcccactctggtcatctgagttgatcttggccccctgaacccacctaacaggctgcaccttctatgtggaaccctcctggccctcccaggagaatgcagggggagagtgggcttcgggggtcagatcgcctgggtttgagccctagttctgccactcagtagctgtgtgactttgggaacattctggacttctctgtgcttatttccttatctgtaaaata

SEQ ID NO: 240210 - DNA, 498 bp, Homo sapiens
gtggtggagccgcaggccttcctgggcctgcgccagatccgcctgctcaacctctccaacaacctgctctccacgttggaggagagcaccttccactcggtgaacacgctaagagacgctgcgcgtggacgggaacccgctggcctgcgactgtcgcctgctgtggatcgtgcagcgtcgcaagaccctcaacttcgacgggcggctgccggcctgcgccaccccggccgaggtgcgcggcgacgcgctgcgaaacctgccggactccgtgctgttcgagtacttcgtgtgccgcaaacccaagatccgggagcggcggctgcagcgcgtcacggccaccgcgggcgaagacgtccgcttcctctgccgcgccgagggcgagccggcgcccaccgtggcctgggtgaccccccagcaccggccggtgacggccaccagcgcgggccgggcgcgcgtgctccccggggggacgctggagatccaggacgcgcggccgca

SEQ ID NO: 240211 - DNA, 396 bp, Homo sapiens
tcaaatgtcccctaggagacaaaatttcccttggttgagaatcactcctctacaaaaataatttatactatgttggaaaggacaactagcttaaaacattgatttatatagtttcagattggaaagagagctttactgcatttgggggtcacacactgagacagagtctcacagtcacccaggcagtggcacgatcatggctcactgcagcctcgaccttgtttctacaaaaaataaacagttagctggatgtggtggggtactcctgtagtcccagttactcaggaggctgaggtggaaagatcccttgggcccaggaggtcaaggctgcagtggagttgtgatcgtgccactgcactcctccagcctgggtgacagagggatacctagtctcaa

SEQ ID NO: 240212 - DNA, 707 bp, Homo sapiens
tatttttagtagagacgaggtttcaccatgttagccaggctggtcttgcactcctgacctcaggtgatccacccgccttggcctcccagctcatgctgatattacaggcataagccaccacacctagccaagaaaccattctttgaacacaagcaaatatactttggagaaaaatttaataatcctggcagggctacattcaacataattctgttatgggggaaggcagcatgctttggctgctcagtgagctatgttctgtacaaccaagtgaaattgctaaaaaaagattctcctgtatacagtaacttaaagtgatgcagtctacttaagatcagatctgagttacaaaatcaaaagtgacagctcctatgttcttttaaagtccaatctctttttttcattgttgtgctccaaatgccttgagtacctgatgtagagtaggtggctaataaatattggttgaatttcttgaacgaatctgttatgaaaagatctactttgctcatctctgtgccccaatagcaggagcttgaggagaaggagaaaatattgggtcagagcttttgattaatatgtatgattctattaaacgggttcactaaaccaaaaaaggcaaaggaaaacagttaaaccaagagttcttgaggttaaagtcttgtgatgattaaaatcatcatcctaagatgatgatgacataaactttc

SEQ ID NO: 240213 - DNA, 955 bp, Homo sapiens
gtcctaagtacgaagtcttggttgcgaccaaatttacacccaagagggacaaccctgagcagttcctggaggctgcggccacctccctgcaggctctgagcccccagaagcagagctttgttttggaggttctgtctgggtgcctcgagtaccggaagctgctgaccgtcgtggtggatgccttctacgtggaggatggccgactctgcctgcgggttgaccacagccgcttcgaggtgatctgctacctagccacattcctgctggaggaactcggcttccagctattctgtaacatcatcaagtcccagcccgtggataagatgtgcaagttcctcaggttcttcttcaaccccctgcacctgtgctcatggatcaaggatgagtggagcctcatctacgagccagcccacgtgaaggagaactggatcgaccccctgatgaggtcccccagagcacctaccagccacccaaggagcagcagcagctggagacagtcaagaggtacaaccgccgaaaggccgaggagctgctgctgagggcaaacatcgaggaactgcgctgcgccatgcccaggtcctgcagggagcgagtgcaggtaccgcccagctctctcaagacccatcatcgaggtgccatcttctcaagccatcagaaagttcctcccaacgccatcgcagtgaccacttatgtagccttttcccactgagggccggggaggggcggattcccagtagcactgggaaagtgtgccttgagcccactgcgatgtggcccctaagcaggcgggtgtagacgcgcacccacatcccccgggaggaagctcacgggaaagcacctgcaggtgctgcctctgggtatctccagatgttccgtgacaagcatttcatgtctctgtaaggaaaaaacaaacccaggtatgtttgccaataaagaaaaagcaaggtaatgacga

SEQ ID NO: 240214 - DNA, 427 bp, Homo sapiens
gagctcggtaccccaggccccgaacaatgaccagcctgacctccttccctttactgccaacgctgacccaccagcatccggtggtgttagctccagccctgtttctcctccaatgcaggccgccaccaccctccccttcacccacatccaccaagctgtcagccctggcatttctaggccccctcccactcgcagctgctgaccataggctcttcctcccaccacttcagcaggtcccccagagcacctaccagccacccaaggagcagcagcagctggagacagtcaagaggtacaaccgccgaaaggccgaggtgagctgtgtgcgacccctgccttcctagagaccccatatgagggattgttcggggcctgatcatataattaggcctgatgttattaaaagggctgatagggttacggtaag

SEQ ID NO: 240215 - DNA, 1658 bp, Homo sapiens
  misc_feature (868)..(868): n is a, c, g, or t
atcatggccacaagaatttgctctgtcgagggtcgtggtgccagctaggtgaggtttggggctctgtcactattggtcagtgtctgttacatacttgggccccagcagtgccctggcactgcacccccaactccatgggcacatttgtcctgttctcttcatctcagtttcctctcctgtaaaatgggtgcattgactgtgcagtggttcctccaaggtcccctgatccccagatgcggcccagggctctgccaaccagtctcaatgtttcaaggtggccaccatgaactttctgcatgtcgaagtaaaacacttcatgcctttctgcacagaggttagccctccacaggctctgggttcaaatcctggattccgttgatgccctgggcacgtccttaaagcccaccaagcctcagtttctccactgtaaaccaccgtcctggggggcatggtgaggatgaagtgggcttgtgcctgggacgttcctactcagccagtgccctgcctgaaacactaggatcgaactgtccattcagccaggcaccttcgaactcctcccaggcataatctctgtctggaaactccttgtgttgaataagatgggaaaatccatccatgagaactgaagccacaaacagcgcttgcaggacaagaggagagaaggtctttgggaggagatggccacatcgtttctagtccccacctcacacctgatcttggcctgtctggaacatgcagtgtgacccagggaaggccatgggtctcccagaggcccggtgaagcggggagcctttcctattcccagttaagggcctttgagaggcctcattttcttccctgaaggtctcgtccttccagcaaaatcagngtcaacaacaggccctctttctggagcacctactgagtggcagtgttacaagcatcatcctattgaatcctcagctcaccccttgttgaggggcttctattactcttatctgaattctactcatgaggaaacaggtccagagaggttaagcaatgtgcctaagatcacacagcaaatgaggggacggagctgggatttgaacccttgcttatctgatccctaaccataggaataccaacattgtagttagttgttaactaatatgacctgcatgcaatgggcacatgccatggttggcaaccactgggctgaggcttctacacacgcacttgatagcttactctctgattttgctttttccacctctacgccctggaatgtcagttccacgaaggcagggatttgttttctgtcttatccaccactgtattttgtgcttagatggtgcctgggacaaactatttataggatgtttttcatttaatctcagtaaatctgtgaggtgggctggcgctgtggctcatgcctataatcccagcactttgggaggctgaggcaggtggatcatttgaggccaggagtttgagaccagcctggccaacctggtgaaaccccatctctactaaaaatacaagaattagctgggcatggtggtgggcacccgtaatcccagctactcgagaggctgagccaggagaatcacttgaacccaggaggcggaggttgcagtgagccgagatcgtgccattgcactccagcctgggtgacagcgaggctccgtctcaaattt

SEQ ID NO: 240216 - DNA, 978 bp, Homo sapiens
gggcctcttttatgagaacattaatcccattcatgagggctctacccttatgacctaatcacttcccaaaggtcacatctcctggtaccaaaaccttggagattaggatttcaatatatgaatttgatggggatacaaacattcagaccatagcaaaataaatatatattttttaaagtaagattttacaaataacattgggattatactatttcgtagttggggacttgttttccttgtagacatggattccggtgtcatttggtcatgcatgctcttttgctttggcacggtctgcactttgggccctttcacagtgcgtgcagctggtcacaaggggaggctagatgagaatagctgaataaaatgcttccagtgtggcaggaaagaagagggaatgaatggggatggggcagcctatgccccctgtgcagcaggcgagttatttcaaagtatgctgccaaatgagttttatcatttcccaggcagagtccttactttgagactatttggaaccttgctctgtccacccacaatattatgccccatcctttgttctgctgaactccatacctgccatttttctactacattctctgctgtaccttcttggatctctcctgtctgcttctttaaactgaggctgataaaaggcacatttcctctctgtgaatctttttaaatatcctgaaaacagaactgtttgtttggggacagttgtactcagactcagagtctgtagtcctaatgaacagtcagtcattccccttaaatgatggtatcctcagatacataatatattaataatatcctaaaacatacttctttgtgggctcccaaatctagaaatttactgtatcttttgggtaatttcatgtaactattggtatttataattttaaatcactttaatgtccttcggctaccaaatatgttcttggtatctaatgggaaagttctccagtggctttgcaaaaa

SEQ ID NO: 240217 - DNA, 584 bp, Homo sapiens
gggggctctaggaactcctcccggagtccagccaaggagccggggggccggcgactggccaagggagaagacccccggagggggctgaggggagggggaaggtgaggaaaggacggcggcgtcggtcctgttctctccgccgccccagccgccgcttcacatcggggtccccgcccccccggccggggggtggttgccgagcttggttggggccccggttcatacactccggggcaagatgctacggccccgggcgggtggccgagtcggcggcaaggcgagggacccggccggctccgctcggcgccgcccccgctcccggctcccgcatgtgtcgctgcggctgggacccccctccctacaccttgggggtctcgccccacgccccacgggacgaggcagaagctctggcgcctcctcagcgttctctcaccgcggagcagctacccactcccggcccgtggtagccgcctccctgccccccaagccgccggctccggctcaggctcgggctccggctctggctccggctccggcgtgtgcagccgccgctgccggccgggaaggtgagggggggaaaggag

SEQ ID NO: 240218 - DNA, 913 bp, Homo sapiens
cacctatcctactttccccagctcttgtgtggttcccaaagcccctagcagtagccaaaacgggggccccaactgctgtcgctgtccctggtgctgactaaaccctaaagcctctgcgttgcggccttggggccattggtggtgccgagttattcttttattttctttctgttcttttctttttttcttttcttctcgttgctgcccttggtgctgcccaattattcttttcttttcttctcctctccctctctctcttttctttctctctctttctttctttttctctttttctttctttcctcaagaaaatgctgcagatttagagagtgactttgaagcatagactagacttcgaggatgaacatgacattttggctctctgtgtatccccattcacactgaagaatcaacaacacttccttgctgatcaatagtcccagaactggtggcacagccaggaccgacgctgatgcttacctccccctctcctgcagcagagacgcccccgtccctgtggcccagggaagtgccagggatccctgggaaggcgggagatggggaaggggcagggtgagcgaagaggagcaggctgcgtctgcacgcgggctgggaagcggggcttccgggccgcagggtcgcggggacgggtgtgatgcaatcgcgccacagccgctgcgtcaaggggcggctccgggatgcgggcactgcggtagagccggtcctgcccccgccgcccgccgcccgccgcccgcctccgctgctaaacccgcggacaaccgccgggacgaccacccagagccaccagagccccctgacacccgccccgaggcaccggtaacccacggcacccgccccggtgcgtgccatgaagtcggccgcgagctcgcgcgggggcggtgggggcggccgc

SEQ ID NO: 240219 - DNA, 391 bp, Homo sapiens
gccacattccagtgcttcaaaggagtatctttctccttgagcacagtgtttatagataggagagcaggtcacattctggtcatgggaacatgatggcaattagaaggctttactcctcagaggcctcttgtggctttctacaacttactgttccatatttttatggctggtttatgcaggcaccccacaagccctttccccaacatgagagaactgcttcgtttattttatctcatcatttttcttgaaactattttgctatggaatgtcctactgaacatagtttggctaacctttattaggtagaaatgataactacttgccttataggattgttaggaacaatatctgaaataatgtataagaagtttgtggtgtagtccctggtgtc

SEQ ID NO: 240220 - DNA, 375 bp, Homo sapiens
ttgcatattttaattgctgtctggaatcctccttcagctgggatgagaaaccatctctgggttagttctgtccctggaggtgagggccagacaacacatcaaaactgactttttattttttttcaaagttgttaagactatctaagattcagatctccctaatactgttcctagttagtatttagaacgtatttgtttagaggatactagcctgaaatagccctatctccaggttgtctgatgcgatgaggatgtggtgttaatcttacacctacccattagtctataaaactcctgagggatgctcaggaaaccaaaaaggatgtctgcatggaggacaagaaggcacaaatcgtctgatttcaccccatccta

SEQ ID NO: 240221 - DNA, 607 bp, Homo sapiens
gcatccctggaacgtcctgcatccctggaacccttggaaatgagctgtccaggacagtgggtggggcctgagggccagcctgtgcccagccctaagcccattgctcgctgccatctccatggtggcttgcgctacatgaaggaatcatgatggtcatcagcatatagaacagcacacagccagggagcaggcggcctgggaacgggatctcgagctccacctgcagggaggagctgtggcccacggacacagtatgctcgtactgcgtcctcgcctagttgcggttgcacaggtagctcttgggcctctccatgaaccatggattccatcacacattatagcccctgaatcctcaaagcagccccatgtggaaggcaatgtcatcctcattttacagaggagaaaactgaggcttggagaggtgatatgatctttcagcggtcacagagcaagggaggggaggtactgggattcctttatccagatgtcccaacccagggaggagccctgctaccccaggaggaatgggctgggctacataagccgctttccgtctcacagaaggcatgtccttcaatgccaaggtccaacatgaactcaggtgtga

SEQ ID NO: 240222 - DNA, 433 bp, Homo sapiens
agtcagactctctaaagtcagataattctaaggacagcaagagaaatgtgtgtaagcaactataaaggaagccccatcagactaacagtggatttcagcagaaaccttacagatcaggagaaaatgagataatatgttgacagggctgaaggggaaaaaaagtaagccaaggatactatgtctagcaaaattatccttcataaatgaaggagaaataaagtatttccaagacaggcaaaagctgagagaattgatcaccactagactggccctacaagaaatgctcacaagagtcctaaacatggaagtgaaaacatgacatttaacactatgtaaaacacacaaaagtataaaactcactggcaaagcaaacacacagatgaggaaaagactcaaatgctaccactacagaaaactaccagagtacaatgcc

SEQ ID NO: 240223 - DNA, 296 bp, Homo sapiens
cattcacttggcctcagtttcctggtttgcacaatgagaaggttgaattaaacatcctctccaaggccgggcacggtgactcacacctgtaaccccagcactttgagaggctgagatgggcggatcacttgaggtcaggagttcgagaccagcctggccaaaccccgtctccactaaaaatacagaaattagccgggtgtggtggcatgcacctgtaattccagctacttgggaggctgaaccaagatcgtgccactacacttgatcctgggcgacagagcgagattttgtctcca

SEQ ID NO: 240224 - DNA, 372 bp, Homo sapiens
gatctttttactgttatcacagttttgtcttttccagaatgccgtacagttgaaatcatacggtatatagactttgcaggtttttatgcggacatgttttttgactcctttgggcaaataccaaggagcaagattgctggatcatatggaaagaggcattaccatatcaaagcctttagccttcttgcatcacgacaaaaattcgaacttggtgtttgaagaacatgaaaaatgaggaggaataaaataatcatgagtctcctggtcattaactgcatgaagttgagctggtcacttaagccattcctaatatgtaacttgagagtatagtattagatattcagtaaattcccttcaaaattcataaaaaaa

SEQ ID NO: 240225 - DNA, 426 bp, Homo sapiens
gacagacgttattgactttatcttttctctttctcactctcttttcactcatacacacacatgcattcacatacatacaccacatacacgtggtatgtatttttaccgaccatttgagcataaggttaagttgcagacatcatgataaatcattaagtacttttagcatacatctcaaatttttaaaaaaatatatgtaagcataaaattaacccaaaaacccctttgttatctcatattcattccgtatccaatttcttcagttcagttgtcccccaaaaaaatgttttttaaagctttttgttgtttttctccttaatccaggattcagtcaagatttattcattgcatttggttgttacgcataatctaaaacagtactttcccttttgtttttcatgacattgacttttgaagaatccagac

SEQ ID NO: 240226 - DNA, 1861 bp, Homo sapiens
  misc_feature (1280)..(1280): n is a, c, g, or t
  misc_feature (1283)..(1283): n is a, c, g, or t
  misc_feature (1296)..(1296): n is a, c, g, or t
  misc_feature (1298)..(1298): n is a, c, g, or t
  misc_feature (1434)..(1436): n is a, c, g, or t
  misc_feature (1438)..(1438): n is a, c, g, or t
aagccaccaaggaaaatgaagggcctctaccaggctgctggccggattcttgttactctggggatcctcagtgtatgctctggagttattgctttctttcctgtcttttcttacaagccttggttcacaggatggagtgttcgaattgcttgtcctatctggaatggagctttggccatcacaactggtgtgcttctactgttggcttacagagagtggacccagaggtacctgggggaagctactttcacctttgtgattctgagcattatgggatgtccacttcattttgcaatagccttggaatctgctctcctgggcccatattgcttctattcattttcagggattgcagggactaattaccttggctatgcagttacctttccttatccatatgcaaaattcccattagcctgtgtggacccaccacactacgaagagtaccacctgacacttcaagccctagacctgtgcctaagctttaccctactctgtacatccttgacagtgttcatcaaactttctgcaagacttatccagaatggacacataaacatgcaactccctgctgggaacccaaaccctttttcaccataaaagaattggaaaaaactaaagttcatatgggaccaaaaaagagcccgcatacccaagacaatcctaagcaaaaagaacaaagctggaggcatcacactacctgacttcaaactattctacaaggctacagttaccaaaacagcatggtactggtaccaaaacagatatatagaccaatggaacagaacagaggcctcagaaataacaccacacatatacaaccatctgatctttgacaaacctgacaaaaacaagaaatggggaaaggattccctttttaataaatggtgctgggaaaactggttagccatatgtagaaagctgaaactggatcccttccttacaccttatataaaaattaactcaagatggattaaagacttaaatgtaagacctaaaaccataaaaaccctagaagaaaacctaggcaataccattcaggacataggcatgggcaaagacttcatgactaaaacaccaaaagcaatggcaacaaaagccaaaatagacaaatcgtatctaattaaactaaagggcttctgcatggcaaaagaaactatcatcagagtgaacaggcaacctacagaacgggagaaaattttttcaatctacccatctgacaaacagctaatatccagaatctacaaagaacttaaacaaatttacaagaaaaaaacaancanccacatcaaaaantnggcaaaggacatggacacttctcaaaagaagacatttatgaagccaacagacacacataatcccaaatcatgctactataaagacacatgcacacgtatgtttattgcggcactattcacaatagtaaagacttgnnncnaacccaaatatccatcaatgatagattggattaagaaaatgtggcacatatacaccatggaatactacgcagccataaaaaaggatgagttcatgtcctttgcagggacatagatgaagctggaaaccatcattctccgcaaactgtcacaaggacagaaaaccaaacaccacatgttctcactcataggtgggaattgaacaatgggaacacttggacacagggtggggaacatcacacactggggcctttcagtgggtgggaggctgggggagggatagcattaggagaaattcctaatgtagatgatgagttgatgggtgtggcaaaccaacatggcacatatatacctatgcaacaaacctgcatgttgtgcacatgtaccctagaacttagagtataataaaaaaaaagaaaacagtg

SEQ ID NO: 240227 - DNA, 894 bp, Homo sapiens
aagccaccaaggaaaatgaagggcctctaccaggctgctggccggattcttgttactctggggatcctcagtgtatgctctggagttattgctttctttcctgtcttttcttacaagccttggttcacaggatggagtgttcgaattgcttgtcctatctggaatggagctttggccatcacaactggtgtgcttctactgttggcttacagagagtggacccagaggtacctgggggaagctactttcacctttgtgattctgagcattatgggatgtccacttcattttgcaatagccttggaatctgctctcctgggcccatattgcttctattcattttcagggattgcagggactaattaccttggctatgcagttacctttccttatccatatgcaaaattcccattagcctgtgtggacccaccacactacgaagagtaccacctgacacttcaagccctagacctgtgcctaagctttaccctactctgtacatccttgacagtgttcatcaaactttctgcaagacttatccagaatggacacataaacatgcaactccctgctgggaacccaaaccctttttcaccataaaagtttggacctgattaaagaaggacaacaaaggccaatttgccatcaccaaaggagcagcttgacctggagggatgaggcctggaggccgacagcaggactccgtcagtgattctttcagctcttgaaacatgtccaagaaagacacttgtctctcacctttttggagcctctagcctgcctgggaagcctggtggacttggtgctgagaagagaacccggccagttggaggtccactctgtcccgccagctggaatgcatggcacgatctcaagtcactgaacttccactcc

SEQ ID NO: 240228 - DNA, 624 bp, Homo sapiens
ataaaagaacaattgggaagagctggggcaatggcttgtcatatgttcaataaactctcactatgagaaaagtgacaatggaagccctcaaccgtgtcacagtctctacaggtattcattaatatgaaaggcaaaccaatgatcacatttaaggcttaaataactatactttcacctagcatattatcagttaacttttactcagtctaatttccatgagactttaatacacattttttcttccttttttcggatataaaatcattttacgacccaatgtaacgcttagaagaaaaaattgccatccttgtgccttaattaaagaattaacttgtcacagaggcctcgatgtatttctcaaggctcctggatgcccgccaaagctgtggcacacgacgaagctctgtgagcaaagtgctatggaaggaagcccactagatctctgcctaactatatgaccccctttcagcacactgcaggtgttccaaaagtgttttgtcaattattaattattcataaatattttggtataacagccataaaaactcatttaaagaataaaacaaggattgaagaaaaatttttaaatactatttcaaaaaaagttcatactatgagttttct

SEQ ID NO: 240229 - DNA, 445 bp, Homo sapiens
agagctgatgaccagtgctctctgatgaagttatcatgactggaagataagtttagattacttgatgagtattggggaaagggaagggctgagagatatctgaataggttcaaaggttacccaaagagttttcaacctcaggtatccaccattctgcttctctggagccacactcagaccagaggtgtgggagtgaacattcctcagtctatactattaaatggaatcaaatatttagatgcagatctaagtatatatacaaaatattttttaggaatattatctgttattatacatatacttaacaagaaaaggtaaatacaaattatgcaaattataaattacccatttttattaatttaagatatgtaaaatgtcactagtattttttatgttgtgtgtaatgtgtgtataaataaaaatgaataactgttttcaaaccatc

SEQ ID NO: 240230 - DNA, 797 bp, Homo sapiens
tcgagtgcgcctgtccctgtggtgggagcagtggcgccgagcgtgcccacgggccgccgcttgggtttctctcgtgttcagggtagtatggacgtggacaatggcagtggcccctggctggcccaagagccgggtccagatacgcgcgcctgattccaggcgtcataaccaacccggggccgcgaggctgggatcaggcaccccggagccgcttgcccgtggccgggctgctctccccctctaagcctaagcaccgccagtcgcggcgctgcgctttccgccgacctcccagagcgtcccgccgtcgccggcggccagcctcgcgcaggaccagtgtggcgccgccctgctgttgctggggggcgcccgaggcctccattccttgcccaggcttccggctctcggggcggcctcccttccgcccacgctccagggcttccccggctcccgagctccgagcttccaccacatcggccggctcaggacagggcttccactgtaaagtcggctgccagacgtgttggagctcaccggatttgtccctggtgccttatttagttcacttggtgaggtcatgtttttttcctggatggtgttgatggtagtagatgttcttcagtgtctggacattaaaatcttgggcatgcagcaccatatgagaggtttaaaaaataaaattaaaaaagagaaaagaacccagagttgatctctgcagcatgccatcactgctggggatgaggaaacggtgatttcaggactgttttttctgtctcttcagtgcctctttcagtgatctg

SEQ ID NO: 240231 - DNA, 324 bp, Homo sapiens
acagctatgttgaattctctgtctgaaaggtcacatatctctttttctccaggatttgtccctggtgccttatttagttcacttggtgaggtcatgtttttttcctggatggtgttgatggtagtagatgttcttcagtgtctggacattaaaatcttgggcatgcagcaccatatgagaggtttaaaaaataaaattaaaaaagagaaaaggtgagtatttattgtagtcttcactgtctgggcttatttgtagctgtctttcttgggaagacttttcacatatttgaaaagacttgggtcaaatatgggtcaaatatggctt

SEQ ID NO: 240232 - DNA, 617 bp, Homo sapiens
gttttgcccatgtcagtctctatttgctttcagatatccaggaatgattttcagagtatttgagaaaatgagaggtgcagatggttttcactgaggcatggtttcaaatttaaagaggattatggcccagaaatgatgaagaagatggaaggaaccaccacctcagtggaggtgacaggtgctagacgactacctggaatagatgggagaacaaaataaatgcaagaatccaagtctgaaattgtttccagcctagaggaaggaaggccttcttggagtgaagcctaagtgccgtgtgttgtcagtgctccatggggtaactgagtctcagagagcttaattagctcaactagcatgggccatatttgttccaagtcacagaattttccagatgcagagtgacttggttagtatgtggggaaggatggtaggattttctcctgggtagctcatacttcaaaagaccatgttctgtcaactatggcacatgagcaagtgacctccaggtatggatcttcagctgtctgctatcatcatctggctgtctcctctgaacttcaaacttggtgtgtcccaaaccaagcttttaaagtgctaatgaggacaaagtgggtgcc

SEQ ID NO: 240233 - DNA, 248 bp, Homo sapiens
gttttgcccatgtcagtctctatttgctttcagatatccaggaatgattttcagagtatttgagaaaatgagaggtgcagatggttttcactgaggcatggtttcaaatttaaagaggattatggcccagaaatggtgagtagaggtgtgaacctttgaaattctaattgcagaccagtctgaggaggtatatacttaccaaagcacaatatctcattgtgagcatattcctttcttggccaaaggag

SEQ ID NO: 240234 - DNA, 376 bp, Homo sapiens
gccttcagcacacactgtccagtatatccgagctctttgtcgccccagcagcagccccttgaccacccttcgggcctagggtgcatattgcggcccacccttccctctgaagaatggaccctgggaagagaagtcctgataagagaaagggctggctctgagcaaagaggcaggcaaccagaggagggccagaaccacggcctctaaagagcgagaggtgcaggcaggacaccgactgcccaggtctaggggaatgcctaacaggggcatctatttgggaacgttgaggggctagggggcagggaggaaaaagaatgcctttggttgaacaaaataaatggactactcttgataggatggagaataggatgatcga

SEQ ID NO: 240235 - DNA, 375 bp, Homo sapiens
  misc_feature (38)..(38): n is a, c, g, or t
tttttttttttctcgagatacagtcttgttttgttgcncaggctggagtgcggaggcatgatttcagctcactgcaacctccagctcaagctcctggccaacatgttgaaaccccgtctctactaaaatataaaaattatctgggctggtggcgtgcacctgtaatcccagctacttgggaagctgaggcaggagaattgcttgaacccaggaggcggaggttgtagggagacaagatgacaccactgcactccagccggggcgacagcccgagactccatctcaaaaaatatatgtattatcacttgatacaaaattctgggttttagttcttacagcactttaaaatgtctacttccttctgtcgttcataat

SEQ ID NO: 240236 - DNA, 260 bp, Homo sapiens
gagatgcaatttcactctgttgcccaggctggcgtgtagtggtacaacctcatctcactgcaacctccacctcccaggagaattgcttgaacccaggaggcggaggttgtagggagacaagatgacaccactgcactccagccggggcgacagcccgagactccatctcaaaaaatatatgtattatcacttgatacaaaattctgggttttagttcttacagcactttaaaatgtctacttccttctgtcgttcataat

SEQ ID NO: 240237 - DNA, 526 bp, Homo sapiens
caggtcattcacaattgccattgtaacatcacaaacatgttgtgttgtccacccacatggtttcctccacctctgatgagactgtgagagatgcctcggagaatatcattggtaagcaactctcacccacttttggagagtttgacttgttctttgactggtcaccacttagaaagaaattgctatatatcttagacgtttacgctgatatctctgtggatatgtatacaggtatattttcagggggaagggaatgagaggggaaatttgagaaagaaagtaagaaatcaagtagttgtcttgatttagactttcccgaattttgtggtttttcttagaaacacatggtctagcgcagaggtttttctcatgagttgaccgatttaaagattaatcaacaagcttcagaattgccaaaaaactacctaaaatagtataaaaatttttagtatgagaatagtttttcacatatgtgaatttttctggatacaaggttcatagactgcacaggtgttcctgattcaaa

SEQ ID NO: 240238 - DNA, 779 bp, Homo sapiens
ccgaggaagtgctttccagaccgactcctctgtagagcctggtgggtgaggataggcttggctgcacacagcatatgtgtaagctacagagacttgtttctttcttgcacaggtaacccagaggcagagggtccaggctcaggtcattggcatgttttttgtttcacgaggaagcagaggagccccatctcccatcttaatctctgccaccaactagggtgctgcccttgtccctgtgacacctgtacctgccacattcacctttgcactgagcttagtcttgtgaccacatctcaccagacgggaactgggaggtgtagtctcttcgggcctgtgtgtgtgccagctcgatgcagtgtcattcccatggaaggtgggagcaaaccctgccacaagcatccagagctgtcttcagatgtgctcttgggcctgaatccagcgtcccaggtcttccgaccagagacgactgaggaggtcgggcggccgcctccctggatctgactgcacatccatcactgcaacctacgacaaagctcctgggccacaaccggctggcagtgagagaataactgctaaaaacgtttcagggagctgagtccaatttcttccccaaccacaagacctgattgcagtggtccatataactatcaccacagctccctcaaatcaactctgccttattatcttttttttttttttttttaaatccggggaccaggcacggtggctcacgcctgtaatcccagcactttgggaggctgatgtgggcggattgtgag

SEQ ID NO: 240239 - DNA, 464 bp, Homo sapiens
ccagctttttatggactcactctgccttctattttcatgcctgggtctggggtctctgaggagggggaaggggacagaggatgtggcataagagtgaacacagaagttggacccagggcttggggccttctgcatgggagatgagatttcggggtgcccagctcctgggggtatgtggacagtggagtactcccctctgcatgtgagacgtgatgctgagtgagccgggggtgtcagtgctgacatgtgggtgcctctgtgtgcaggtttgggaagttgctctactgacatgctgtcaccctgtgtgtctggggacatggatatcttggtgctgtgttcaccgtctccatcgtacagtgtgttctttgggcatttggggtcctgtgtgtgtcttgtcaggcatttgtgttgttagtaagtcccagtcttgagatgtgtaattctgtgttgtgatgggtgtgcac

SEQ ID NO: 240240 - DNA, 495 bp, Homo sapiens
tttaacaaaggaaaatttggtaactatttctggggtaaagattttacaatagcaagtattatcactagacattactttaaatgtggatttttttaaatcatggtagaaaacaatataaaaagtgttcatgtggcagttgttaagaatacacatcttcagggttttttaatataaaaaggggaaagaacagtctcattattatatgcatagtttctctgatttggtacaaaatttcccagtgatgtcattgtggaatgatccaagtgttgcctgtcagcagagataggagtgaagttgatgatgatggttagatggcctcacaagggactctagtgatagtaaaggttccagtggcaaacacacaagtgaaaagtttgaatatagtttcataatgtttgagagtgtaaaaaatgcatttttaaattaatgcattactttctgtactattttaaataagtgtgtatctaaataaacacataaaatgttatgagtaaa

SEQ ID NO: 240241 - DNA, 505 bp, Homo sapiens
atcatagacacaggaagtagaatggtgtttgatgtggactagggtcgggggaatggggcgttattgtttaatggatacagagttttagttttacaagatgtaagagttatagagatgaatggtggtgatggttgcacaacattatgaatgtattcaatatcactgaactgtacaattaaaaatggttatgatgggaaatgttatatgtatttcatcataaaaatgttatgtgtatttaatcagataacaattgtaaaaaaagtttactatgtcaattaataagtcaacaagtttgcaaaaaactacttaagagagtaaatggtttccaagagctctcaagtatttcagaaaggtacctttagattttgatggtagagtcactaactgattaataatgttgatttttgtgctaatttaaaattgttctaaatgctatgtgatgtcctacattatgtttcagaacagaaaactgaaatgtgaataaagtgtcaagtttagttaatag

SEQ ID NO: 240242 - DNA, 378 bp, Homo sapiens
atccagttttttgtgactatttcctgatgtttgacagactgttctttcaacttggtgtagagttacagtctactcttttagggagaatgctgtttgttcacatcatgaggctgtaaatatttaaaatgttctcaccattgtgttagtttccaactgacacatggcctgagagattggagtatcattaattctgcaactcttttagtgctcaggatgtgcatgtttatttactttcaggactagttcagacatagtaaaactgctagtgacttcatgtaatccttattctgaactgtatttgaaagcaagggaaatgaaacatgatccctaataacctcaaacatccaaagatcaagtcaattaagggcaaaaaaaaaa

SEQ ID NO: 240243 - DNA, 510 bp, Homo sapiens
tcacccaggctggagtgcagtggcacaatctcagctcactgcaacctccgcctcccgggttcaagcgattctgctgcctcagcctcccgaggagctgggattacaggtgtgagccaccacacccaactaatttttttgtatttttagtagagaaacagggtttcaccatgttggccagtctggtctcgaactcctgacctcaagcgatccgcttgcctcggcttctttaaattattttttgtagagtcggtgtctcactctgttgcccaggctggtcttgagctcctggcctcaagtgatcttcctgcctcagcctcccaaagtactgggatgactttgggcacgagccacagtgcctggcccctgtattttatttctttttatggatgaatactatttcatcatatggagagatcatattttaattatgccgttatccattgagggacatttgggtattttcctcttttttttttggctactgtgaaaagtgctgctacaaatattcac

SEQ ID NO: 240244 - DNA, 564 bp, Homo sapiens
tcacccaggctggagtgcagtggcacaatctcagctcactgcaacctccgcctcccgggttcaagcgattctgctgcctcagcctcccgaggagctgggattacaggtgtgagccaccacacccaactaatttttttgtatttttagtagagaaacagggtttcaccatgttggccagtctggtctcgaactcctgacctcaagcgatccgcttgcctcggcttcccaaagtgctgggattacaggcatgaacccactgcacctggccctatttctttttttaaattattttttgtagagtcggtgtctcactctgttgcccaggctggtcttgagctcctggcctcaagtgatcttcctgcctcagcctcccaaagtactgggatgactttgggcacgagccacagtgcctggcccctgtattttatttctttttatggatgaatactatttcatcatatggagagatcatattttaattatgccgttatccattgagggacatttgggtattttcctcttttttttttggctactgtgaaaagtgctgctacaaatattcac

SEQ ID NO: 240245 - DNA, 411 bp, Homo sapiens
acacccagtttataaggtagaatctgcaactactatacaatatacttgaaaaacttctttgaatattgaagtttaacatcacagcatatctggtacattctaaatgagcatcttcccagggaattgacccacagtcatggtcttaaaatgtttcggtcacccccattttaaattaataaaaggtggctgtggaactgcccaaaaaactggtattggctttcagctagagatgtcaactggctggctcttgtttcttgtaaagtggccaatatgtggtttggagctctgattaggggaaattctggtaatattaagaaaacattctcctgctatgtaacgggccaggaatgtatactcaaaatccaaaaaatcatctaataaaatgttttaaaacaagtaccaagaggagaa

SEQ ID NO: 240246 - DNA, 134 bp, Homo sapiens
tctcccttcacccccactttgtcccctcacaccccaactcccccagctctgcgctcttcacccccctcccttccccgggctgcccctcctgagcacctgggaagaagaggcggggccccctcacctggcggccg

SEQ ID NO: 240247 - DNA, 348 bp, Homo sapiens
gattcaaggggtacatgtgcaggattgttacatgggtataatgcatgatgcttaggtttgggatacaaatgatcttgtcatccagatagtgagcatagcactcaacagtaagttttttaacgcttgccctcctctctccctcttctctttattagtccccaggtctattgttgccatcttgcgtcacatattcttgccttctctcttctgaaaaattaaataccttagggttactatgaaaattctctatatatttatgtctatattagcccttatttatatgctgtactttttgttatctgtctttattaccaaatacaatcttggttctataaagccatgaacatt

SEQ ID NO: 240248 - DNA, 297 bp, Homo sapiens
tgataaaaaatgaaatattataggttaaggttaaatgctttttgactactacatgtaatacctctttttatcccagattatcatttaacaggtatatttttaggctttttaatgtgttaaatacacatgtactcatacaagcaactatttagagaagtgtacagtgttgctgtgtgtgtttgtgtttctgatggatacttcatcatgctaaatgctttattatgataattgcttcctactgccttctctcaccatcataatccctttggagacttttctgtgtcactttttaacctt

SEQ ID NO: 240249 - DNA, 724 bp, Homo sapiens
tgagttcagcctatcatttgagatccgagtatgattggggaaatatcctgaaatagtctatgatttgaagaaatggatagatggctagaataacatgctagatggtagtcaagttactaactgcagaattgatttgataaaattctcatcgtgtctcctgacttaggagaaatattgggtctgatgaatgggtaaaattcccaggtgaaaagaatttggtctgtaagatttggcagcaccctgaggtttgccatatctgatggcctggctttagtggcagcacctagtgaaggcccaggtgtccttctgacaacctttaccacctaccgttttgtccttacttatgttgaatcactacacacaggctgttgaattcagctgtctgtggagaaattataccaaccacatggttagacagaaggaatacaatatattgcttaatttgtatctgaaagctaagcaacatggaaaaaaatcaagcctgctcagtcacttccatgaggacaaacgaagacacttcaaggaggacattgacatggatctgccagctttctaagactttccccagattcaagtccagtcacatcaagttgccttattaaagggtctgcccactcaaaaggagaaagtgcaaaagatgctcagcaagggtagcaaacgcagtcagatgatacttcctgacagcatccaagagcaagtctcaccaccacatctgtcaataaaa

SEQ ID NO: 240250 - DNA, 452 bp, Homo sapiens
aattaataaggtagttggctttatcacttcagatgtgtatgttaaaattcaggggaaagctgtaatttaaaattcactgtccatttgaaaataagcttcctattgggacattaaggtgcacgttcatcctggctaacacggtgaaacctcaactctactaaaatacaaaaaattggccgggggtggctcacacttgtaatcccagcactttgggaggccgaggtgggcggatcacgaggtcaggagattgggaccatcctggctaacacggagaaaccccgtctctactaaaaatacaaaaaattagctgggcgtagtggcgggcggctgtagtcccagctacttgggaggctgaggcaggagaatggtgtgaagccgggaggcggagcttgcagtgagccgagatcgcgccactgcactccagcctgggcaacagagcgagactccgtctg

SEQ ID NO: 240251 - DNA, 116 bp, Homo sapiens
ttatctgtctttgtatgaaggtcattttgaatctaacagccaggataatcacatggaagaattactggaaaaatccccactcatgtaattgctaacataataaagtttcaaattag

SEQ ID NO: 240252 - DNA, 422 bp, Homo sapiens
tggttccccttcacctctgccatgattgtatgttttctgaggcctccccaggcatgcagaactgtgaagcaatgaaaccccttttctttacaaattacctagtcttgggtagtgcttttatggcagtgtgaaaacggactcatacactatacttcctgcttggaccggaatggattatgacactagtgctttcattggcagaatccagtaaactcataaggttccacaggtcaggaggcatctatcacaaatgggtaaacagtgaatggctcaatcaatatttactgatgtaaaagcagaagattattcttgaaaaataaaccactttaagaaattgaagctgtgtattccaagttgtacgtccataacttgtgtgtcttatcaaatctcttcaaactttctaaactatcaaaccaagtaaa

SEQ ID NO: 240253 - DNA, 373 bp, Homo sapiens
actccatctccaaaaataaaaataaaacaaaataaaaataaataaataaaacatctaaaagtccctgctatgggctgaatttggtccctacaaatacatctgttgaagttcaaccctcagcacctcagaatgtgactgttttggagacagcatccttacaatggtaattaagttagatgcagagacatcagggatgcgcttgcacaggggaaaggccatgtgaggacacagcaagaaggcggctgcctcccagccaaggagacaggccccaggagaaacccaacctgcccacaggttgatcttggactttcagtttccaccctccaaagaccagtgggagagttttcatgcatggtccatttgaatcactgac

SEQ ID NO: 240254 - DNA, 461 bp, Homo sapiens
ataggatatgtattaatatttgttcagatttagtagacactgcaaagcaaagccttctactaaagtagtttactgattcactctcacacacagtgtgtgagagttccagtggctccacatcttcatcagcacattgtatttttagtcttgattttagccattctggtgggtatgaagtggtatttgttgttgtgcagattgcatctccctgatgactaaagaggactagtgctttgacctcaagaacttcccctctggggagatcttatgttatttaaatcttaggtttttaaactgatctctgctagtttgactttatttcgatattcacagaaactattattttcctctggtgttcaggatatactgtacaccaagtttttcaaatctctagacccttctgtgtcatattttatggtaatcactaatagatacaacatccaaattttgctgcttgatga

SEQ ID NO: 240255 - DNA, 497 bp, Homo sapiens
acatgggtattattcaatatttgtggtgtgaatgcttcacccgcaacatgatgccctcactcacggagtccaactaactacttggtgacaagctgattacatggagcctttctatgctggaaggggcagtgattcgcacagacaggaatgaatacactgtccaagtaaggtttaggctttcttctgcccacagagcctcagtcagaacatctgtcagctctcatagggtttggccattagacacagtacttcctgcattattgcatcggaccaacgctctgctttataacagaggaggtgggaagaggatctcctggtcctgtcacacatcatactacccaatcgcatccgaccttttagactgacagaatggtcttcaaatgtgtagataagcatcaacttgggcaagataccctttgataggtctttttacattgctggattatgaaatttagattgtctaataaggtctctcaataaaatactcaacacaaaaa

SEQ ID NO: 240256 - DNA, 437 bp, Homo sapiens
gagtattttgctaatttcaggtaattaatggagatatgaatgtttttcagttaaagtgatgaatatcaaaagattacctgagtttctgtttatattgttatttaatatttgagtttctctttaaggtagtaaaaaagttatgatctagttttttttaatggcgttaacaattagtttgcacatcttatgcattttatttacatggattaaagtatgtggtaagttatcactttaattcataaatttgttttatatgtaactgaagaagcttattgtaaattggaaataccttaccttcaaatttcctgggtgagaaatcactattgagttatttctactttgattatttttactaatataatgtaatataagttatctgacagttcaagactggaaattggtatgaagaaacaaggaaatacaagtttctgaaatga

SEQ ID NO: 240257 - DNA, 517 bp, Homo sapiens
tagggtaagcacaatatttaatcagttgatatcagttctggtccttatcacttgtaaatgagtgtgattgttcagtttaataacaagtgctcatgaaccccattactaaaaatatgagatatagctcctagaatacaatcgtaccccagtgccacctagaggaaagaatttgcatcgagaggctgggcatgtctgtttctgtacatcctggccactgaggtaccgcttttgccttttgtatttcttttgtaaaatgaggccatccacaagactagtgtgtcatagaaataattacataaaatttcttataactgaagtcactaactagtaataattttaaggaaggcatgctaatacttttaattaaaagactgtaatttaggctaaagaaaaacctactgactaaaagtgaacattacttttaatttacaacacagaaagctgttgaaaaataaaaataactggccatcttagggctcaagccagctctgatgccagaatttttcctattctattc

SEQ ID NO: 240258 - DNA, 656 bp, Homo sapiens
  misc_feature (656)..(656): n is a, c, g, or t
ggcacataggcagcacagctatgtgggaagaacacaggctggtctgcaggtctagatttggatcctagctctgatacttactactttgtgactttgagcaaattcacgtctctgaaagaaacaaagctccaaatttggaagcagcagtgaaactccacagattactgagggcaaaattgctgggtcataggcaccaaggaaaggtcttgtgctgacacagggagaaagctgtcatttacaagctgggaggagaccttcaccagaaactgaatttgctaccacctggatcatgaacttttactctccaaaacggaaggaggtgatgaagagagaaagaaaggatggaaggaaggaggaagtggacaatgagatcctggctgatggatgtaatgaaggcatgaactatactagttgaacaaggaaatgaacttgaaccaaattgtgaagttctctgcagtgaaatattaaaggtacagatcaaagctctaacaaacaagcttcgtgtagcacaaggacctaaaaaagatgatgaaactcgaggtggggccccggcccccaatgtgacctatagtgatgtcgttcacattatcactgaccgtagttatacaacgtcctgtctgggggcgtaaattcaaagaggccctgacggattcccn

SEQ ID NO: 240259 - DNA, 929 bp, Homo sapiens
  misc_feature (69)..(70): n is a, c, g, or t
caaccctcatctccctcccacctgcccccttttagaatccccagtgtctagtattttgaggaatgtatnnttaaagggaagacagattttaaagaaagcacagaaacagtgaatccaagaaaacaataacaaatggaggtaaacataaaggaaataaacaaggaaactaagtgcttggacctggagactcccagaaggactaactccaagttttgaaggtataatttaataaacaaacaaatgtacgaattgataatttcctttcccctggatttgctgtattgtgctcaatttctcttctctgagtctatttctcctgggaagaggactgtgagtgtgggcagatattcaaggaaggggtttaaggagagggtagcaatttccagtttgcattttagagacacctggctgcagtgggggtggggtgggctgcatattaggacagagactattccagtgttagaatgtgagggagaaaaagatggatttgaaggacatttaggagacatagggcatggaggtttgctggttaaggaagaaggaagctaaaggtcaagggtcaagaaccttttctaggtctctctgatttgggcatctggctggctggaaatgctaatttactatgagacattaaggataaagagctaagggccgtttgcagtggctcaagcctgtaatgtcagcactttaaaaggctgaggcaggcagttcacttgagcccaggagctcaagaccagcctggacaacatggcaagacccatttctacaaaaatacaaaacttagctgggtgtggtggtgtgatctgtagttccagcaactcaggaggctgagatgggaggattgcctgagcccagggatgctgaggctaccgtgagccaagattgcgtcactgcactgcagcctgggtgacagaatgtgactctgtctc

SEQ ID NO: 240260 - DNA, 348 bp, Homo sapiens
tattctaatgaaatttttattaataaacactttattgaactatgacatgcactcagaaaatcataaatatgcagaacaatgaattatcataaaataagaataccagtgtgatatgatttggctgtgtccccacccaaatctcatcttgaattgtagctcccataattcccacagtgtcatgggagggacccagtgggaggtaactgagtcatgggggccagtcttttccatgctgttctcgtgatagtgagtaagtatcacgagatctgatggatttataaaggggagtttccctgcacatgccctctcctgcctgctgccatgtaagatgtgtcttgcttccccttc

SEQ ID NO: 240261 - DNA, 423 bp, Homo sapiens
atgaagggcctaagaaacattttttgttctatagaatttcactctgtaaagtcattgaagaaatgcatatattaaaaacaaaacaaataacccacgtaccacagaacaaaaaaattccttgcaaaaacaagtatttttaaacgacttaaactctgaatttttaaaaaagggaaattcttgggagctaaggtatgaggacgtaaagacataagaatgatacaatggactttagggacttgggggaaacggtggggcgatgagggatagaagactacacattgggtacagtgtacactgcttgggtgacggttgcaccaaaatctcagaaatcaccaccaaagaaataccacctgttccccaaaaacctattgaaataaaaaataaatttaaaacaagcaaaaagagaagcaataaagaacagaa

SEQ ID NO: 240262 - DNA, 474 bp, Homo sapiens
agtgtaagacgacctgcctttgtgtactcggcttactgcctgttttcctggagtggaatatgtgctccttgcctggaggtctgtggcccagccactggcgctcaataaattatttgttgagtgcatgaatgaagggctaacccaacactggaattcaagccttgggacttgaaatcccttgactccaaattccattttccttgttaagactagcaactgtaatttattcatcattcttatttatttatttttgagacagggtctggctctgtccccagggctggagtacagtgacgcaatgtcggcttactgcagcctctgcttcccgagttcaagcaatcctcccgcctcagcctcccagctacttgggaggctgagttgggaggatcacttgagcctgggaggttgaggctgcagtgaactgagatcacgacactgcactccagcctgggcaacagtaaaacctggtctcca

SEQ ID NO: 240263 - DNA, 477 bp, Homo sapiens
gtcactcggcactgagaatactggtgtccagttcccggcggtgtgctgggtcagcaccacacgcacctggttttattattcatgcctctttaaatagcatggaggtgaggctggctgcttctgtagtgttgcatgaggcttttgagataaatgattttcaatcaacagaatcaatagcagctgtgctcagtacctcgcgcttgtgtacgggtttgcgactgaaaagctcacagcctgtgggtgcttgttgctgcttttccaccagtttgatttgaagaaataaaagcagtcacagaggaaaggtaaaagagttggaaattgtttcagattggacagaaccttcccttggcggttgtattcatctgttcttatgctgctgataaagacctacatgagactgagcaattcgtctcttctcacgctgctgattcgtctgttctcacactgctgattaagacatacctgagactgagtaaa

SEQ ID NO: 240264 - DNA, 787 bp, Homo sapiens
cacacttggaggtttaaggccttccacaagttacttatcccatatggtgggtctatggaaaggtgtttcccagtcctctttacaccaccggatcagtggtctttcaacagatcctaaagggatggtgagagggaaactggagaaaagtatcagatttagaggccactgaagaacccatattaaaatgcctttaagtatgggctcttcattcatatactaaatatgaactatgtgccaggcattatttcatatgacagaatacaaacaaataagatagtgatgctggtcaggcttggtggctcatgcctgtattccctaaactttgggagcctaaggtgagaactccttgaactcctaaggccaggagttcaagaccagcctggataacatagcaagaccccatctctacaaaaaaccaaaaccaaacaaacaaaaatgatagtggtgcttccctcaggatgcttgtggtctaatgggagacagaacagcaaagggatgattagaagttggttgctgtgagccaggcacagtgctgatataatcccagcgctatgggaggctgaggtgggtggatcatttgaggccaggagtttaagaccagcctggtcaacatggtaaaaccccatctctacttaaaaatacaaaaaagttagccaggcatggtggcatacacctgtaacccagctactcaggaggctgaggcacatgaatcacttgaacccaggaggcagaggttgctgtgcaccactgcactccagcctgggtgacagaacgagaccttgactca

SEQ ID NO: 240265 - DNA, 366 bp, Homo sapiens
tcaccctacttaaccttcactacccccagcagggtgggttgggcaccacagagagattacattccttaaactaagtggtggcaaaactgggattctagctctgatctctccaaatctgaagctgattcttttttcctaaatagtactgtccctcccttccctgaaccccttcactgcccaccccactggaggtgtggcagctgggggtctcagggcttgatttaccaatcaaagacccgaatttaggggtgatctccagttttcccccaagttctcaggggaactcatttctccctcatgagggcactaagaaaagcaatagttcttttcctcttgggatcctggggccaggactgcggatcctga

SEQ ID NO: 240266 - DNA, 699 bp, Homo sapiens
tctgtgttgatttagctacagtaattttaaaattaggattcatattccttataattttatctctggggaatttttgaggatcttcttccagaaaggactggggttttatttctccagatacctggagtattattaccagcccaaggcctcctacaaatacattttgggtttttttgaaaacgcaggtggtgtaaattctgactccagccctaaactcaggcaggcatttcttcatttcatttattgcacccagaacaaagtctgagaggggcctgtatcctcagttcatttctgtggggcaggtttttgtttgagtaaacccactgagtgtgttgacctttggggaatcctagtttttgtagagttctctcatttagattcctatacttctaaaaatgtaaagcaaataccaataaaatagcataccagatattggttatcttttgccctaatgtggtgtaacaagtcaccacaaaacttagtgatttaaaataataatttggccgggcgcagtggctcatgcctgtaatcccagcactttggtaggctgaggcgggcggatcacctgaggttgggagttcaagaccagcctgaccaatatggagaaaaccccgtctctaataaaaatacaaaattagccgggcgtggtggcgcatgcctgtaatcccagctgctcaggaggctgaggcacaagaatca

SEQ ID NO: 240267 - DNA, 521 bp, Homo sapiens
aaaaaagaaaaaatgagtggtttggcaagatggttgggtgggggtcaggagacagaggctggtatgcttctggctggcctaattccctcagaccctgctcccctgcatcctctgctcaccttgagccttcccaaaactgctgtccaggctcccccagccccactcggctcctggttctgatcccttccagagtcctgggacgtgcaccatcacactcacatccacacatggccgcacgtgcgttctgtcttggctgctccccttccccagcctctgctctcccaggaccctgactcctgcgtcaatgccctgacctaaccatggagagggggccggagacagatgggtggggtggacacagctggaggaggaggagccttttgggctgtgggacctgcccctcccctcacacagcttctcgggggtccctgcatccttgtctgcagttgaagaggagtgagagatgggccaggggcaccagcctctaaatgctgtagcctgctggataggagtagtgactg

SEQ ID NO: 240268 - DNA, 668 bp, Homo sapiens
cctaagcatgcacagctgcaaacaaaatagtataattgtatttactcacatcccaaataatagcaatattgcaccccctttatatttttagcttgaatgagactatatgatggttcattatggtttagtgcctaaaacaaaaaatcaccataagtattgaattaatgtgtgcatgatgtcagaatttggaaatctgtcttttcatgcattttttaaagtgttcccagaaatcaagaaatagcaacaatgctaattggcttgtgatcacttaaatgttttcctaagggcaaggaaaaaataagcctttggaatttccctctaatccaaaaaagcaggtttgtgaaaatccagaagagaaaaaaaaattgtacttttcatactgcttaggaaactttaatcttattaacttttgtcaaggatattgacagtactggggaagcaaaaggtttactaggttaagtctagaaccagctatcttataaatatagcattttaacataatatattaacatctatagggctgtctgcttacgtctacctcccatgtagactgagtgtcctatccttggtgtgtagggaatctgtttcatgagccataatattgaacaagtatttttgttgtttttgtttccttttttttgagacggaatctctctctgtcacccagg

SEQ ID NO: 240269 - DNA, 413 bp, Homo sapiens
ccagctcaagtaaaggcttcagtgtctttgatctgggtctgacttgaatgcctggagtcagaacagaagaaggaacacggttatctttgaagctcacactggttgctggttgcccactcaacagatgtgagcagtttagttgtcaccataaatcaagggctcccccacaatgttataaatagggatgggtaaatattttggattcatcaacctccaagtatgcctcagatgttttgggttcaactaaacagaatacatcatgcaaaacacataccctccttgattttttaggaccgtatgtgatttatggaaaatagaatccatatgtttctgcttcatttacacttaaatcttcaaaaggttgtgtgttgtaagagctttttgatgtcgaagatgcctctgcgcatgcttaa

SEQ ID NO: 240270 - DNA, 520 bp, Homo sapiens
aggtgtgagaggagatgtaaaatactctctgagagcagaagagtgaattcaacaggaaaattagatatccagtaaagtaggatttaaggaaaaacaccgaatggaacctactgcccctagagaactatcaatttcatgtgaatgaaagttccaatccacaatgcagctataacaagatgaacatttatgtgcagagtcaaacagcattgacaagtaatacagacagtccttgacttagaatggttcaacttaggatttttccacttatgatgggtttatcaggacgtggccccatcataagtcaaggagtaataactgtagagtaataccgtttagaaacataattagaaatttggatgtggtggcacatggttgcttgagcccaggagttcgagatcaacctggacaatatagcaatatgccatctcaaaaagaagaaacaagaaacataattagcaactcagagataccattgcagctggcgaacctaacacatctgtctttgattgatagagtaggc

SEQ ID NO: 240271 - DNA, 598 bp, Homo sapiens
cactgcattccagcctgaacgacatagtgagacctcatctctaaaaatgtaaaataaaatgtaaacaaaaacttattttgaatatgaaacagtaatctttaatgcttgataatcttatatctcttccattttcacctagatttatgctgctgttaggcaactcttcatggtatgaaatatcaaaaaaaggatatttggcattaatcatttttagtggggactttattagtttttaatttatttgttaccatatagtaaggttttctgacataattgtcttataagcaggatacattttactactcttttgttgaccaacataatatcagaaagttttagtgctaaaaggaatgctattaattataaaatctactttctcaaattgttttccagtgttctggagtctcactgtctctactttctctggtgaattacaaaggtttcttctaagtatctacttggctcatccccattatgattcccttaacaagtaatacaggatacagcctttcttaaattcaccatgttaatgatcccctcatcccaccccaccccaatctgtctttcatataccatcaggtaggaccactatgctcca

SEQ ID NO: 240272 - DNA, 444 bp, Homo sapiens
  misc_feature (65)..(65): n is a, c, g, or t
ttttcatttttttggtttttgtttgtttgttttgttttttgagactgagtttcgctcttgttgcncaggctggagtgcaaaactccctcaaaaaaaaaaaaaaaaaaagattgcatctgaaagtgaatttaggggaaatgtcttcaagtaatggagaagtctagccatctcttgagacagttcactcacaagcacagtcacagccactgggtgtccaaggagaatgagagacatctgagggctaaggttggatttcactctggaagccacaatacacttctgagcctgtactgtaaataaaccctgacttcatcagactatgctgtggctgggaaggaacgtcattgtagaggggccagatgagcatgcagtgagaagctagaactgctggccggggtttatttgccattgttgggcaaacaggatcaccttggcccctagaag

SEQ ID NO: 240273 - DNA, 1302 bp, Homo sapiens
  misc_feature (14)..(15): n is a, c, g, or t
  misc_feature (298)..(298): n is a, c, g, or t
  misc_feature (1082)..(1082): n is a, c, g, or t
tcatacttagcagnntctaaaagacaggtaatcactttaaaattttttctaatgaatgccctgtgttcaaatcctttgttttcacaggattgggcttgttgttgttgtttttgttattcattgcctggaatacctttgctatgaatcaaagcaagtgccatgagaatggctgagttcagctggagaggagcccactcagtgggtttccatgtgaataatcatgctcttgcagcctttgggaggtcatttgctgcaggagattctaaaatgaacctgctatggaaatcagaggagggantgtggcctccatcttctgtaatgaaaagtatatacatcctcagggtcattacattctatggggacagggcaggaaactaaaaaaacaagcaaaggtgccagcaaatacagtggagataaactctgttgttcttctttgtctttgtttggcaacactaccagatttgaagaattgaacaaaagtactagcttatataggaataaaataacattttgcctttgctaggttctatttttctttagagccacttaaccagatacagcatagtaaatacagcagttcaaggggaagatggtaaaataaaggacaacaacaaaactccgaatatttgcagcttattaaatggcacattttgaaaagtgtggcttagaagatatccaagaaattaactttttccgtgtggtgacacatgtctgacaatgttgcagcattatatatggtttgggttacctgtatctattcatttttaaatgtgtagagcatttcctagaagcaagcaggcttgctagattcttaataaatattaactcatttaatcatcttaagagttctctggaatagacattattattggtagtgttattcccttttaacttatagaaaaacagagagtcagagaagttacttaagtttatggattattactgagtgatatctcattatttgagaattatatacaacatttgtctatattgaaataagaggtttatatttaatagttatttgtttatgagatcatagcaaaattcaaaatcagttattctctcgtgtgaaatgctttaancatgagcataaatatatttgttaatataggaagttaaggtcaacgtgatgaaattgttttacaacattttgctggatggcttaattttctttaacttacattgtttttaatggaaaacttaaaaatgtcaggttgctgaatcatgcggaggcaatcttcataaaatgcctgaaggtgattgctaaaaaaaagccgaagcggtgatggtatagtttatgct

SEQ ID NO: 240274 - DNA, 415 bp, Homo sapiens
gctgaaacatagaaatgggctgaagagtgtggtgactagatcataatatagtctttaagccatgttagaaagtttggacttattctaagatagtaacaacccattgaaaggttataaacaggccgggcacggtaggtcatgcctgtaatcccagtactttgggaggccgaggtgggtggatcacctgaggtcagatgtttgagaccagtctggccaacatggcaaaaccccatctttactaaaaatacaaaaaaattagctgggcagggtggcacgcacctataatcccagctacttgggaggctgaggcaggagaattgtgtgaacctggaaggcggaggttacagtgagccaagatcagtcaccactgcactccagcctgggtgaccgagtgagacttcatctcaaaaaaaaa

SEQ ID NO: 240275 - DNA, 487 bp, Homo sapiens
acatcattggtagtaaaggaggtgggaagtataggatgcatttttcatttaacgtttggccctctctactagagaaaaattaaaggtttccaaaaggatggatcttgtccacaacaataactgaaattgtaagcctttgtgaaaacagcccaagtggttcatgagagaaatgaatgttcatcaataatgtaaacactggacataaaagttaaatcaacaaagaatattcaccacccagctcactaaatccagcaaacttgggcacacaaggggcccactggagtcaatgatgttgtaatcaacagtgagcatttcggagacttataagctacatatttgtggttctcatttctcactgtgaacctttaaaaattgtttcaagtcatcggaggatggctaatgttaacagcaatacatattgaccatttgtataacattggtgtacagtgttacaaagtgctttgcatatacattatgttaacagatc

SEQ ID NO: 240276 - DNA, 711 bp, Homo sapiens
gaataaagaacctagaaataaatctacatatttacagccaactgattttcagcaaaggtgccaagaacatatattgggaaaaagacattgttcataaatggtggtgggaaaactgggtatccatatgcagaagaatgaaaactggacccctatcttgtaccacatacaaaaatcaacttgagatggattaaagacttaatgtaagacccaaagctataaaactactagaagaatacataggggaaacccttcgggacattggcctaggcaaccattttatagttaatatctcaaaagcatagtcaacaaaaatagactactgcgatgatactaaattaaaaagcttgtgagccagatgcagtggctcacgtctgtaatcccagcactttgggaagccaaggcgggcgaatcatttgaggtgaggagttcaagaccagcctggccaacatggtaaaaccccgtctctcctaaaaactaaaaatgcaaaaatctgggcgtggtggtacacccctgtaatcccagctacttgggaggctgaggcaagagaattgcttgaacctgggaggtggaggttgcagtgagctgagatcgcaccactgcactccaccctgggcaacagagcgagaccttgtctcaaaaaaaaaaagcttctgcacaacaaaggagatagtcaacaaagtaaagagacgacctgttgagtgggagaaaata

SEQ ID NO: 240277 - DNA, 438 bp, Homo sapiens
atatcccggaattggctctccatctttttctgtttcattcacactgtcccacattctaatccttgggattaaacttctcattaggtattgtgtacacaaatcttcatctcaatctatgatatctggcagaatttatgctgataactatactttctaaaattcaaatatgccataatgtttacaggatggtttaattagttgtaacatatttactgaagtaggcttaaaattaaattttcccaattaagtataaaaaattaattacactcttagaaaattcaagtccattattcacttttttgttagataaatacatttatcaaatttatataaattagaatatatgtattttatctgctttaagtatctattataacctgttgattattttaataacaattttcaaaaagcaggaccaatgtaaaagaaattaagagg

SEQ ID NO: 240278 - DNA, 375 bp, Homo sapiens
cctggtggtgaatctcgacttctacccttacctagcagaaacgagccccaacaccaccactttccctgccagagtcctgagaagccagcaaaatcagaaggcctaaatgagacccagagtctcacacacaatatctaaaagtccagattccaatcagaagccactcgccacactaaaggccagtgaaatctcaatatgaatgaaaaaagacaattaacagatgccaacaccaagatgacagacatgctgaaactgtataacaaagattttagagcagccatcagaaaagtgctacaagcagcaattatgagcatgtgtgaaataaaaaacaagaagtctaaacaaagaaagtattgacaaaaaaatagaaggtat

SEQ ID NO: 240279 - DNA, 234 bp, Homo sapiens
caattctatttctgggtatatataccgaggaattaaatgtcagaactcaaacgtatatttgagtttctgttcgtcagaactgaaacatatatttgagtttctgttcgtcggaactcaaacctatatttgagtccctgttcatatcagcatcattcacaatggctaaaatgtggaagcaacccaagtgtttcttgacagaagaatggataagcaaaatgtcttgtgtatctgtat

SEQ ID NO: 240280 - DNA, 255 bp, Homo sapiens
ggccagaagcagaaatctctaaatgtagcttttatagatggatgaggtgtgttcggttgtctttctttagttaataggcccttgaatttgtattcatttttatcttgggcactgcattttaaaagtaacctttcttggccgggcgcagtggctcacgcctataatcccagcactttgggaggctgaggcaggcggatcacgagcttagaagttcgagaccagcctggctagcatggtgaaaccccgtctctatta

SEQ ID NO: 240281 - DNA, 438 bp, Homo sapiens
ccaaacacacaaaaattgtgctgtaaattctattcaattgaattcgtccaaataaattcctagtgtttgaacttaggaccctatttccctctggggaggaaagaagatgtgattgggaggggccacagggggaccactaagatgctagaatgctgtttaggtgctggttaattcatgggtgtgtaaactttctgtatttctctgcatagtatttaatggatatttgttttttaattgatacctggaccttagccccagggattttgatttaactcatctggagagggtcccaggcagcagtgttctgttttttttttaatcccctccagatgattgtaatggatagccagggtgtataatcactgtattataatttcttatgaaaaggacaccttatggtcactatagaaatttaagaaataaagaaatgtgtaatga

SEQ ID NO: 240282 - DNA, 561 bp, Homo sapiens
aaatttgttgcctagtgccagactgcccacatgcttggagctttgagcctaggaggggcaggtttgtggctactcttgctgtggcatggtggttttggacccctaaggctccaaacacacttaaaggctcacctgtctttgagaatggttgattccccagggtataacctttatgtcacctgccttttaggccctagttaggcagcagttcttgaattgtagctctgaaaatcccaccatcctctttccccaaaggaaacctatctggctctctgtctcacctgtctacctatacaaaagaaaagaaaaaaaaagagaaagaaacctaagtccaggatgttggtcacccattcattctcttaatggcattagtggaacgcttccaggcattgagatgcagcagtgaataaggcagataagatctttgatcgcatagagagtgccctatgatggaggaggtaaattataaacaaatttagcaataaaaaatatggtttcagatagtgataatttgctgtgaaggaaataattaaagtgctgtggtaatgaacacatgagata

SEQ ID NO: 240283 - DNA, 376 bp, Homo sapiens
ggtttgtagtaagtttgaaatcaggaagtgtgagttattcaactctgttctttttcaagattgttttggctgttaagggtcccctgcgattccatgtggatttcagaattgatttttctatttcttttgggtagtgctgatatcttaatatcggattttctgatccacaaacacagatgtctttccatttatttgtgtgtttaatttcctttgatatgtaccagtcatttgtctccttggtttcttacgtattatttttttgatgttactgtaaatggaattgctttaataatttccttttcagattgtccattgttgatttatagaaacacaactgatttatctgtgttgatttttgtatactgcaacattgccg

SEQ ID NO: 240284 - DNA, 545 bp, Homo sapiens
tcaaagaagacttaaaaatgaccaacaaatatatgaaaaactactcaatatcattaattatcagagaaatgcaaatcaaaactagaatgagatattacctcacacccgttagaatggctgttataaaaaagacaagagataacaagtgttgttgagagtgtggagaaaagagaagcttgaacatcgttggtgggaatataaactgatatgcccactatggagaacagtatggaggcttctcaaaaaattaaaaatcagaactattgtatgacccagcaacccttcttctgggtttatgcccaaaggaaataaaatcagcacctcatagaaatgtctgtggtcccatattcattgcagcattattcacagtaatatagaatcaacctgtgttcactagtggatgaatggataaagaaattacattatatatacataaacaatggaatattactaggttttttttttctaaaaaaaaaaggagatcctgccattcgcgacaacatgcaaggacactatgctaagtgaaataagcccaacccagaaaa

SEQ ID NO: 240285 - DNA, 1803 bp, Homo sapiens
  misc_feature (1589)..(1589): n is a, c, g, or t
  misc_feature (1617)..(1618): n is a, c, g, or t
  misc_feature (1653)..(1653): n is a, c, g, or t
  misc_feature (1664)..(1664): n is a, c, g, or t
  misc_feature (1676)..(1676): n is a, c, g, or t
aaaaaaaaaacaaaggtaaattacatgtatatatgtgtgtgcacaaatcttaaagaatagagagataagtagtggtaaacctactattggttgaatcgtgggtgtcccactaagcgtgacaccgttgttccctcatggccacataagaaatagcctcccaagttcctgggacacctcatgcacttctccctggcttattcccacttccctctagaagccaacagtcttctgaattgcgggtcagccattcgctggcttttgtcggtttcccacctttgtctggatcctgaaactgcgaatgattttggctcagttcgctgggagccgggtgtcctgcactcttgggacaccaggagcagcagttcctgtgttcccattctccatttcagtgtccaaggtggcgccatccacacataatcacctgtcctgctggcagtgagcatttgggtgggtttctgggttttgtttttgctgccttctaagtagctgacttttcacccccaagctatgcttcttgaggcagagaagtgccagtttattttgttttctgtctctaaatccagttccttaatgcaccactgagactcagtttagaagtacagtgaaactttgtgagcatttttctccctgagtttgaatggatccctctctcattctttgagttcttgggcacttgtctcttagacactttcaagttacctactggacaggagagacctcttctctataaagtatcacacttggaggcttttcaggcacaggaccatagattgtaatattttccatagcagttgcccaattttatctgtaaaaattgctttttaaggcctggcacagtggctcacacctgtaatcccaacattttggaaggctgaggcaggaggatcacttgagcccaggagtttgaggccagtctggaaaacatagtgagacctcatctctacaaaaaattttaaaaattggttgggcatcgtggcatgcacctttagttccagctactcaaaaggctgagacgggaggatcccttgagcccagaaattagagctatgatcgcgccactgcactccagcctgggccacagagcaagaccctgtctccaaacaatcacaaaacttccaatggatgccgaacgtataacttttttttttttttttctttcttggagtaaaataacttgatccttgatctttggctgtagctcctgagccatttgaggcactggggggtttgtgtgttgattacctatgaaggagcaagtgggctgtttccttctcccagcggcttcctttgaccccaaatccctgagagtctcgcccattttcttcttggcttcctccctttgatatgcccagccggctcctgccctacctggctgccaccaggacctgctggaggcggttgctgggaattatttggtgtcctgtttgaacctcgcttgccgtgctcccagatttcctgtttctcctgggcttgcctttcaggatttgcagaaccccttctcctttagaagtgtcaactggggctgggtgtggtggctcacgcctataatcccagcacttttgggaggccgaggcgggcggatcacctgnggtcgggagttccaggccagcctgaccnncatggagaaaccccgtctctactaaaaatacaaanttagccaggtntggtggtgcacncttggaatcccagctactcgggaggctgaggcaggacagtcgcttgaacccgggaggcggaggttgcggtgagccgagattgcaccatggcactctagcctgggcaacaagaggaaaactctgtctc

SEQ ID NO: 240286 - DNA, 503 bp, Homo sapiens
caatgcttttcacttccagcccaactttgttatttatttagctctccagaagcctttgctaactgatcccaaactcgggaactctgacaactacaaatagttcagtaattaagctttcttttctgttcccattaccacatttgaaagtttgttctctctctttctctctctctctgtctctgtgtgtgtatgtgtgtgtgtatgcatgcatgcatggtgggaatggggggtgtatctatacaactttccatgtaattttatagacattattatgtattctttaaatcttggcacttgagcaagtctcaggttttgtcaaatctggaatacagaagaatattaaattaagtacttgtagtggggctgtacaccagtgtgtaagttagatgttttaaacatctaattgacctccaacttaaattatgagtcattatttttgtcataagttttaacagttcttgaattttataagtatctctagcttcttgataacttataaggca

SEQ ID NO: 240287 - DNA, 464 bp, Homo sapiens
cctagtagtttaatcccatgtctttgcaaggtcataaataagcacctgttggtggccaacattttacagggtcaaaaacacctgtagggttacatggtgataaatgcaccttcctctctttttctcccaggcaggcctaactattttataatttagtttctgttttctccagtggaagagtagaaccattctggaagggacattttcctgctgggccttggagtgaagggaattaactttgagccttgagtaagtcagggttgctgggatcactgctgcctgacctgctacactctgaacggggacaagtaaaacttgtttttattttgtgtagactggaaaaaaaaggcatttggtgagtttttaaaaaatgacttgaagctttgacagcactatagctatgagaaacattctgaagtgttttaatatagttgaatttttttttttttgagtcagagtctttc

SEQ ID NO: 240288 - DNA, 442 bp, Homo sapiens
ttagatatttattgaatgttgaattaatatatctttagagatcaatgagctttctaaatatttattaattttcttattttaaaatgtgaatattaatatacagttcgcattatgtaattttcacatgtcatcattttgattctctttatctccatcttcttaacaaaggccgttgaagatatacaaagaaaggcatggttaagaagagttccaatatcacttaattgattgctctttcttatttctaaccataacatgtgtatattacttgcccaataaactgtctcttgaaaacaggacatgagctttattgtatcctgaatccctaacaccaggctcagagcctgacacatggtatgcatttggcaaacctgtagttagtgtggaagcaaataaatgactccaagcaggactacatgttaattctaaatatacatgagat

SEQ ID NO: 240289 - DNA, 146 bp, Homo sapiens
aaatgtcttcaagcactctggcaagttacatatatcccattgcttttggttgcccatctcttctttgcttcaaacccccatgcgagtttcttcttttttcaggcagccctgtgaatttttagtctccatttttggcttttacaaac

SEQ ID NO: 240290 - DNA, 355 bp, Homo sapiens
acaaaagaattttataaaagaaaatccatatgtggaagtaacattatcttactgattttacagatgaaggcatagtgagacagagtaatttgtccataatcatgtagggattcatattaactctgtgtgcttatccttgcctctctttaaaatagaaaatgaagatgacagggatagatgatgttgatagagagagagataactgatagatattgaggtatatttatgtatgtatgtatgtatgtatatatagtttcattttaacagatgactattagaaagattatacctttctacagttctgtttctacattgtgggcataagagaaaaatataaacatagaattaaattagc

SEQ ID NO: 240291 - DNA, 879 bp, Homo sapiens
attccttggaatctgtgaggccaagaaccccaggtcagagaacatgagacttgccaccatcttggaagcagcccaccaccatcttgggagctctgggagcaaggaccccccggatactataagaagattgggatagatactgagtgagcctcagaaaatcagctggatacaccccagtgggggatttgatgcagcaatatgcaggcatgggatatcagaaagagccagataaccaaaggaagagtagtagctgaagcaggattctaagaccaagaatattaatttcagggcagaagagatttttgctgtttcggtcgtggcattatctccagtatttatgtgcctggaacctgcagcagagccatcagaaaacaactcctgattttagttgatcagattcaagtcaatgaaaaaatgacgtttctgtgtgtctacttcgggctaagcaccagggtaggcacaagagagatcacagggatgaattagtcctagccccttggagattatcctctcaccctctccccgccatagttatcttggtccttttcacatatatcttagcaggttctgtttcaggcaaagtttcacttctgtatatgtttgttactactgttcatttgagatctgccactaaccctcattatgacctgggacatgtctgtggcccctccacatgctggcaggataaaaattgaccaaatatatgatgctgtcacatagatggatcctattatttggtgattacattgaaatctttactgtaaaaattgtgttgtcaaaaatgaaaacagatgatactgagtaactcactagtgccctaaagtactctacagcttttcaaacaaaattgaatattcttttcaacattctctctgtaaa

SEQ ID NO: 240292 - DNA, 538 bp, Homo sapiens
agctgtggaattataaaacctttggaaaatctttcatgtgagaacaacatgggggcaagcctctgaccaaaatagctcaaaaatttgtgttacgcagttacagtaaatacccaagagcttgacgcataaaacacaacagcctcctggagacagagggaggagaaagaaagataaagtctgtggctttagaagaaaaggaataacttaagaggcttgtttgctgttcaggctggccaccaaggatgacattttggatactataagaagattgggatagatactgagtgagcctcagaaaatcagctggatacaccccagctccctcccaccacatgaactaaagatctgcaagctgtaaccttttccgaagggctacctgggcctctgtgtccatcagagctgatgagctgatcttcattcaccataagtgcaactatcatggctcatggagccctggagagagtagcacatatattgaacttcagttttaaaaagtctaatacttttctaaaatgacttgctatctatttcatccaga

SEQ ID NO: 240293 - DNA, 413 bp, Homo sapiens
tgacttgcttttgtttatattttttattcccagtagaatattaatttcagggcagaagagatttttgctgtttcggtcgtggcattatctccagtatttatgtgcctggaaccagttactgagttaggacccatgatagattatatgctgaatcatttcatccaaattcttttcagcagtcaagtgaagtagatatttctcttcttgagagtaggtaggcaacagagcctgagagtagttagccactctaagccacatatccagtaagtaacagagccaagacctcagatacaattcagattttgctctaaatgctaaggtcttctgttatattgctctgcctctttccattgacctctcaattttcttttcagatccaacaggtatttttaaaactatactaatatagtaaa

SEQ ID NO: 240294 - DNA, 380 bp, Homo sapiens
aaatggtagagaaaagtatttgtgtgaccttaaaaaaaatcaaatgtagaaaaacattgcaagaaattaatctgggaacttatacacagacttgcaaaaaagtacagcttctgctaaaaaggcataaaacaatagtattgaatttcaggagataattcattgctacaaataggttgctatggcaccagaaagtccaggaagagctgattaaagtgttagctggctgacacattatggtggtgtggtagaaagtgtctcattttaataagtcacagtgctgcctaatctgtgtgcaaataaattaagaacaatgttatagatgtcattttggggcagatgtcaagattttgtcctacaataaaagtagacacattcagtta

SEQ ID NO: 240295 - DNA, 246 bp, Homo sapiens
tactgacacagcccatctcctactgtggaggctggacttcacagattctcactgtcccagactcagctgcagcaagctgatctatgactcagatctggccagtaaggcataaggtaaatgtctggaggatttctaaaaagattttcctttgtgataaaaagagagagacaatgtctcgattccttcatgcttttgtcagtgtatgaaaatgtgattttaggatccatggcaaacatcttctgtcta

SEQ ID NO: 240296 - DNA, 298 bp, Homo sapiens
aaaagccatctaaaaaagaatgtatttttttaaaagatagtttatagcagcaggaagcagattggtagttgcctggggctgcttctcaagtggttattgactgcagatgggcaggagggagttttttgggggtgatagaggagttctaaaactggactgtagtgatagtggcataactgtgtaaatttactaaaactcattgatttgtgaactacaatgtgtatattttaatagtatgtagattttattccaataaaactttaaaccaaaaaagtcaccattaaaagaagaaaaagag

SEQ ID NO: 240297 - DNA, 387 bp, Homo sapiens
tgccctgttcactttaaacatttgtctttccttgtatggtcactggatattaggggagactcaaaatgaatgaggaaactggcatgtgttgagtacttattgtgtaccagagactgtgctcagcagtccacattattttattttatttattaatttttttgagacggattcttgctctgtcacccaggctggagtgcagtggcgcaatctcagctcactgcaacctccgcttcctgggttcaagcgattctcctgcctcagcctcccagatacttgggagtctgaggtgggaggatcacttgagcccaggaggtcaaggctgcaattagccatgatcacactactgcactatagcctgggtgacagagagagaccctgtctccaaaa

SEQ ID NO: 240298 - DNA, 310 bp, Homo sapiens
tctcgtgagaattcactctcagaacagcatgcaggaaactgcccccatgatccaatcacctcttaccaggttcctctcttgacatgtggggtcttataattcaagatgagatttggatggagacagagcaaaaccatatcatccactttacccaaccaatcgatgaccccaaattttctagtccctcaccctccacaacccccttaaaaatccttgcccagaaccctatgaggaaacagatttcaagcttgagaattcctcctgcttccttgtttggcatcttgagattattaaactcttcactacatga

SEQ ID NO: 240299 - DNA, 381 bp, Homo sapiens
cccaaggccatttgttaattaacagcaaagtcacaaccagatccatatatccagactgttggtagtacaaacttctttctactggctatagtgatagtatctcagtttccactagagtttattcctgccaacaaagaatagataattgtatgtctgccaccacataccccttgcaaaatagcaaaattgaaggaaattattacaagaatatctaaagagttcataatgtagtcagtctctaatgtacactggattccagacaagttgctcagaaatgtcaatcccatgaagtatgagattcatgggtcattaacacgcaggataataactcttaaatcactgtggagatctccaaaatgggcaatgaaaactgcattctgg

SEQ ID NO: 240300 - DNA, 402 bp, Homo sapiens
gcaatcttaaattataaaagaatcttatttgattttgtgattctcttgttttctgctcataaagaaaatatcctaaattgaacaatggcatgctacgtttttagtttttaagacagctaatgtgtaaaaagacatttaaagtatagttgtgttaagtttttgaagtttacagttgtttcaattttgctgctatactttgttaacatattttaggaatatttcattttagtcacaactaggatataaacattattttggtggcgatctccttgtaatcacgacatcaaccaaatttgggaaattttgatttgttagatttataaattttacagtaacacaaaagtctaatttcctatatattttcaaggcccctatacctttgtcaaaataaagtatcaatga

SEQ ID NO: 240301 - DNA, 554 bp, Homo sapiens
ccataactgagaaagtatttataaagcccaattcctagccaaattaacatatatcccaaaaggtaaggtctatttcatctttagtttatactcaatgcaatacgtccagcctccaaaaaaaatgacataaacaacaaccaaaaaaaaaaaaaaaagaaacaccaacaccattataagcaaaacacagtctgaagagacaaatcaaaaattaaaataagaatcagattatgacacagattttgatattatcaaatggagaatttaaaaatagttatgtttaatatggaacataacagaaaaatatagacagaaggttaatgaaagaagagtgatagaaactctaaaaatgaattaaaagaaaatgtaagaatcaagaacattgtaagagaaatgaagaatatctttgctgttctaataagtagacttgacatagccaaggaaaaaaatattacgaaactaaaatataaaaagcaaaaggaataaaagaaacaaaacatctaagaaatgtgagaccatttcaaaactattacatacaggtatgtggactaccttac

SEQ ID NO: 240302 - DNA, 431 bp, Homo sapiens
cttttttttcttctcaagtgggatacttgcttctgctcctcttgcccttggatatcagactttggtctctgggacttacataagtggattcccaggagctctgtggctttggtagcagactgaaggctgcactatcagcttccctggttttgaggctttcagacttggactgagtcactggcagcttgaaccctgtacctggaaaagtcacaagcactcaataacctgtgattgcagtctcaggggctgacccttgcaaagccacaagggcagagctgtccaaggccttgggagcccatcccctgcactagtgtgccttggctgtgggatgtggaatcaaaagagattattttggagctttaaggcataatgactgtcctgctgggtttcaaacttgcatggggcctgtatcccctttctttcggctgatc

SEQ ID NO: 240303 - DNA, 655 bp, Homo sapiens
tgaggatgcagttttgcagcagggcctagcaatgagatacgttgttacacatcctggcgaatctttctgtggactctaggatcctcttcatttgcaagaggtcagccatctatttcttccaattcctccagcttcacatatctccacagaatgcaacactgcaaatctgcagttctcttcatgatcctctttattagattttaaaagagtatctccaaaagatgaacatagtgcctaaggctttccaaatggagtaagaataatgcacaagaacctagaataaagttattaaatgtctgatacagttgtaatacagacttgatttttgaaaaatgtggccaatgaagagaagagcaaatgtgctatacgatggtgagcaaaaggtgttgacaggcctggcatggtgactcacccctgtaatcccagcactttgggaggctgaggtgggtggatcatttgaggtcaggagtttgagactagcctggccaacatggtgaaaccctgtttgtattaaaaatacaaaaattagccaggtgcgatgacacatgcctgtaatcccagctacctgggaggctgaggcttgagacttgcttgaaccggggaggcggaggttgcagcgagccgagattgtgccactgcactccagcctgggcaa

SEQ ID NO: 240304 - DNA, 448 bp, Homo sapiens
ttggatttgtgattttgatgaataaatttttataaatttttgtttcagttcctctgattaaaaatgacaaatgttgactggaacagaaaataaattaaaaatttattcaaaattcacaaaaacaaacaagtataaaataaatataaataattaaaacttcaaataaattttaatagtttttagcagttaagcttttgaagttattgaaacttaaactgcacagaaacatttagggtatactgtatatttattattttttgctaagccatttcaaaataaattatagatgtcatactttacccctaaaaacttcagcatgcattttccaaaaataatgatattctcctacataatcacaataccattttcacatataacaaaattaacgataattctctaatattatctactatccagtgcatatacaaacttcaccagtcatccccag

SEQ ID NO: 240305 - DNA, 650 bp, Homo sapiens
aatttaccattttctctcagtgtagggtaataaaaacattttgatatttaagttttactttatagatgatgtcgtgagttttaatcatgggctgaatatatttattggaaattttgtgtaaagaattctttgggccgggcgcggcggctcaggcctataatcccagcactttgggaggccaaggcaggcagatcacttgaggtcaggagtttgatacccgcctggccaacatggtgaaaccccatctctactgaaaatacaagaactagctgggcgtggtgtggcacacctgtagtcccagctactcgggaggctgaggcagaagaattgcttgaacccaggagccggaggttgtagtgagtcgagatagcaccactgcactccagcctgggtgacagagccaaataatgtctcaaaaaaaaaattcatctctacaataaaaccatgttggcccgccttgcccattcgattttaaattcgtcaagcttatgcttgcggccgcaatttggcctaatttggcaattcgccctatagggagtgtttacaatcattggccgccgtttacaacgttggacttgcaaaaccctggtgttccccctttaatcccttgcagttcccttttcccagtggcgttagcaggcccccccctc

SEQ ID NO: 240306 - DNA, 420 bp, Homo sapiens
aagaaagccaatttacctactttggtatttggtaaaatttttcacttctgttgttattttatgactatcctcttcatgtaatttatttgaaatagctgtacaacttatatttagaaagtataaatgactgaagtgatatttttaattaaacataggggaaagaagaaaagtttccgaatgatgatgttgttattgaaattgtttaaatgtgtggtttatagtatagatttttaaaataataggttttgttttgttcatagttaagtggagcataccaaatggttttatctaaaagtaaaattcatttgcactcactgaatattataaaatattatataagaaaataactgtacggctctgaggataagactttgttttgcaattacatgacagctttttaaaaataacatcatgcaacct

SEQ ID NO: 240307 - DNA, 325 bp, Homo sapiens
aattgttttgcctatccaccccatgctgccaaacccatatactctcctatcctcaatacctgcctctacaacccattattctgttctagatctcaaacatgctttctttactattcctttgcacctttaatcccagcctctcttcgctttcacttggactgaccctgacacccatcaagctcagcaaattacctaggctgtactgccgcaaagcttcacagacagcccccattacttcaatcaagcccaaatttcttcctcatctgttacctatctcggcataattctcataaaaacatacgtgctctccctgccaatcgtgtcc

SEQ ID NO: 240308 - DNA, 448 bp, Homo sapiens
ttaaaatttagacttgaacagtaaggacttcaactgaccttcctcagactgagaactgtttccagtatatacatcaagtcactgaggtaggacaaaagattgctacattcctattattttatggctattataagtgtaccaggactctaaaagaaacttgtttgtataatgctattctatccaaggtatgtagcccaggaaataaccaacctgatgcgtgttatgacccattttaagcctcccatgatcacagtttttaaaataaaattaaggactggtccttttctaagtgacacaagaaaggtaatagctagaacagaagaaagaggggtccccaaaaatgtaaccttaaaatttgatgcttgtgccactattaatagcaaacagcataggataagatgtggttctctagattaagaaaaaagttacacagcagaaaataagtaca

SEQ ID NO: 240309 - DNA, 394 bp, Homo sapiens
atactagttttccatctaatggataaaatcattatacataaagaaaaaaaccttcaatgcattaaatgacttatttttaataaagaccatctgataaaattagaaccttcttcctagataccattcttcagacaaaaggcagaaaggctgtctcatactcagactacaaagctgcaaagagctgtaatggtagattagcttgcctctaatttaaccagcaattattaggactgaataataaggaaattgtttcaatgcctgcataattatataatctctaagtagaaacaaatgaaaacattttcttgtttaaaaaaataaaaataaaagacgccgggcatggtggcctcacatctgtaatcccagcactttgggagggcaaggcaggcggatc

SEQ ID NO: 240310 - DNA, 640 bp, Homo sapiens
agttgaacaccagccagggcttaggttttatggacacacaaggctttgcattgtggacttgctctgaattctttcttgcctgagatctaagaaccgtctctgggagcctggattgggacccctttcctgtaacagatctacctcctactgggtccccaaaccagaactattcctagagaaggatgtctcctttcctcaaaaaagagagcccataaaactgttggaggtaagggctgtgctaaagcaagcagtggtttctgatgggcggagcctcccctcacgcttcctgctggcagatgtgaaaagccctccttcagaaatacgtctatgagttatttcccagataagagcaatacactcggccgagcgcggtggctcatgcctgtaatcccagcactttgtggatcacaaggtcaggagttcgagaccaacctggccaatatggtgaaaccccatctctactaaaaatacaaaaattagctgggcgcggtggtgggtgcctgtagtcccagctactagggaggctgaggcagaagaatcacttgaacccgggaggcggagattgcagtgagccgagatcatgccactgtactccagcctgggtgacagagtgagactacatctcaaaaaaaaaaaaaaa

SEQ ID NO: 240311 - DNA, 348 bp, Homo sapiens
aggggctgtgagtttgatctgggatggttagagaagaccttgctgggaaggaggtactcgatctggccctgaagggcagatggaattcaaacaggcagggaaggcagtacagagttttcttttcagggaagatttcagaaacacagatgtagaaatggcaatgctcaaggcagaactgttcttgcgacagtgagttatccagtggggccaggttgggtagagtgaaaataaggcagaaaagtagcaatgagggacaattctgtcactctccagagaggacaagtggagcatagccagttcctggaagctttatgctagttcaggatccgcctggatccactggtggtt

SEQ ID NO: 240312 - DNA, 534 bp, Homo sapiens
caacaattgtcctgtcaggtgtggaatctcatgggccagcagtggaagagcttccacctcagcattttgggagctaactacacagcattagtatgagctctggcattggctgtgaacatcagtggcaagcctttcatggagcccaccccacagtatgaacaagtactgttacccttcccagctacagagcatcgaagcccagttctctggatctgtgagctctctaatacctttaatatatctctttcctgttaaaggctacaagagagaggaagtattccagaatattctacaggggttccagtctatgccattgataggatgccattgtctaaagaagaggaagtacttttcaatttaaatacctaacaggtatttatcgggaagagtaggatgcactgaatttggcagagcatttatgtagaggcacttagaaattctgccctggaggttcagagagaggcgagggttagaaatgtggacataaggctgggtgcggtggctcacgcctgtaatcccaacactttgggaggc

SEQ ID NO: 240313 - DNA, 536 bp, Homo sapiens
tgcttcagatccaatcccatctgtaagatctcatgatctaatccaacagattatctcctttcccctttggattgcatggcaatacactctctcatcctcctttccaattttctcagtgtgctttactagttcctctgtagctaccaagtcttcaaatgttagtcagtgttctatatatctacaactatggtgtcaattactagctgcaaaagtttccaaattcacagccctcacctcatctctgtataaccagaaaatttatgtcaaatgttagatatcccccacgaaccctgttgctatttccctgcccagctgctccaaccaaaaccttagaagttatttccctctgcttcaaggtcaacatcaaatcaatcacgaagttctggctaccctagttcttatacattcttaaatacttcttctgccttgccccacagacctcccagaacctacatactgtatctccctattgccacttgtgctgccttttttttttttttttaacttttttttttaaattaaaaactctgccagcc

SEQ ID NO: 240314 - DNA, 588 bp, Homo sapiens
tgcttcagatccaatcccatctgtaagatctcatgatctaatccaacagattatctcctttcccctttggattgcatggcaatacactctctcatcctcctttccaattttctcagtgtgctttactagttcctctgtagctaccaagtcttcaaatgttagtcagtgttctatatatctacaactatggtgtcaattactagctgcaaaagtttccaaattcacagccctcacctcatctctgtataaccagaaaatttatgtcaaatgttagatatcccccacgaaccctgttgctacttgaacaagctcctcctccagtatccccatctctgtaaatgatacccatattttccctgcccagctgctccaaccaaaaccttagaagttatttccctctgcttcaaggtcaacatcaaatcaatcacgaagttctggctaccctagttcttatacattcttaaatacttcttctgccttgccccacagacctcccagaacctacatactgtatctccctattgccacttgtgctgccttttttttttttttttaacttttttttttaaattaaaaactctgccagcc

SEQ ID NO: 240315 - DNA, 496 bp, Homo sapiens
aagaattatgcattattaaaataatcactggttatgttcaggtattctctgtatacttataaaaggtttttaaattctatgtaattgtggattacaagaataaagagactatctttagtgctggttcactgtatcatcagtcagacactagcccttcatgaataggttatttatgggggcagccaggaagaaaaatgtgtgatgaattgctggcaaaatccactgaacaccaggaattcattgttgaacatccttgattgtcttgggagaattcccattccagaacagctaacacttttctggcaatatgaaggttttggatggaaagatcgaggcccagaaattccagctccaggactctcagttcttggagctggtccatccgagcctgattgcccaaatgaactgatattatagctgattaccaggaacacaatactaaacagatttaaatgcgtcagttcataaaatgttcataagcaaagtcactattcat

SEQ ID NO: 240316 - DNA, 758 bp, Homo sapiens
attagagttgtccgcagttggcagtggtgatcttcttgccagtctcaccattcccggacccagagcactccatggcttccatgatattcactccctcttctcactttgccaaagaccttgtgcttgccatccagccactcagtcttggccacacaggtgaaaaactgggaaccatttgtgtcgggccagcatttgccatggacaagatgccaggacctgtgtgcttcaggatgaagttctcatcatcaaatttctcctggtagatggactggcattattatggtgtgtgaagtcagcactctggcagataaaataaaccctggaataattctgtgaaagcaggaacccttataaccaaacccttttcctccagtgctcagtgcacgaaagttttccactgtttttggagctttgtcggcaaacagctcgaaggagctgcatgggccaaaggagttaccatcaacaatgatgtcaaaagaacacagtggcgttgaccatggctagaggcaggtggcttcaggtggcagcgatgactacaaagccccatttctcctttgaacctaacttcctttcctattttaatgtcccgtgaaggtagggaaaaataaattcactaaatatacggtaaataacatttaagtttagattttacagttgctagaattcaaagttatctgtgtattaatgttatcatattgcccaaataaagaattagttttgtttgatgaatttcgaacttctaatttatttgaggtggt

SEQ ID NO: 240317 - DNA, 486 bp, Homo sapiens
cggtagaagtgacactgtgtaacttttaaaattgagtctaaagagatctgtaatttctgtctcatactttgaacaccccttcttgggatccagccagcatgtgagaagccctggtggccatgtggaaattatatccacgtgagagagaggcccagtcatccctttcagagcactagagatgggagggaacccattttacatgcccagcccttattactatctgacctgagggagatcacaaatgccttctgtattgggtggtaatgatacatcacaaaaatgcgaatgctcgcagccaggcgggcgctgtggctcaagcctgtaatcccagcacatttcaagcctaggtgggtggatcccttgagcccaggggtttgagaccagcctgggcaacgtagcaagaccctgtctctaccaaaaatacaaaaattagccagtcttataacccggtctcaaatgaataaataaatagagggatacaaatta

SEQ ID NO: 240318 - DNA, 410 bp, Homo sapiens
ccttaaaatattcaagcccttttaccttccccaccaacctttatgccataatgtttagtacatcttcttataatgaaaatgtcaccagacaatgttaaactttttgcttgaaaaagtcatattttagggctgggcctggtggctcacacctgtcatcccagcactttgggaggccaaggtgggtggatcactttagctcagaagttcgagaccagcctgggcaacatggtgaaaccccatctctacaaaaaatatatatataaattagccaggcctggtggcatgcgcctgtagtcccacctgcttaggaggctgaggtggcatgatggccttagcccaagaggcggaggttgcagagaggcaagatcatgccactgcttgcgacagggcaagaccctgtctcggggaaa

SEQ ID NO: 240319 - DNA, 433 bp, Homo sapiens
tgtgatgtgtgcgttcatctcatagagttgaacctttctttggattgagtagtttggaaacactctttttgtagaatccgcaagtggacttttggaacgctttatggcctatggtagaaaaggaaatatctttcacataaaatctaggcagaagcaatctgagaaacttctttgtgatgagtgcattcatctcacagagttaaagctgtcttttgattgagtagttttgaaactctctttttgtactatctgcaagtggacatttggagagctttgaagcttatggtggaaaaggaaatatcttcacataaaaattagatagcagcattcagagaaacttctttgtgatgtgtgcattcatctcccagagatgaacctttcttttgaaggaccagttttgaagtactctttttgtagaatctgcaagtggaca

SEQ ID NO: 240320 - DNA, 1959 bp, Homo sapiens
  misc_feature (38)..(38): n is a, c, g, or t
  misc_feature (591)..(591): n is a, c, g, or t
  misc_feature (796)..(796): n is a, c, g, or t
cttttgatgttaggcccagtggccttccccctgacccnagcagcctctcatgaagacccactgaaggaatgggacaagagtggaggtaggttggtacatcacagactcatggggcagcatctgcaagacccttttatgatttatgcagaggaagcctggcttggagttttttagaccacccgggtcaggatcttagttctgccacacactgtcttggacacgttatttcatatcttgtgagttatgattttttcatctataaatctggcccagtgtctcccttgcaggattgttgtgtgagtccaactggcaccaaggaggtgggaattctgcaagaacagctgtcagtggtcatcatacttgtgctgtctatgtgcatggctttattgatactcggtgttcataaattaatattcccatgtgaattaggcagttttttctgagtagcaaaaacctcaggatttcagaggcttgtttgacagcagatatgtatcttcatgctcaaggatctatgggttggttgtggtttggctgatctagttgcatggctggttcatgccggacttgtggttgattgggatctgctccacntgtctttgatctgagttcagactaaaaggcagcaacagacagcggctatggagacatattccttttgtggtgcatcataagagggcaagaggaatagacttgggaacagcacactgtcacttctagccacattccattggctacagcaagtcagtgatccagtccagaatccagtgggacagggaagtaaacaccattcactctngtgggaagtactacaaagtcccatgacaaagggcagaaatgtgtagttcacagtcatgttggaagtgaactgggaagactcatgcagtctaccatactaactcagctgctccacttgggtgaagcaaggaaagcaaaagaataataaactgaggagcaggctgggagaggcattgactatgtatgcaagtaacagatacttatttttcataagcgtgtgcttagtaaagttgggttctggaggtcaatattataggaagatcatgatctttgattctgaaggatagcatatgtttatccttatgccagtaccacactgtcctgatttctttcaaagtcaggaaatagaagtccaacattgttcttcattttcaagattgttttggctatcctgagtccattgcatttccatatgcattttaagataagcttgtcagttccccatctaatttaaatttgtgattcagtgctcaggaagattcaattgctgttggcatctaagtttgaaggaaatggtttgatcgtttatccaacaaatatttattaatattgttgtgccgggcattgtagagttggtgctgcaacatacaccaataaacaaatccaaacacaatctttgtatccacatggcttacaattgaagaaaattagcagatattaatcagtcttcacgttgaaacataattaaaaactgagataaattccatgatctaatctgaagatgcagagtttctctgagaatataatatttaaggaagtacaggagttacctaggcactgaagatgagagaggaagccttccagacagagagaacaacatgggcaaaggacctgtggtggaacaactgcagcatgttccaggatctaagaaaatgtccaatgggccgggcacagaggctcacacctgtaatcccagcactttgggaggccaaggtgggcagatcacctgaggtcaggagttcgagaccagcctgctcgacatggcgaaaccctgtctctactaaaaatgcaaaaaagtagctgggcgtggtggcggacacctgtaatcccagctacttgggaggctgagggaggagaatcaattgaacccaggaggtggaggttgcaatgagccaagatcgcgccactgcactccagtctgggcaacgagtgaaactgtctcac

SEQ ID NO: 240321 - DNA, 642 bp, Homo sapiens
ctctgtgatagccgtgaaagtcgaaggcaccttgcttcagagagaggaattgccaagtgctgagcacggacagccgcttggtctgcatgggcaggacgtgcctctgtgcagtacccgtgaagtgtgaggttctattttggtctgatgttccatggagatggcctggagctcgattctgaaaaccgaagacagtcaggcggcagggaggggcggcaaaggaagaggaactgcacagatttctcttcccacaaacaaatatggtccagggcttcagattctctgaagtctcacagatacccggcagcacatggtcctctgtttgtttgtcgataacatttggagacacgcgcgcctcgtaaactgtcggcctgctgtgcttcttgtcacacagcacatggcctgcctgcgtgggccctgctatggccgggggcggggtaacttccagtgagatttgactgatgacaccgtcaaatcctgcgtgtgaaaaaacatgtttcggagactgagatgctctattttgatatttttaaagattgttaatgtatatttgactttcacaacaagctaacaggattagtaagtttttatggatttttaaatttctataggaaacaaagactgagattttgtgacatttgacta

SEQ ID NO: 240322 - DNA, 259 bp, Homo sapiens
agagacggctctgccatccggctcaggcagtgggcgcccgccccgcccccagcgcccacgcgactccggccccgaggctctcccgagcgcagcgttctggaagcgccgccgctaagcgtctgcgtctgcgcctgcgctgaccccagtcccggactcggtccgaggcgcgcagcccggagggggcggggccgagcccgaagggaaggcagtgcgcatgcgcggggcgagccggccggcactgtcacagctgagcggccgc

SEQ ID NO: 240323 - DNA, 2978 bp, Homo sapiens
  misc_feature (622)..(622): n is a, c, g, or t
  misc_feature (908)..(908): n is a, c, g, or t
  misc_feature (918)..(918): n is a, c, g, or t
  misc_feature (1360)..(1360): n is a, c, g, or t
  misc_feature (1440)..(1440): n is a, c, g, or t
  misc_feature (1644)..(1644): n is a, c, g, or t
  misc_feature (1704)..(1704): n is a, c, g, or t
atcactgatgggtattttgcttggttccaagtctttgctattgtgaccagtgccacaataaacatatgtgtgcatgtgtctttatagtagaatgacttacaatcctttgggaatatacccagtaatgggattgctgggtcaaatggtatttctggttctagatccttgaggaattgccacactgtcttccacaatggttgaactaatttacactcccaccaacagtgtaaaagcgttcctatttctccacatcccctccagcatctgttgtttcctgactttttaatgatcaccattctaactggcatgagatggtatttccttgtggttttgatttgcatttctgttatgaccagtgatgatgagcattttttcatatgtccgttggctgtataaatgtcttcttttgagaagtgtctgttcatttcattcacccacttttgatggcattgtttgtttttttcttgtaaatttgtttaagttctttgtagattctggatattagccctttgtcagatggatacattgcaaaaattttctcccattctgtaggttgcctgttcactctgatgatagtttcttttgctgtgcagaagctctttagtttaattagatcccattngtcaattttggcttttgttgccattgcttttggtgttttattcatggagtctttgcccatgcctatgtcctgaaaggtattgcccaggttttcttctagggtttttatgattttaggtcttaggctccggttttaactttatatcactgaaagaggcactgaagaggtggtaaaacagtcttgaatcaccgacaccacccctccctcatcctgtgacagcagtggcatggtgcagagagcttttctgtgcactggggagagagagagtgcagtaattatgaggcantgagctcagngctgtcctattataaaagaaaaaaactggatgaaacttaactgatgctcacccatggagggagcatttaatccagccctaaacagaggggaatcactgacccccagcagtctaaacttgagttccccgcaagccttgccaccatgggctacagtggcagtctaggccactgggactacaactcctaggcaagccctaatgctgaactgggcccagagacagtgatagtgggctaagcggggcatgtgacctaatgacacatcagtcaggggaagctaagggagtgctggcatcaccattcccctaaccccaggctgcacagcttgtggctccaaaagagaccctttccctccacttgaggagaggagatggaataatgtggaaaactttgttttgcatcttggataagctcagccacagcaggataggacatcagtcagagncatgaggtcccctttccaggctgtagctcctggacaacatttctatacatacctgagaccagaagagaacccactgcctngaaaggaaggacctactcctggcaggattaattatctcctaactaaagagtccttgggtcctgaataaccagcagtaatagccaggtatcatggcaagggccttgggtgagcctctgagacttgctgccttcaggtgagactcagcctattcccaaatctggtggctaggtggcaagatgcctttcacgtgaagaacagagganggaaaagtaaaggggactttgtcttgcaccttaggtgccaccttggctacagggggatanagcaccaagaggactctcagggtccccaattccaggagttggctcttggatggcatttctggacctgccctgggccagaggggagcctgttcccctgaaaagtgagtcccaaaccaggcagcattcaccacaagctgactgaagagctgttaggccctcaaggaacatcagaggtagtctggcagtactcctcatgagcctatggtagtgtggccacagggtgaggctcctctctgtttggaaaggggtgggaagagtgggaaggactgtgccttgtggcttgagtgccagctcagccgcagcacactagaataccacgtagaattctaaggtttttgcttttagttcttagctcccagatggcacttctggacctgcgtggggagtggaggaactcaccacctgaaaggaagaacacaggcctggctggctttaccacctgctaagtgtagagccctagggccttaagcgaacataagctgcagccaaggactggttatggtaagccttgggcaacacccaatgctgtggtgactttgggtctgatccagcacagtgctagtggtggtggccacaagggtgcttgggtcactccactgccagctccaggtggctcagaacagagagagaggctctgtttgggagaaagtaaggaaagagaacaagagtctcagtctggtaatccacagaattcttctaaatcttatccaagaccatcaaggcagtacctctatgagtctggaggaaccactgcattattgggcatggggtggcccctaaagcacatacagcttagatcacaactcccaagtccttctgaatatatggaaagccttcccaaggaggatgggtacaaacaagcccagactgagaagactacaatgaatacctaactcttcaatgcccaaacacagacaaatatctacaagtgtcatgaccatccaggaaagcatgacctcaccaaatgaactaaataaggcactagggaccaatcctggagaaacggatatgtgacctttcagacagagaattcaaaatagctgttttgaggagactcaaagaaaaatcaagataacacaaagaaggaattcagaattctatcagacaaatttagtagagattgaaataactaaaatgaataaagcagaaattctggaatttggcatactgaagaattcatcagagtcttttaataggagaattgatcaagcagaagaggaattagtgagcttgaagatagagtatttgaaaatacaaagttagaggaaacaacc

SEQ ID NO: 240324 - DNA, 464 bp, Homo sapiens
ctgcccagatgtgacacaatgtccctctgcccacagtccattgttcaaaggaaaccatatacacatgtttaacttcaaggtggcagggaagtgcaaccctaccatttactcagaagtggaagaactagcaatattttgcaagtaacttaataactaccacacttggcaagtagaacccatttctcagggtgcaagtcatcttccatagtgactgattatacaaactgtttggtgacacaggtcatatctcatttcaagatgtataattctgcaactttgttttgtctgtagcatgcatagaatgtttatgaagttaattattatgaagatatgatattaataaccatgcttttttggatatagtcaactttatgtaccttctcttttcttggtgttagaaggcagtgctgtatgccctttttccaaagctcccaggaataaagaggtttgccatttgtgctgtg

SEQ ID NO: 240325 - DNA, 836 bp, Homo sapiens
cacctggaattccacactagactcctaatttactgtgttcacttttgcccttctagatctactccagtcttggtgacttttacttttttaaaaataaaatgaaaaacaacataaaaaaggaataatagctaaattataatcttacagtggatgatttttgagaagtacatctgttctcacactatcatgtaaggaacgaattcaaggaactaaattttggcaaataccctcagaatcttagtcatagcatcatccaaatttccatcttgctagcccatgtgctctatcgcttgcttactctctctctatgtgtctctctctttctcattagctcacacactctctcactctctctctctcctcccctttcttttttatctccctctctctctcatggcttgctcatactgatgaaggaagttatcatggcagaaatctcacatggcaaacaattgaggatgacctttagtcgacagccataaaggaacagaggactttagtctaacaagttaatgataaaatgaatcctgccaatgaccatgagactgagtttgaggagtggattcttccccagaaaagccttgagatgtctaaagcccaggaggcactttgattgcagcctgtgagaaaccaccaagaagacacagctaaaccttacctaaaagattcttgtgaactttagaaaatatgagacaatcagtgctgtttcaagtcactactttgggagcatatttcttatgcaatagcagatactaacacagaaatgttacctgacttggaacatcacagattgttattgtctgctttttgtctttatataaactgaaatatatacc

SEQ ID NO: 240326 - DNA, 362 bp, Homo sapiens
ttttcatttcctggataaggaaatgagtgcctgcttataagtcccattagagattttccttcgaagaacccttcacagaatccaacaggcccaatacgtttttgctttttaatgtattggtcctagaataactggtacagagaatagaacacttcctgatcctgatagaaatgatcatctcaaaataaaacagcccaggagttacagtccaacagtgctgaatggctgtgacacactcacgttttgaccaggcccttggtcactgctaaatgtgactaaggtctttttagacaaaaatcctgacaattatcagggttactggaacatgttcctttatgccaaactttggctacccagtctct

SEQ ID NO: 240327 - DNA, 377 bp, Homo sapiens
ctgactccccagccctgaaccctcaggcctgagactcgctgtccagtgctgaaaacgtctgtctccctaacactgacaatcgagctcttttcatgtgttgcccggggaaatctcaggcaatgaatcttattcttaatttcacacttgcttttctttatggcatctagctaaaagcaaggttcctcttgattgaggtataatgctgaagtattaaaaagaagcgacaggatcatttataaaggcacctaccagaagctgcagagaggcacagagcagtttcttccctggtgtcttcccagggagcgtggtactgccagcacctggatttcaaacttttgatctccatagctataagacaataaactcctgctgtctta

SEQ ID NO: 240328 - DNA, 454 bp, Homo sapiens
ccactgtgcccatcctcttataattattattagtaatagaactttcagaaacattcaaaatattatcaccaattattctcttcaaatccgaccagaatggattcattttgcattttaaaatgtcttaattgacacttaaaaactgtgaatttcagctagtcaggaggctgaggtgggaggatcccttaagcctagagtttgaggctgtagtataccatgattacatctgtaaatagctactgcattgcagcctgggcaacatagtgagactacatatctaaaaaaaagaaaaagaaaaaaactgtgatatagaatgaagaataaagattgtagactttggaattggacaaaagttggaagcattccccttgaaatctggcacaagacaaggatgctatctctcaccactcctattcaacatagtattggaagttctggccaggacaatcaagca

SEQ ID NO: 240329 - DNA, 257 bp, Homo sapiens
ccactgtgcccatcctcttataattattattagtaatagaactttcagaaacattcaaaatattatcaccaattattctcttcaaatccgaccagaatggattcattttgcattttaaaatgtcttaattgacacttaaaaactgtgaatttcagcctcccgagtagcagggattacaggtgcatgccaccatgcctggctactttttgtattttaagtagagatggggtttcaccatgttggccaggctagtcctg

SEQ ID NO: 240330 - DNA, 1714 bp, Homo sapiens
acagcggggcgtcacctcggacatacgaacagcgggcggtgttcccggctccgtggggccgtcttcccggcgagtccgcgacggtcgccgcccacggcgagatgaaatctcgctctgtcgcccaggctggaatgcagtggcgtgatctcggatcactgcagcctctgcctcccgggttcgggcgattctcctgcctcggcctcctgagtagctgggattacaggtgcgtgccaccacgcacggctaatttttgtatttttagttgagacggggtttcaccatgttggtcaggctgttcttgaactcctgacctcgtgatccgcccgcctcggcctcccagagtgctgggatttacaggcatgagccaccgcgcccggcctgttttttttttgttggtttgtttttgagacggagtctcgctctgtcgcccagcctggagtgcagtggcgccatctccgctcactgcaagctccgcctcccgggttcacgccattttcctgccgcagcctcccgtgtggctgggactacaggcgcccgccgccacgcccgtcaaatttttttttttttttttgtattttttggtagtgacgggtttcaccatgttggccaggatggtctcgatctcctgacctcgtgatccgcccgcctctgtctcccaaagagctgggattacaggcgtgagacaccgcgccctgtccggcctgttattatacatatgattgatatctcgtgactccctaaaatgaatacaaccaagctgtgccccgaccaccttggacccacgtcgtcaggatctccggaggctgtgtcatgggcgtccttaactttgggaaataagcctcctgaaatgattaagacttgtcatttttctcgattgacattgataagcactgagagatcctcagtgaaggtaacccggcctgcagcagttcgcctattgatcctcggtattggcttggcaccttattgcccaaactggtaggatgattgctgaaatctgggaccttgttcctccagggatccctgatcttccaacgtttttcggtggggggtctgaggtttatttgctgttaaaaaactccttttttgggagttcccactcgcttcatcaaggaaggcaagcctgcctgcttctgcatcgacagatagccgtcttcagcttgagccccatcactagatgtgtcttgtataactatcccacagctactaagcagctggctgggactcaggatcaacgttggcctgactctgaagcccatgcacctccatagaccacactactcagccaggtttcctggaccttcaaggggctggagtgacacttctgaaataggagcaagatttttttgagaatgtcatcccatccatccattactcttcaccattggaaataattcactccagggaatggttctgaagtctcttgggaaaagcgaaacaatttgagaaaattgctgagcattgggtttaggaaattaatgtccaacattacatttttaatttatcataggagaaatttgaaaacacctataatgcactgatcatatctgcaaactctttgtattttttgtatttgttgactatttatgatttttaatatagacaaagtcaaattactgttcctgaatcaacttttgctctgtagacaaatgacatagcaatagggctgctgcttttttttcccagtgcaatttagccgaccagcagagtatgc

SEQ ID NO: 240331 - DNA, 1247 bp, Homo sapiens
acagcggggcgtcacctcggacatacgaacagcgggcggtgttcccggctccgtggggccgtcttcccggcgagtccgcgacggtcgccgcccacggcgagatgaaatctcgctctgtcgcccaggctggaatgcagtggcgtgatctcggatcactgcagcctctgcctcccgggttcgggcgattctcctgcctcggcctcctgagtagctgggattacaggtgcgtgccaccacgcacggctaatttttgtatttttagttgagacggggtttcaccatgttggtcaggctgttcttgaactcctgacctcgtgatccgcccgcctcggcctcccagagtgctgggatttacaggcatgagccaccgcgcccggcctgttttttttttgttggtttgtttttgagacggagtctcgctctgtcgcccagcctggagtgcagtggcgccatctccgctcactgcaagctccgcctcccgggttcacgccattttcctgccgcagcctcccgtgtggctgggactacaggcgcccgccgccacgcccgtcaaatttttttttttttttttgtattttttggtagtgacgggtttcaccatgttggccaggatggtctcgatctcctgacctcgtgatccgcccgcctctgtctcccaaagagctgggattacaggcgtgagacaccgcgccctgtccggcctgttattatacatatgattgatatctcgtgactccctaaaatgaatacaaccaagctgtgccccgaccaccttggacccacgtcgtcaggatctccggaggctgtgtcatgggcgtccttaactttgggaaataagcctcctgaaatgattaagacttgtcatttttctcgattgacattgataagcactgagagatcctcagtgaaggtaacccggcctgcagcagttcgcctattgatcctcggtattggcttggcaccttattgcccaaactggtaggatgattgctgaaatctgggaccttgttcctccagggatccctgatcttccaacgtttttcggtggggggtctgaggtttatttgctgttaaaaaactccttttttgggagttcccactcgcttcatcaaggaaggcaagcctgcctgcttctgcatcgacagatagccgtcttcagcttgagccccatcactaggtaagaaaattgatttggaattttgtcttgcaaattctttttaaatgactaaagataacattaacaacca

SEQ ID NO: 240332 - DNA, 243 bp, Homo sapiens
gaagcaaaggttctctattcgtaacagttgtacagtctgcctaaggctgtaattaggtattaccagggtgtggccacaattttcaaattacttacaagtaattttctctcaaatctttttttaaatggacagccagccttggcaaaggtagggatggaagtgttttacattgggggagaatataaatatcaaagaaatgtttttaattttgtagccaagacttgcaataggagaaactttatc

SEQ ID NO: 240333 - DNA, 521 bp, Homo sapiens
ctctcattacatataatgctgtgacacactggcagaatatctgatgaactatcattcatgacagaatgacttcaattacattgataacaagatgacatgttcatgtcgttggtatcctactcagtcttgccatctgttctcacagtaacattgacttaagggccatgttcctagttatttggttagaatttatttccttctgtattcagagccaaagcaaatattcataagaattgtttccggcagggcacagtggctcacgcctgtaatcctagcactttgggaggctgaggtaggtggatcacgaggttaggagttcgagactatcctgaccatcatggtgaaaccctgcctctactaaaaatacaaaaattagcctggcatggtggcgtgcacctgtaatccctgctactcaggaggctgaggcaggagaatcgcttgaacccgggaggtggaggttgcagtgagccaagatcatgccactgcactccagcctgggtgacagagcgagactccatctc

SEQ ID NO: 240334 - DNA, 403 bp, Homo sapiens
taaaaaggcaaaacaaacacttctgaagttcacagttagctctgagccaaacagattaaggaaaaagggatatgcctcctaaaatgacagcaagaagaagctctctatgggtcaaaagcaatattctgtgaatagccctttgctagagaaataaaagttattttcacatggttcagattagacagtaattacagtaatgataacgtatcctcagattcatggtaggatactggtgagtttgcactatcagaatcacataagttgtggagtttattcttgagaataataaccagcagttttcccaccgaaatttaaattacctttcaaatagaggaaatctttaagaggcagtcgagtataataattgagagcatgggcttcggacataggttatagagccagc

SEQ ID NO: 240335 - DNA, 778 bp, Homo sapiens
tatttttaaattttttgtagagatggggtctcactctgttgtccaggctgttctcaaactcctggcctcaagtgattctcccacctctgcctctcaaagggctgggattacaggtgtggtgagctactgctttgggccatgcctttcatttaaaaaaaaacccatttgagtgtcacaatttgttaggaaggaaacattgttgtcattttccagatgagggaattgagcccaaggaggatcgagaaacttgctcaaggcaacacagctaggaaatggtggcgagggcaagagagaatttaggtcttctccagcccaaaactccaccattgctctggtggtcataaaaactgaccttgcagatcttcaactaatgggagcacattttttcaaggggctgctgctgacctctgaacttcattacacttttacacagaggtcacacctcccacagtggctctcagccaatgactgggcctggcctgtagctgggagatctgagacttggctcaaggactccctgacggcctttttcagcctcccctagactgtagggtgttccaggatgctcctacccattttatctctttcttttctttactggtttcagacttaacttgcaatctgagggctctcccaatcttttccagccacctcctagtttctttcacaggtgtttcccctaataaaactcatacacctttatccatcttggtgtctgcctcttggaggaccctgactaacacaattgccaaaagcccccaccagattaccccacaat

SEQ ID NO: 240336 - DNA, 332 bp, Homo sapiens
cagaattctaccagacatccaaagaagcattggtaccaatccttttgacactattccacaagatagagaaataaggaaccctccctaattcattctatgaagccagcatcaccctaataaaaccaggaaagaacataacgaaaagacaaaactacagaccgatatccttgatgaacatagatgctaaaatccttaacaaaatactagctaaccgaatccaacaacatatcaaaaagataatccaccacgatcaagtggtttccataccagggatgcaggaatggtttaacatatgcgagtcaatgaatgtgacacaccacataaacagaatt

SEQ ID NO: 240337 - DNA, 497 bp, Homo sapiens
gtaggaccagctgccacctcctctgggaagctttccctgcccgtccacagggtatgcctccttgttcctctcctgccatcggtttacgtgcctgtctccatcaacagaccaggagctcctgaggacagggactgagtctgcctgattcatctctgcattcctagcacttaccttggtgcttagtgaaagctcgaacctgcctgggttcccaccttgtctctgctacccccagctctgtgaactcagagccaactactaagcctgtagcagcctcccaaactgcccagtcttgttcagatgcacctccagaaacacaggggtccaaaatgccccttcccagacaccctgaggagtagaacagtgccagcaggctccagggatgagggactagctaccacattccctttcccaagcctcagtttccccacctgtaagatgagggatatgggctctgactttctgagtttggaaaataaagtgctccccaaactggaaag

SEQ ID NO: 240338 - DNA, 691 bp, Homo sapiens
gtaggaccagctgccacctcctctgggaagctttccctgcccgtccacagggtatgcctccttgttcctctcctgccatcggtttacgtgcctgtctccatcaacagaccaggagctcctgaggacagggactgagtctgcctgattcatctctgcattcctagcacttaccttggtgcttagtgaaagctcgaacctgcctgggttcccaccttgtctctgctacccccagctctgtgaactcagagtcatttttctctccccgagtggcaccgggctcagcagacactctggccatgaaggcatcttctgactcaagcaggctggagtgcaatggcgtgatctcggctcactgcaacctctgcctcccaggttcaagcaattctcctgcctcagcctcccgagtagctgggattataggcatgcaccaccacgcccagagccaactactaagcctgtagcagcctcccaaactgcccagtcttgttcagatgcacctccagaaacacaggggtccaaaatgccccttcccagacaccctgaggagtagaacagtgccagcaggctccagggatgagggactagctaccacattccctttcccaagcctcagtttccccacctgtaagatgagggatatgggctctgactttctgagtttggaaaataaagtgctccccaaactggaaag

SEQ ID NO: 240339 - DNA, 553 bp, Homo sapiens
tgtgttgattgcactttttggctactatcaataatgctataatgaagatttgtgtacagctttttctgtggacatatggagtggaatggctgcatcttaatggcaaccctctgataaactttttgaggaactgccagttttctaaagcaggcgcccgcaccatttgacattcccatcagctgtgtgagggttccagtgttcccacatccagtacttactattttctgtctttttgattataggtatctttgtgggtgtgaaatgatatctcattgtaattttgatttgtttctaatgactagtttcattgagcatcttttcatatacttaactggccatgtgccccaattgctaaaacttagcactctgttttgtgataatttcctagtttgcctcctttgctaactagaatttctgggagcagaacttatgcttttttttttttaatcttcatgaccctgacagcaggacagcacttggtactaatgtgctctaaaataattcaattggaaaaggaagtagtatccttttctaggtagtacatgactatatt

SEQ ID NO: 240340 - DNA, 276 bp, Homo sapiens
ccaagaaaaatgatccagtcaataatggaattccaaataagatttcctttttatttggctattaatcagaacctgggataacatccattttctgggccctgattttactatggaatatttccataaaacatgcatgtgattactgtaaatgtcctgtaaacactcctgcttgggaggctgaggtaggagaatggcgtgaacccgggaggtggagcttgtagtgagccgagatcctgggctcactccagcctgggtgacagagtgagactccgtctc

SEQ ID NO: 240341 - DNA, 504 bp, Homo sapiens
aagttgcagtgagccaagatcgcaccactgcattccagcctgggcagcagagtgagacttcatctcagaaaaaaaaaaaaaagtgagacgacattacaaactggggagaacatatttccaacaaatataaccagcaggcgatttagtatcaagaatatctaaagaacactaatgtgaaaaggacaaatagccctatggaaagctggatgagagacatgaaagggacatttcatagaagtggaaaaacaaagatacgaagataccttaacataaaggtccataaacattcaaagagatgttccacctgataagtgattagggaaatgcaaattaggaccacagtgagatgccattttacgtctattgtagtggcataaatgaagaaatctgatcattttggagaggatgtggatctacgtggtctcttatatattgctgttgggaatatcaattcaccattgtcatgtgaaatcaaacatttagaaatcattgcccagcaacctc

SEQ ID NO: 240342 - DNA, 1340 bp, Homo sapiens
  misc_feature (59)..(59): n is a, c, g, or t
  misc_feature (112)..(112): n is a, c, g, or t
  misc_feature (404)..(404): n is a, c, g, or t
  misc_feature (609)..(609): n is a, c, g, or t
agacatgaaaaccttatgtctatgtacaaaccaaagaaatgacaatgtggcaaacccantcaacgtggtccctgcagcccagctgctgggtcttagccatagtgcagcagcngagctggctgcttaactcaaatactctgagcactttggccaagacattggccaagctagttaggctgcttatacgtgtatggttttacatagcctaaaagagactgtaaaacctccctgctgaattttggttccccacttatgacttaggctctttaattatattttgtactagataatgttacttttctacatataatctttccttatattaagggtacacatacactgcaaagttctaataaggaagaaaaagtctattgtgaaactgcaaagagcaaaaaatatcagangctatcattactattggtttttctataattttgtttaaatttcactctattaaaaaattacgtatcacaggaatttaccaaaaattcttttggggaactaaacattcattaaaaattttaggctgggcacggtggctcatgcctgtaatcccagcacttttagaggccgaggcgggcagatcacttgaggccgggagttcgagancagctatgcagcatggtgaagccttgtctctactaaaaatataaaaattagttgggcgtggtggcacacaactgtagtctcagctacttgggaagctgaggcacaagaatagcttgaacccgggaggtggaggttgcagtgagcaaagattgcaccactgtactccagcctgggcaacaaagtgagaccctgtctcaaaaaaaaattttttttaaggttcacgtttctttatttaccttaaaagaaggcttaatgaatgttctcatctaaattaatatcaaagtagaaaaaaattaattctaagagacattggaacaaggtaatatgcccttaaccattcatttttagaataattctgaagcactattcagctcaacaaatgagttattgaatgtctgatatctgcatggcactgtaatggatttagcttgcaacttgataaataaaggtacttgaggctgggtgtggtggctgacgtctgtaatcccggcactttgggagaccaaggcaggcagatcacttgagtgcaggagttcaaggctagcctgggcaagataacaaaaccccatctctacaaaaaattatccaggtgtggtagcacgcacctgtagtcccagctactcagaaggctgatatatgagaatagcttaaacccaggaggtggagattgcaatgagctgagatcgcaccactgcactcccagcctggacaacagagccagaccgtatctc

SEQ ID NO: 240343 - DNA, 221 bp, Homo sapiens
ttatgaaatactatgcaatagttaaaaagatttaatatacacaaatgtctatttatgtagatgttaaccaaaacaaggaagttgcagagaaatgtgtacgtgaactcctattcacatgaaggaaaaacactccacaaactgtgtgtgtacacatgcatgcacaggtgtatttgtccattttgcattgcctgaggctgggtaatttataaagaagtttattt

SEQ ID NO: 240344 - DNA, 468 bp, Homo sapiens
tttagatttttgctgtagtgaacttgaaaaaaatactgcagtgagtattcttcaacatgtgtctttatgtacacatatgtgtatttgtaagataaattcctaaaataaatattttactcaaaaaatatctaaaaataccctggaaagcctctatatacaatcaggctttaaagaaactgaagggattattataatcatcactgtgtgtttgattttaagtgattgcccatttaaaacgcttgaagaattaaatagagccacgtttaaatcagtcaccattcatagactgttctctgtgcacatgactttttccataggggttggtaattaaccattggttcaatattcattagtgaatagttttagattagtttctgtcagttacaagtcttgctaggactatataatggatgataccaatgtttattttggcaaaatattaaagtataagacaaacataataaatat

SEQ ID NO: 240345 - DNA, 289 bp, Homo sapiens
ttaagtggaggaaacaatctcccagagggaagtaacttgcccgcgggcccacagctgtcaaggggagggctgcactcctgaccccaactctgcctgcctctggaatgagttaccctttgctggagccggaccgtgtgtacagcacttctgggtgctccacgaactttcccagcacagcgcttggcacatacaaggggctcaaaattatgcgtaacggagagaatttcacaacgtccctatgtggaagaaatgatcacctccgtttcagaaataaagaaatgacaccaag

SEQ ID NO: 240346 - DNA, 94 bp, Homo sapiens
atgaagctttcttcttggtggagaaatggggtatatagaaaggagagaaattattccaatttcacaacttggtgtctggaatttataggctgag

SEQ ID NO: 240347 - DNA, 626 bp, Homo sapiens
gtctgatattttcttcttcattttttgataggactttttttttcctgctcaaaagtgactatctggtagtacattcccagaggatcctggccaggtaacagagaagtctgaaaggctaccttgagataaggtactaacagcctgtggtagctttaatagaatattctggtttaaataacaaccttgaacatccaacttattcagattcaacaaacatctatcgagtatttaccctctgcagataagacaaggccatgtattagatgtttcctcatgtgttatatcatttagtgattacaacaaacatcaaaggtagcatccctactttacaaagtaaaacacagatactcagaaagggtaatttattcactgaaagtcaaagtgagatgaattcaaacataggtcctctaacacccagggcacagactgatgatgttcatgaccagctgagtttatgaaatctcttacgctgtctgtccctaatctgcctatacattagcaaggtgtagagaagcaccatgcttctgtccaacataacagggttagaaggtcacttttctgcatgtttctacattattttcaaaactgccattcatctgcgttttcaaataaatatcaacaaaatt

SEQ ID NO: 240348 - DNA, 6303 bp, Homo sapiens
tagtaagacaggtgccttcagttcactctcagtaaggggctggttgcctgcatgagtgtgtgctctgtgtcactgtggattggagttgaaaaagcttgactggcgtcattcaggagctggatggcgtgggacatgtgcaaccaggactctgagtctgtatggagtgacatcgagtgtgctgctctggttggtgaagaccagcctctttgcccagatcttcctgaacttgatctttctgaactagatgtgaacgacttggatacagacagctttctgggtggactcaagtggtgcagtgaccaatcagaaataatatccaatcagtacaacaatgagccttcaaacatatttgagaagatagatgaagagaatgaggcaaacttgctagcagtcctcacagagacactagacagtctccctgtggatgaagacggattgccctcatttgatgcgctgacagatggagacgtgaccactgacaatgaggctagtccttcctccatgcctgacggcacccctccaccccaggaggcagaagagccgtctctacttaagaagctcttactggcaccagccaacactcagctaagttataatgaatgcagtggtctcagtacccagaaccatgcaaatcacaatcacaggatcagaacaaaccctgcaattgttaagactgagaattcatggagcaataaagcgaagagtatttgtcaacagcaaaagccacaaagacgtccctgctcggagcttctcaaatatctgaccacaaacgatgaccctcctcacaccaaacccacagagaacagaaacagcagcagagacaaatgcacctccaaaaagaagtcccacacacagtcgcagtcacaacacttacaagccaaaccaacaactttatctcttcctctgaccccagagtcaccaaatgaccccaagggttccccatttgagaacaagactattgaacgcaccttaagtgtggaactctctggaactgcaggcctaactccacccaccactcctcctcataaagccaaccaagataacccttttagggcttctccaaagctgaagtcctcttgcaagactgtggtgccaccaccatcaaagaagcccaggtacagtgagtcttctggtacacaaggcaataactccaccaagaaagggccggagcaatccgagttgtatgcacaactcagcaagtcctcagtcctcactggtggacacgaggaaaggaagaccaagcggcccagtctgcggctgtttggtgaccatgactattgccagtcaattaattccaaaacggaaatactcattaatatatcacaggagctccaagactctagacaactagaaaataaagatgtctcctctgattggcaggggcagatttgttcttccacagattcagaccagtgctacctgagagagactttggaggcaagcaagcaggtctctccttgcagcacaagaaaacagctccaagaccaggaaatccgagccgagctgaacaagcacttcggtcatcccagtcaagctgtttttgacgacgaagcagacaagaccggtgaactgagggacagtgatttcagtaatgaacaattctccaaactacctatgtttataaattcaggactagccatggatggcctgtttgatgacagcgaagatgaaagtgataaactgagctacccttgggatggcacacaatcctattcattgttcaatgtgtctccttcttgttcttcttttaactctccatgtagagattctgtgtcaccacccaaatccttattttctcaaagaccccaaaggatgcgctctcgttcaaggtccttttctcgacacaggtcgtgttcccgatcaccatattccaggtcaagatcaaggtctccaggcagtagatcctcttcaagatcctgctattactatgagtcaagccactacagacaccgcacgcaccgaaattctcccttgtatgtgagatcacgttcaagatcgccctacagccgtcggcccaggtatgacagctacgaggaatatcagcacgagaggctgaagagggaagaatatcgcagagagtatgagaagcgagagtctgagagggccaagcaaagggagaggcagaggcagaaggcaattgaagagcgccgtgtgatttatgtcggtaaaatcagacctgacacaacacggacagaactgagggaccgttttgaagtttttggtgaaattgaggagtgcacagtaaatctgcgggatgatggagacagctatggtttcattacctaccgttatacctgtgatgcttttgctgctcttgaaaatggatacactttgcgcaggtcaaacgaaactgactttgagctgtacttttgtggacgcaagcaatttttcaagtctaactatgcagacctagattcaaactcagatgactttgaccctgcttccaccaagagcaagtatgactctctggattttgatagtttactgaaagaagctcagagaagcttgcgcaggtaacatgttccctagctgaggatgacagagggatggcgaatacctcatgggacagcgcgtccttccctaaagactattgcaagtcatacttaggaatttctcctactttacactctctgtacaaaaacaaaacaaaacaacaacaatacaacaagaacaacaacaacaataacaacaatggtttacatgaacacagctgctgaagaggcaagagacagaatgatatccagtaagcacatgtttattcatgggtgtcagctttgcttttcctggagtctcttggtgatggagtgtgcgtgtgtgcatgtatgtgtgtgtgtatgtatgtgtgtggtgtgtgtgcttggtttaggggaagtatgtgtgggtacatgtgaggactgggggcacctgaccagaatgcgcaagggcaaaccatttcaaatggcagcagttccatgaagacacacttaaaacctagaacttcaaaatgttcgtattctattcaaaaggaaaaatatatatatatatatatatatataaattaaaaaggaaagaaaactaacaaccaaccaaccaaccaaccaaccacaaaccaccctaaaatgacagccgctgatgtctgggcatcagcctttgtactctgtttttttaagaaagtgcagaatcaacttgaagcaagctttctctcataacgtaatgattatatgacaatcctgaagaaaccacaggttccatagaactaatatcctgtctctctctctctctctctctctctcttttttttttctttttccttttgccatggaatctgggtgggagaggatactgcgggcaccagaatgctaaagtttcctaacattttgaagtttctgtagttcatccttaatcctgacacccatgtaaatgtccaaaatgttgatcttccactgcaaatttcaaaagccttgtcaatggtcaagcgtgcagcttgttcagcggttctttctgaggagcggacaccgggttacattactaatgagagttgggtagaactctctgagatgtgttcagatagtgtaattgctacattctctgatgtagttaagtatttacagatgttaaatggagtatttttattttatgtatatactatacaacaatgttcttttttgttacagctatgcactgtaaatgcagccttcttttcaaaactgctaaatttttcttaatcaagaatattcaaatgtaattatgaggtgaaacaattattgtacactaacatatttagaagctgaacttactgcttatatatatttgattgtaaaaacaaaaagacagtgtgtgtgtctgttgagtgcaacaagagcaaaatgatgctttccgcacatccatcccttaggtgagcttcaatctaagcatcttgtcaagaaatatcctagtcccctaaaggtattaaccacttctgcgatatttttccacattttcttgtcgcttgtttttctttgaagttttatacactggatttgttaggggaatgaaattttctcatctaaaatttttctagaagatatcatgattttatgtaaagtctctcaatgggtaaccattaagaaatgtttttattttctctatcaacagtagttttgaaactagaagtcaaaaatctttttaaaatgctgttttgttttaatttttgtgattttaatttgatacaaaatgctgaggtaataattatagtatgatttttacaataattaatgtgtgtctgaagactatctttgaagccagtatttctttcccttggcagagtatgacgatggtatttatctgtattttttacagttatgcatcctgtataaatactgatatttcattcctttgtttactaaagagacatatttatcagttgcagatagcctatttattataaattatgagatgatgaaaataataaagccagtggaaattttctacctaggatgcatgacaattgtcaggttggagtgtaagtgcttcatttgggaaattcagcttttgcagaagcagtgtttctacttgcactagcatggcctctgacgtgaccatggtgttgttcttgatgacattgcttctgctaaatttaataaaaacttcagaaaaacctccattttgatcatcaggatttcatctgagtgtggagtccctggaatggaattcagtaacatttggagtgtgtattcaagtttctaaattgagattcgattactgtttggctgacatgacttttctggaagacatgatacacctactactcaattgttcttttcctttctctcgcccaacacgatcttgtaagatggatttcacccccaggccaatgcagctaattttgatagctgcattcatttatcaccagcatattgtgttctgagtgaatccactgtttgtcctgtcggatgcttgcttgattttttggcttcttatttctaagtagatagaaagcaataaaaatactatgaaatgaaagaacttgttcacaggttctgcgttacaacagtaacacatctttaatccgcctaattcttgttgttctgtaggttaaatgcaggtattttaactgtgtgaacgccaaactaaagtttacagtctttctttctgaattttgagtatcttctgttgtagaataataataaaaagactattaagagcaataaattatttttaagaaatcgagatttagtaaatcctattatgtgttcaaggaccacatgtgttctctattttgcctttaaatttttgtgaaccaattttaaatacattctcctttttgccctggattgttgacatgagtggaatacttggtttcttttcttacttatcaaaagacagcactacagatatcatattgaggattaatttatcccccctacccccagcctgacaaatattgttaccatgaagatagttttcctcaatggacttcaaattgcatctagaattagtggagcttttgtatcttctgcagacactgtgggtagcccatcaaaatgtaagctgtgctcctctcatttttatttttatttttttgggagagaatatttcaaatgaacacgtgcaccccatcatcactggaggcaaatttcagcatagatctgtaggatttttagaagaccgtgggccattgccttcatgccgtggtaagtaccacatctacaattttggtaaccgaactggtgctttagtaatgtggatttttttcttttttaaaagagatgtagcagaataattcttccagtgcaacaaaatcaattttttgctaaacgactccgagaacaacagttgggctgtcaacattcaaagcagcagagagggaactttgcactattggggtatgatgtttgggtcagttgataaaaggaaaccttttcatgcctttagatgtgagcttccagtaggtaatgattatgtgtcctttcttgatggctgtaatgagaacttcaatcactgtagtctaagacctgatctatagatgacctagaatagccatgtactataatgtgatgattctaaatttgtacctatgtgacagacattttcaataatgtgaactgctgatttgatggagctactttaagatttgtaggtgaaagtgtaatactgttggttgaactatgctgaagagggaaagtgagcgattagttgagcccttgccgggccttttttccacctgccaattctacatgtattgttgtggttttattcattgtatgaaaattcctgtgattttttttaaatgtgcagtacacatcagcctcactgagctaataaagggaaacgaatgtttcaaat

SEQ ID NO: 240349 - DNA, 706 bp, Homo sapiens
tagtaagacaggtgccttcagttcactctcagtaaggggctggttgcctgcatgagtgtgtgctctgtgtcactgtggattggagttgcaggactctgagtctgtatggagtgacatcgagtgtgctgctctggttggtgaagaccagcctctttgcccagatcttcctgaacttgatctttctgaactagatgtgaacgacttggatacagacagctttctgggtggactcaagtggtgcagtgaccaatcagaaataatatccaatcagtacaacaatgagccttcaaacatatttgaggtaaggacatcctttggaaacattaatttttcattgagtttggcttgggccagactaacatggtaatagacctgaatgcataatgagttcttactttgctatcatcaaaagacttttcatcacagttacatactttctaatttatggaaaaacagcatttggaaaacaaatgttttgtttttatttttttaaagatttaaaaaataaatcaactagggactaggaatcaacaactgtgagtgagttaaactgtgttgaaatactaaagggttgtgaaagattagtgacaaagaagaacaaaagtctaaacctgtttattcctgtctatttcccacagaaagaatgagcaataaatggtacctcatataaattaataaataagaaggcctttctttttaaccaagg

SEQ ID NO: 240350 - DNA, 759 bp, Homo sapiens
tagtaagacaggtgccttcagttcactctcagtaaggggctggttgcctgcatgagtgtgtgctctgtgtcactgtggattggagttgaaaaagcttgactggcgtcattcaggagctggatggcgtgggacatgtgcaaccaggactctgagtctgtatggagtgacatcgagtgtgctgctctggttggtgaagaccagcctctttgcccagatcttcctgaacttgatctttctgaactagatgtgaacgacttggatacagacagctttctgggtggactcaagtggtgcagtgaccaatcagaaataatatccaatcagtacaacaatgagccttcaaacatatttgaggtaaggacatcctttggaaacattaatttttcattgagtttggcttgggccagactaacatggtaatagacctgaatgcataatgagttcttactttgctatcatcaaaagacttttcatcacagttacatactttctaatttatggaaaaacagcatttggaaaacaaatgttttgtttttatttttttaaagatttaaaaaataaatcaactagggactaggaatcaacaactgtgagtgagttaaactgtgttgaaatactaaagggttgtgaaagattagtgacaaagaagaacaaaagtctaaacctgtttattcctgtctatttcccacagaaagaatgagcaataaatggtacctcatataaattaataaataagaaggcctttctttttaaccaagg

SEQ ID NO: 240351 - DNA, 5648 bp, Homo sapiens
tagtaagacaggtgccttcagttcactctcagtaaggggctggttgcctgcatgagtgtgtgctctgtgtcactgtggattggagttgaaaaagcttgactggcgtcattcaggagctggatggcgtgggacatgtgcaaccaggactctgagtctgtatggagtgacatcgagtgtgctgctctggttggtgaagaccagcctctttgcccagatcttcctgaacttgatctttctgaactagatgtgaacgacttggatacagacagctttctgggtggactcaagtggtgcagtgaccaatcagaaataatatccaatcagtacaacaatgagccttcaaacatatttgagaagatagatgaagagaatgaggcaaacttgctagcagtcctcacagagacactagacagtctccctgtggatgaagacggattgccctcatttgatgcgctgacagatggagacgtgaccactgacaatgaggctagtccttcctccatgcctgacggcacccctccaccccaggaggcagaagagccgtctctacttaagaagctcttactggcaccagccaacactcagctaagttataatgaatgcagtggtctcagtacccagaaccatgcaaatcacaatcacaggatcagaacaaaccctgcaattgttaagactgagaattcatggagcaataaagcgaagagtatttgtcaacagcaaaagccacaaagacgtccctgctcggagcttctcaaatatctgaccacaaacgatgaccctcctcacaccaaacccacagagaacagaaacagcagcagagacaaatgcacctccaaaaagaagtcccacacacagtcgcagtcacaacacttacaagccaaaccaacaactttatctcttcctctgaccccagagtcaccaaatgaccccaagggttccccatttgagaacaagactattgaacgcaccttaagtgtggaactctctggaactgcaggcctaactccacccaccactcctcctcataaagccaaccaagataacccttttagggcttctccaaagctgaagtcctcttgcaagactgtggtgccaccaccatcaaagaagcccaggtacagtgagtcttctggtacacaaggcaataactccaccaagaaagggccggagcaatccgagttgtatgcacaactcagcaagtcctcagtcctcactggtggacacgaggaaaggaagaccaagcggcccagtctgcggctgtttggtgaccatgactattgccagtcaattaattccaaaacggaaatactcattaatatatcacaggagctccaagactctagacaactagaaaataaagatgtctcctctgattggcaggggcagatttgttcttccacagattcagaccagtgctacctgagagagactttggaggcaagcaagcaggtctctccttgcagcacaagaaaacagctccaagaccaggaaatccgagccgagctgaacaagcacttcggtcatcccagtcaagctgtttttgacgacgaagcagacaagaccggtgaactgagggacagtgatttcagtaatgaacaattctccaaactacctatgtttataaattcaggactagccatggatggcctgtttgatgacagcgaagatgaaagtgataaactgagctacccttgggatggcacacaatcctattcattgttcaatgtgtctccttcttgttcttcttttaactctccatgtagagattctgtgtcaccacccaaatccttattttctcaaagaccccaaaggatgcgctctcgttcaaggtccttttctcgacacaggtcgtgttcccgatcaccatattccaggtcaagatcaaggtctccaggcagtagatcctcttcaagatcctgctattactatgagtcaagccactacagacaccgcacgcaccgaaattctcccttgtatgtgagatcacgttcaagatcgccctacagccgtcggcccaggtatgacagctacgaggaatatcagcacgagaggctgaagagggaagaatatcgcagagagtatgagaagcgagagtctgagagggccaagcaaagggagaggcagaggcagaaggcaattgaagagcgccgtgtgatttatgtcggtaaaatcagacctgacacaacacggacagaactgagggaccgttttgaagtttttggtgaaattgaggagtgcacagtaaatctgcgggatgatggagacagctatggtttcattacctaccgttatacctgtgatgcttttgctgctcttgaaaatggatacactttgcgcaggtcaaacgaaactgactttgagctgtacttttgtggacgcaagcaatttttcaagtctaactatgcagacctagattcaaactcagatgactttgaccctgcttccaccaagagcaagtatgactctctggattttgatagtttactgaaagaagctcagagaagcttgcgcaggtaacatgttccctagctgaggatgacagagggatggcgaatacctcatgggacagcgcgtccttccctaaagactattgcaagtcatacttaggaatttctcctactttacactctctgtacaaaaacaaaacaaaacaacaacaatacaacaagaacaacaacaacaataacaacaatggtttacatgaacacagctgctgaagaggcaagagacagaatgccatgtaaatgtccaaaatgttgatcttccactgcaaatttcaaaagccttgtcaatggtcaagcgtgcagcttgttcagcggttctttctgaggagcggacaccgggttacattactaatgagagttgggtagaactctctgagatgtgttcagatagtgtaattgctacattctctgatgtagttaagtatttacagatgttaaatggagtatttttattttatgtatatactatacaacaatgttcttttttgttacagctatgcactgtaaatgcagccttcttttcaaaactgctaaatttttcttaatcaagaatattcaaatgtaattatgaggtgaaacaattattgtacactaacatatttagaagctgaacttactgcttatatatatttgattgtaaaaacaaaaagacagtgtgtgtgtctgttgagtgcaacaagagcaaaatgatgctttccgcacatccatcccttaggtgagcttcaatctaagcatcttgtcaagaaatatcctagtcccctaaaggtattaaccacttctgcgatatttttccacattttcttgtcgcttgtttttctttgaagttttatacactggatttgttaggggaatgaaattttctcatctaaaatttttctagaagatatcatgattttatgtaaagtctctcaatgggtaaccattaagaaatgtttttattttctctatcaacagtagttttgaaactagaagtcaaaaatctttttaaaatgctgttttgttttaatttttgtgattttaatttgatacaaaatgctgaggtaataattatagtatgatttttacaataattaatgtgtgtctgaagactatctttgaagccagtatttctttcccttggcagagtatgacgatggtatttatctgtattttttacagttatgcatcctgtataaatactgatatttcattcctttgtttactaaagagacatatttatcagttgcagatagcctatttattataaattatgagatgatgaaaataataaagccagtggaaattttctacctaggatgcatgacaattgtcaggttggagtgtaagtgcttcatttgggaaattcagcttttgcagaagcagtgtttctacttgcactagcatggcctctgacgtgaccatggtgttgttcttgatgacattgcttctgctaaatttaataaaaacttcagaaaaacctccattttgatcatcaggatttcatctgagtgtggagtccctggaatggaattcagtaacatttggagtgtgtattcaagtttctaaattgagattcgattactgtttggctgacatgacttttctggaagacatgatacacctactactcaattgttcttttcctttctctcgcccaacacgatcttgtaagatggatttcacccccaggccaatgcagctaattttgatagctgcattcatttatcaccagcatattgtgttctgagtgaatccactgtttgtcctgtcggatgcttgcttgattttttggcttcttatttctaagtagatagaaagcaataaaaatactatgaaatgaaagaacttgttcacaggttctgcgttacaacagtaacacatctttaatccgcctaattcttgttgttctgtaggttaaatgcaggtattttaactgtgtgaacgccaaactaaagtttacagtctttctttctgaattttgagtatcttctgttgtagaataataataaaaagactattaagagcaataaattatttttaagaaatcgagatttagtaaatcctattatgtgttcaaggaccacatgtgttctctattttgcctttaaatttttgtgaaccaattttaaatacattctcctttttgccctggattgttgacatgagtggaatacttggtttcttttcttacttatcaaaagacagcactacagatatcatattgaggattaatttatcccccctacccccagcctgacaaatattgttaccatgaagatagttttcctcaatggacttcaaattgcatctagaattagtggagcttttgtatcttctgcagacactgtgggtagcccatcaaaatgtaagctgtgctcctctcatttttatttttatttttttgggagagaatatttcaaatgaacacgtgcaccccatcatcactggaggcaaatttcagcatagatctgtaggatttttagaagaccgtgggccattgccttcatgccgtggtaagtaccacatctacaattttggtaaccgaactggtgctttagtaatgtggatttttttcttttttaaaagagatgtagcagaataattcttccagtgcaacaaaatcaattttttgctaaacgactccgagaacaacagttgggctgtcaacattcaaagcagcagagagggaactttgcactattggggtatgatgtttgggtcagttgataaaaggaaaccttttcatgcctttagatgtgagcttccagtaggtaatgattatgtgtcctttcttgatggctgtaatgagaacttcaatcactgtagtctaagacctgatctatagatgacctagaatagccatgtactataatgtgatgattctaaatttgtacctatgtgacagacattttcaataatgtgaactgctgatttgatggagctactttaagatttgtaggtgaaagtgtaatactgttggttgaactatgctgaagagggaaagtgagcgattagttgagcccttgccgggccttttttccacctgccaattctacatgtattgttgtggttttattcattgtatgaaaattcctgtgattttttttaaatgtgcagtacacatcagcctcactgagctaataaagggaaacgaatgtttcaaat

SEQ ID NO: 240352 - DNA, 287 bp, Homo sapiens
ccctcgagcctccggaagaaaacacagccctgccaaccttgattttagcccagcaggaccaatgctggacttctaatgtacagaactgtaagataatcagtgtgtattgttgtaagccattaagttcattgcaatttttcaaagcagccatggaaaactaaaacacgagataaaatgttgaatgcttggtgtcatttttcagagaggtgatggccattacttcagagaattttaactgtattattgtgtaatttcgcaacaataaacgaaatatgctaccaacaaat

SEQ ID NO: 240353 - DNA, 429 bp, Homo sapiens
tttttgagataggagttttgctcttgttgcttgggctggagtgcaatggcaacatctcggctcactgcaacctctgcctcctgggttcaagcagttctcctcctcagcctggcattcaaggctctgatctagccccaatccctcccctcaatgcggctaaaactccagctgtaggctggatcattttcccaccttcaaacctttgttcccaccatgtcctgcagaataccctccccactcctgtgtctggcaaaatccttaaagtttcactcaaatgccaccttccccaaaccaataaggcaactctgcttttaaatgctcccactgcatttgcatatgcttccaaggtatcagaactgcatatgcatctgtccattctagaaaagggtaaactccctaaaggcagaagctatgacctacagctcactg

SEQ ID NO: 240354 - DNA, 366 bp, Homo sapiens
aaaatgacttaggtctctcagatgtggtcacctcattcccatttgcctgtgtagccaagagacctgaggccacccatccatgttgttgtacaccatgtttatgttttgttgatttctcccacatgtctgtaattcagcttgcccagcaggctacgtggcatttccctaccttgcatatcttacctcaactctaagcagaagctgcttaacaattttggttaataaaaccatattttcaaagctggatgaggtggtgcatgcctgtaatcctagctactcaggaggctgaagtaggagaatcccttgagcccaggagtttgagaccagcctgggcaacaaagtgagaccccatctctaaaaagaaaa

SEQ ID NO: 240355 - DNA, 299 bp, Homo sapiens
agtaaatctgctttggctatactgagactgtcaacaaagacatctgttagcttagtagctctgtgagctatcagtcaagtgtttattgactgcttctcgggaagatgctcagtggtaaacattctatgaagacaatcacattatataaatgccatcaaacatgttggagagatttccagctaacctcgcctgagtacatctgagcagttcattaacatccggagaaacatccagatctgaaactcgttattttaaatctttccaaagtgagacactcaataaaaagatcccaaaataaa

SEQ ID NO: 240356 - DNA, 494 bp, Homo sapiens
catccaaaggttggtgcattatcagaatgatctgaaggaaaaataaattattcacatcaaggaagcacctgctctctctttcctcctgcatgtcccaactagaaaaagcatctcttgtgccagatggaaagaaaaagaggccagggtgtctgagaaggtccccagcatgcccacctgtacagcagcctgggaagcctcagtatctgacctgccctgggaaatgacttccaaacgccttcagggactaggcacttctcacagcttataggagtgcatgaggacacctcccagcctccagccctggaaaaagcactggacctctccagctacatgccttctttgtccttctcccagtcaaggctccacaggcaaggcctccaccccccatcttccattgtactcctgcgcagaagctgaggatgggaagcttagaataaattatgtgagccctcgccctggcagaagtgacagggtggacaccacacactatccca

SEQ ID NO: 240357 - DNA, 513 bp, Homo sapiens
ctatggaaaaaaagtaaatcttagttccacttttgccagttttgtttctgtattttttaaaaaattacatttctactaggcagaatttagaggtttattatcagtctatgcataactaaagttcaaagcaaattcgattttgcttaaggggaacatccataaagtagcaattcttggtgttacatgcttcacagaatccatttcaaaccacagagaattgcacctttgtgtgtcactgttcccaaaggcaaacaaatttgaaaagttaaaacatatttaaaatgtaccatgcttatgaagtctcaaacaaaacttgagttttctgcacatactctcgtcaaatgaagttatttcctgcatacaacttctcttgcaaactggtcttctatttcctttcattcaacttaaactgactgagacctagagaaggatcgggacggcttgtgatttctctcccaagacagtgatctctgtgttttctcctatctctagaaaagaagatactccccctgt

SEQ ID NO: 240358 - DNA, 407 bp, Homo sapiens
cctcccatcccccagcccctgctctctgggaagtctgctgggtgtgctgggccggctcctggacaagctgaagccgaggactgcagcaactcttcccatcatcaccctggctgctgtggggaagctggcagttttctggaagactgcttgcttggaatgcttagcatcctcccaggcttctgactctccactggggatgcagaaggtctgcattgcagtttaatccactactgagaattcctgtgcttctagaaaccatcctctcacctccgagggactccatcttgtcagctgcccagaggagacaaaacggaacactgccccatggctcagtgctttgcacagttgtcagctccttggctggcaagcatcagattgattaaaaggaggttttctcagacataatc

SEQ ID NO: 240359 - DNA, 270 bp, Homo sapiens
ggtagatttgttttacagtgaaagtaggtgcacacacacacacacaaattgctcatatttgttgtaactcatttttttaacttgtttttggacagtttttcgttatgttacttcatgtttttaagttttgtggtggtgtgtgcctgtagtcccagctactctggaggctgaggcaggagaatcgcttgaacccgggaggcagaagttgcagtgagccgagatcgcgccattgtactccagcctgggcaacaagagcgaaactctgtctca

SEQ ID NO: 240360 - DNA, 487 bp, Homo sapiens
catgcccatcaacttgcccagctccaggggggatgctgtgtgctttgcaatgagtggcaaaacacacagtgtggggacacactggggaccaaagtccacccctgcttgtgggattcagctccttggtgcccactgactcctttaatgccctttctttgtgagaaggaagaacatggctgggaacgtgttagccctcaactaaccagttgagtgttgtgcatatctctttagataactttccttcctaaaatgagcacattatattcctgagatctgaaactttacttttccaagactgtgttcaagtttggcaaaatgagcgctgagtccaaaaattaaagcaatttaaaagacccactatttcccgtatcataatttaggctacatatttttagtatggtttcctactcctgtgttttattttacaatataaagaaaaatacctgctgtaaaggaagtaaaattctataaattataaaaatgtttt

SEQ ID NO: 240361 - DNA, 381 bp, Homo sapiens
ctgagggtgctacctggtattgagtgctgaggcttaacatttttccaagagaggagaaaagagttaacagcatgaaagctcatctaattcatccctctcccatttcaagaagagctcctataaattgtcctgcacagataaaaccgatagtttttaagaccaccaaaaagggagatgtgaatacctcttattccaacttttgttggaaggaaaaacttgtgtctaaaccaaccctgcagataactcagcctaaaccaaccccgttaggctgtatttataatctatgtcttctagttttctcctcagctagtcattaccttttttgattaaaaaaagcacacttctttaacctattaattataagattttctttttctttca

SEQ ID NO: 240362 - DNA, 454 bp, Homo sapiens
ctttatcaggtttgttatggtggaacaggaaagagagtttgtttttttttttgggaaggatactaactaaatgtaatttaccagaaggatgctaaatgtaattttctggcctagcagcacttagccattcagggaagattatacgatttcagtaacataaatggcattttaattgggcaagtataaaatatttattttaattgaaattgcttttgttgtatcctcagccctttttgttaagatctaagagttaagacttttgtctaattcattctggtgttgcatttaatgtggttaatttgctaacctgttagataacaggctacattttacagtccttttttgacttgaaatgtgaacaaaatgagtgaaaagctgtagcgtattggctgagagaacaagctttggaatgagcctgtctgatttcacattctttactcttaccggctctgtg

SEQ ID NO: 240363 - DNA, 287 bp, Homo sapiens
ctgctacaggtcttacagggagggtgagctcttggagttggatcagaaggagaggggctggggaaagatcgtcttcaaattgtttctttggcggtagtatatataaacatatttaggcagggcatagtggcacatgtctgtaaccccagcactttgggaggccgaagcgtgaggatcgcttaaagacaggagttgaaaatcatactggtcaatatagtgagattgcagtgagccattatcgcgccactgcattcctgcctgggtgacagtgcgagaccccttctcaa

SEQ ID NO: 240364 - DNA, 477 bp, Homo sapiens
aaaattcagttattaaacatattttatgattaaaaagaagactgccaaaatcgtgaagcagttggaaaataaaaacattacacttgaaatttcaataacagtaagtttgagctagttgtatgtttgttttagaattttttggttatcatgagatttgacatcttaagtaaaaggtctgtttgttataccatgttctggtgtactctagtggttttgacaaggtatatacacacagatgttagaaaaaaaaaaacctttggttgttgcaattttctccttattgcatctaattgaaaacatagaggaaagtgtagaacacatctgtgggtacttttcataccagtgatagtaccatggaagccatggaagtctttaagagaactcctataggcttagaatgtagtgaaaatgttaggggactctataacatttgtattaccacccttacccttactccttacccacccacctgcaaaa

SEQ ID NO: 240365 - DNA, 389 bp, Homo sapiens
agtttgtcctttaaccattgtacgttcttgtcacctcagttagctgtaaatgcatggatttatttctgggatctctattctgctctattggcctatgtgtctttttatgccagtaccatacagttttgcttattgtggctttgtagtatatttcaaaggcagattctgtgatgccttcagctttgccctttttttatactcaattattttgactattgatggttttcttttgtgggacaagatgaattggggtattccttttgtatgtggagaatgtcactggtagtttgatagggattgcattacacctgtagatcattttatgtaagatagacattttcacaatattaattctaccaatttgtgaataaagaatatctttcttttta

SEQ ID NO: 240366 - DNA, 2882 bp, Homo sapiens
aaagttagtctaactattagactgtcagactctgaagtgtttcttattttggaaaggtgaagacttgctttagtttgttcatagtttccttggcagctgctgatggttttgatggagattcagatggatttggaactaatgctaacttctgcttggtgaagatgctaaccaagttagatactcttcagtgaattctggtactgtgtacgattaatcctcatccacagtattacgctgtgcaaggctatatatacacaggattaatctttccatgatttccactgccctgaaggaaattagaatgtagtctggctccaagaaaacactagaaactacttcagctggtgatggaaaatagtggaattctatacatcctttgagacaatggaagcagcaaaccagcgttctttggattggggaatatttttggtactaactgaaaaacatcattttaagcctggccctgcttagaggagacttgttttctcttccctctctccctctcttccttttttccctccttcctctttttctttcctcctttccttcttgtctccctcccttctccttccttccttcttcctctttttctttcctccttccctccctccctcccttccttccttttttcctttctcccctccttccttcctttttttcttccttccttcctccctccctcccttcttttcttcctttcttcctttgccctaaaacttgggggaccctgcctgctcattttgtttagaatagaagattactacttttctctgaattgtcatttatttttagagaggtaagaaaaaagggaatagctgccttccatatatacttatgacatggagattatctactcatttaactttgcactgctattggctgtttatttggcttttgaaaaatcaggtgctatttattcattgggcttgtggggaactctagtagccctgaatggcatttgtggcatactcaatgaagtctaattctttatcctggcattaaaggcttaccaagatctggcctcaatcttgcaaatgagcactctcttatatacctgaaggaaaagtgctaatttagccaactaatagagataggtataaataccaatatagacatagatatgaaactttagttgcaaagaaatgtttaatatgcttcaaagtgcatatttccctcttccatgctttattgtctattcttatcagcagaaatgttttcctatttttccttacctgtgatgtacctatccatcctttacagttgagttcagatgctacttctgtcatgaacccattatttatcctccctgtgagaattcatttttccctgtttttggatcttacagcctttgatttgagcccccatttcagtctgctttatactactgtcttgcatgttttcccatgataaataagatggtttttgggaaactgaactttggacttacttgattctcttataacaccaggaaattggccaattctagttgagttatggaaatatgttgtctgctgcataccaggcaagttcaagaataccagcaactcctgctacttagggtaatggtacaagtaggattaagtggatatagttgctatctatctgtagaagacaatgagtgagtgctgtcttaagtttggaaagtagttgattctctgcagaggggtataaactactgatgaaaggagagtgactcattactcctagagattctgaatgggaagaatgccagctttatgttttctgatactgattttttttttaataacttggtgcaaaagtagaacattattctaagatgactgttgtggaagaaaaaaaaggtagaacattagagttgtaaaaatgtttttaactataaagaggaaaaaactgaacttatttataattcatttacctagagagaacattcaacattttggtcaatgtattttttttctttatatctatgtagatatatatttcttcatttatttaacaaattgctactgacaccctatggtttgctggaagtgagctgtgtaggaataaccatgagcctctgctctgatgtaatttttagtgtatgttgtatttgttgacatataattttatattttgcttttttcacttaatgtatcatggaattttttcatatcattaaatattctctttgtgtggcacaatagtatttcagcatgtagatattttgtaatttattgaatgaatcctttttgttgcatattttcaattttgtctgtaattatatagcaatgcagggaatagtcccgtgtagcaggtggaattctaagatgaactccagtgacacttaccttgtataattccctctccctgtgaacatgatgggatattacttccatgattatgttatgttacttgcaagggaattttggagatgtaattaaggttgctaatcaattgactctgaattaatcaaaagggcaatattctaggtagacctaacctaatcaagtgagcactttaagaacagagagttttctcctgcttgtggcagtagaggaagtctgagagattcaaagtgtgaaagagactctacaggaggaatgttctccattgctgaaatgacaatttcccacagacaaggacctgagggaagcctctagaagctgagagtagtccctgccaacagccaaccaaaaaaactagggaccatagtcctacaacagcaaggaactgaattctgcaaacaatctgattgcgcctggaagcaaattcttccccagagcctccagataagagcccagcttctgaccaacatcttgatttctaccttgtgagaccctaaacagaggacccagttgagcccacctggacttaagatctacagaactgtgagataataaatgggtgttgttttaagg

SEQ ID NO: 240367 - DNA, 397 bp, Homo sapiens
caagcttggggaaatgccttttttctgaaacatttcctatgaaatagtttggccccacgcccactaactaaagaatgaggctggcagggcgtggtggctcatgcctgtagtcccaacactttgggaggccgaggcgggcagatcagctgaggtcgagagttctagaacagcctgaccaacatggagaaaccccgtctctactaaaaatacaaaattagccgggcgtgatggcgcatgcctgtaatcccaactacttactcttgaggctgaggctgacgcaggagaatcgcttgaacccgggaggcggaggttgccgtgaaccaagattgtgccattgcactccagcatgggcaacaagagtgaaactccgtctcaaaaattaattaattaatttaat

SEQ ID NO: 240368 - DNA, 2115 bp, Homo sapiens
  misc_feature (464)..(464): n is a, c, g, or t
  misc_feature (1909)..(1909): n is a, c, g, or t
ctttgaaaataattcggattttaacttctactgttctctccttcctttcattgcccactctcaagtactaattaaattttgtcttttctaccttataaaataaatatctcatccatcttttcaatagccacatcttcttcacaactcaccggaactgttgcagcagttgcctcctgcccatcccctcctccagcttccctgccaatcagtttgtaatcgacagtggtgatacccctcatcatggtgttgttctccagttgatattctcatctgggacccatcactggagccacagcatttttagaattaaaggctgaactttttagcatgacagtcacgaccatcataactgtcactcatttgtcattcagtcttatctctcacatctatgatttttacattccagatatcttacagtggccccagtatacctaccttcccctttatgctgtggctcacacagntgtctctagctaaaaaaaaacaccttcctcttgttaacatagataactcctatgggtccttttcactctatcaatatcacctcctccagaatgtctgttgaaaccatgagactcagggaaacactttttctgctcccataaagttccatgattactccagatagaaatagtttactattgcattggaatgtctttttcctccaaagtgtatccctgggtcctaacatagtatttggacatgtggtaggaactcaagtagtatttgttcaataaagtttttcagtcaactattgtatcaatgccttaattctaagacatatcattgatctaaacatttcttcaataaaaaatagacttctgttcatgattgaaaaacttcacaactttataaacattaatatataaaagtataatttagaattgagaaatatggcaaccacttttcttaaggagacattctattttttttccaaccatgaaaactgggaaatgtccttaaataccattcttaaaagctgtgtttttgcatttaacagtctccataatttgaagtgaaatgtcattcatttggatgtcaaatggcaaaactatatcttttttaaaatttaagcgtatattatataaaataataacttcgtgaaaggtaattttacagaattaaaaccctgagtactcatcaaaaccatatcagtcattttatggatgagcaagcttgatctggaagggaggtgacattagtttctcaggcccacagagcttgttagtggtagaattagaaccagaacacaagattacctggcttattaccaaggaagcttgaataattaaaaacgtattttttaatactaggtgtttgggtgctgtcttcagcattgagttataatgatgatcaaattgggaaggcacccagccctgtggaagttcgtgcagtggagaagaggagataatggcatagcagtggagacacccaaagtcatccacagtttggctttaaatagcatttctaatatcattttctccctccctccatgatgaggtctaaatttcaaccatttgaactccttgctattcctggttcatttccatgcttattgcctctgagcctttgctcctgcttgccctgctggttcatgtctgctggttcatgtgtccttccctttggaagcacatccaaatcctacctgatgtctaagacctatctgaaaaggcagctcctctacagagactttcctagttctctctgtcagtagtaacttcttcctcccttgagtcccatacaacttttctttcccttgtttgtagcacttctctagttaagctttgtgttacagttattttctatctatccaaatttccttcatgatttttagtaaatcctgctgtgagttatttgctgcataatttaatgaaattactgtagagtcagcaaagaagtagagaagaanaaacaccaagaatgaggagaacctagcaagggcaggcttttggaagcaagaggtagataatttaataaaaggatagttaatagtttcaaatgtgttatgactttttgctctgagtctctactttttgtagtttgtgttattctgatgtattatttaacctttgttccttatcacttttatttaaatataactttcaatttgttttc

SEQ ID NO: 240369 - DNA, 416 bp, Homo sapiens
cacaaataaggcacagatttttaaaaaatcatcaacttcctggctacctatatagacataattacatagaagctcaactaaatttgcaaacattccagagtttgggtttccaataattctttgtgattctttaaaaggtaaagtatttttttcccataaaacatagcaacatttaaaatcacccgtagaatgtcctgccatttttgtttctgtagtttcctcattttctgcaaagcctcgctgaggaaattgactttgaatatccttttacactcttctgttttagaaagcattgtggtaaaacattgaatcatcatggtcataagttctgttcacattctttcttgctttgaatattttttcccagtggccaatatttgattctgttgtatcatggctaaaaggtaggcatggca

SEQ ID NO: 240370 - DNA, 284 bp, Homo sapiens
ttcaattcagatgctaaatgagtccagtaatgccacaacaaaatggacaagtgcttgtggttagatgttggtttgcaaaggaacttaatatgctctgagcggctgcctagaccacaaaaatctgaattattatataattataatatgttttatattttataataaaaattttaaacacatatagaagtagcaagatggctcatgcctgtaatcccagcacttggggatgccgaggtaggaggattgcttgaccagcctgggtaacaaagcaagactgtctctac

SEQ ID NO: 240371 - DNA, 502 bp, Homo sapiens
tatgcagcagttttaaaatttcgaactagttcaagagctgctcggctgctcgtttactttcagttttgggaacagaggcttacacccctttctcctcctgtttctcctccagtccctcttcccctcaatctagtttcccaaagttagcaaacctactttcttgattttgtttcttaacatttaaaacaactggtgtagggctaatgatttcatctccttaccaccacccctaaccttaaaagcaataaataaaataaaagcccagcctgccaaccgcatgcacacacggccagcggtggtgggggtttgtagtttgcatacacgtcgcggggcagaagcctgtttgcaaaggctgaaatgtagctagcaggggaagacgctgaaaaaacagagtgatttgataaaaacgtgctgggccctgttacaggagggctgctgggagtagtcccaggtactcacatcagaaggggtgcaggggaataaaatttaaaaaagcaaaaca

SEQ ID NO: 240372 - DNA, 334 bp, Homo sapiens
aggttagtgaaacccaggtggtctatatgtgtgcctacacataaggaatgaaggctgtgaagcaggagagtaagaggatgtgacatagtcacatttatacagacgataactctagtggccaaggaaagaatgccctagaatacaaaaagatgggtgtcatgcagattacccactatctgcacagcttcatcttccctcatggaatccatcagcaagttctgttgactatctacaaaatatttaacatataccaaatccattcattttctccattttgcccagaagagtctaacagtttcctacatgttctctctgcttctaatattatcccctc

SEQ ID NO: 240373 - DNA, 441 bp, Homo sapiens
ccaaagaaactgcagtttcttttgtttagagaaaaggtcttgctctatcacccttgcattggatgagggtgacctcaatgggttgcatgttctaggctcccctgtcagctgggatggggctttgtatttctctctcccttattcatatttctgataagggtgaactgtggtgttaaaagcttggaattttggcatgtgttgtgttgttctgaattcagatatactataaactggggtggtgaatatgatggccatctgcatttgatgaccttgtttcttccgtccctgactttatcaaagcacacatcactcctaatgaaaagtctgactgttgatttcttcaaattcatgttgggggaaggtatatatattaattatgtatacattaatacataatgtatgtattaaatcacataaattagcattctttagtatcccttt

SEQ ID NO: 240374 - DNA, 135 bp, Homo sapiens
gtcaatgttaattcatttgcatgttaaaaaactataatatctggtataaatgtgaggctactttggatagggggaaagaacttgtaaataactgatagttatataagtagaaagggagctctagaaagacaagtt

SEQ ID NO: 240375 - DNA, 293 bp, Homo sapiens
gtaagtattacatcccagttagaatgctaattaaggcaagagaggagagatttttgcatgagtttgtattgagaattttcttaattatttggttttacccacgtaaacctatcccaggatatgcttataccctcctctctctctcccccaacacccacagtcatggaattatattaatgtaactctgttatcttctactggggacatgttctttgcctgtgagcttggacttctgaagctcaatgcttgctgacagactcaaactctaactcagttaaagaatcaattgagaa

SEQ ID NO: 240376 - DNA, 637 bp, Homo sapiens
atgaacttggactccgtctcacaccagccacacttggattggacctaagtgttaaaggaatatagtaacgctgctagaggaaaatatggaagaatattttcttcatggcttcagggtaaacaaatttttcttaaaccagactcaataagccctacctataaaagaaacagttgagaagttggactttattaaaaataagaacttttgtttatcagaagaccattaagtgagagaaatgtgaaaaacggcatgcaccaagaaaagatgtttgcaatacatatattaaccaaaagatttgtctccagaatgtatgaaaacgactgcaagttaattttttaaaaaaggcaatcaacaggctgggtgcggtggttcatgcctgtaatcccagcactttgggaggcagaggtgggtggatcatgaggtcaagagatcgagaccatcctggccaacatcgtggaaccccatctctactgaaaatacaaaaattagctgggcatggtggcgcacgcctgtagtcccagctgcttgggaggctgaggcaggagaattgcttgaacccgggaggcagaggttgcagtgagccgagattgcgccattgcattccagcctggccacagagcaagactctgtctcaaga

SEQ ID NO: 240377 - DNA, 100 bp, Homo sapiens
aaattgtttacagttgatgttcaaggaaccaagcccctaataatctgcagattaaaactggcagatgtcagtggctccaagacactaacataaatttgaa

SEQ ID NO: 240378 - DNA, 245 bp, Homo sapiens
caagcccagggtaggtgtgtaggagccctgagcggatggatgaaagctgtcctggtctgagtgcagagaatggggtgttcgggttctccatttgagtcttccactgcccaaacctgaggcccctttaaggttgccccttaaagttgccacacccagaaattgggccaaagaagttaagctgttgattatttcaattctgaataaaaatgaaggcatcttctctgccttctaaggcctggtctgat

SEQ ID NO: 240379 - DNA, 691 bp, Homo sapiens
  misc_feature (620)..(621): n is a, c, g, or t
  misc_feature (639)..(639): n is a, c, g, or t
  misc_feature (641)..(641): n is a, c, g, or t
  misc_feature (651)..(651): n is a, c, g, or t
agtagctgggattacagtcgtgcaccaccacacccggctacttgtatttttagtagagacggggtttcatcatggtggccaggctagtctcgaacttctgacctcaggtgatccgcccaccttggcctcccaaagtgctaggattacaggcatgaaccaccgcgcctggctaccaatatactgttaaaatctagatatttatttttttctgcaagtccactggagtaggaccttctaagtttttattcaggtaaaataaagtccctggatggtccctgcccagtactgaaaccctcttctgggataagagggtaaatataattcatcaagttagtttcatgattgtgagctccttgacactaccatttattcatcttgcattccctgcacacctcacagtacctggctcacagtagttcagtagatacttgctaaatagtactgaactgaacagtcatgagacgtagattttcagatttctttcctctccataggaatagtggagatcatcaaaaccttaaattttggagaagtgaagaaatccaaaaaataatgtccttggcctaccctttaaaaaaaattttttttttttgagacagagtcttgctctgttgccactnnacttcagcctggcaacanantgagactccntttccaaaaaaaaaaataataatgcctcttttacaacccc

SEQ ID NO: 240380 - DNA, 412 bp, Homo sapiens
atgcacgtgaaaagaagatcctcattatcagggcgtaatctcaactactcagcaggctgaggggggacgactgcttgagcccaggagtttgaatacagcaagaccccatctctcaaaataaaaataacaagaggtagagagacctgggctagcagttagtatgctcagcccccttgtcatgggacgcctgggaagcttcagagagtccacaccagcaagaaggctctcatcagacacacctcttggaccttgaacttcccaatctccataactgtaagaaataaattccggccaggcacagtgactcacgcctgtaatcccagcactttgggaagctgagatgggggatcccttgagctcaggagtttgagaccaccctgggcaacatgacaaaactccatctctataaaaa

SEQ ID NO: 240381 - DNA, 538 bp, Homo sapiens
atccatgtgctatatcctaacctctctctttgtgtcccatgttttcacattcaaccactgacccaaatgcagtccacatacataagcagagttaagcaaacaaggctctgtggaatgaattctgtaatgagaagactgttgatttatactgtcctctctgctgtaaataacatcttcattttaacatatgtacttttcactatgaatatatgtaaaattgtctctatattttaaagaataaaactgatagaaatttggctgcaatcctagccatttgggtgagatttaattattattgctagtttaatctcatgctacatatttcaaaaagtcactctccaagttcaggatatttattataatacttcattatgctaatttcatgttttataagatgacaagctattgtcatgatttattccttgtctatattcttttgaggaagccaattgaacgttaagttcttatggatgtatttctttaaaaagtggtagtgtcataccatgtactgtcattatttaaaactgtgacattctga

SEQ ID NO: 240382 - DNA, 439 bp, Homo sapiens
gaggcagaggttgagtgagctgatatcgcaacgctacactccagtctgggtgataaagggagactctccccaaaaaaattgagtcggaggtctcactttgttacccaggtggatcttgaacttttgggctcacgcgatcctcccatcttggcctcctaaagtgctgggattacaggtgtgaaccaccaggactagccagttgtttgaatttaaagttgaaaaactacattcaaaaaaaaaaatcacctggacctggtgttatgtacctgtggttctagctattcagggaggttgaggtagaaggattgcttgagccagggaggtcaaggttgcagtgagccatgatggtgccattgcactacagtctgagtgagacctggtctcaaaaaaggtaaagaaaaagaaagaaaaccaactctaaagaatttagttactagac

SEQ ID NO: 240383 - DNA, 272 bp, Homo sapiens
aaaataaaatctagtctcctccaggtaaactcactcaaattcagtgctactgcaatcatttcaggtttaaaaccacctcagtcacactaatgattgccctactcctgcccctccctgggttcttctgtgggcagcctcagtggaggatagcgcatccatccacttctcagtcctgacctgtcctgggttcatctccactgggaggcagatgtcagactccaatgtgcctggacatgtgcaggtgtgcgaggggcatgtcctggggcctgcag

SEQ ID NO: 240384 - DNA, 371 bp, Homo sapiens
tatatttcttgataagtcttgatatactcataaataaataaataaaaattttatgttaaatcatcccgtaggccatccagtggaataagaaaagtctgctccaaaaggtagcccagaaacccagataacctctttgtttcaccgttactttggggcttgccctccatctgcaaggtcacattccagtccatgggaagggggataagcatgtagagggcaagcaattcctagaacttgcatgtatcgctcctgctgacattccataggccagaatttagccttgtggccttacctggttgcaaaggagggcgggaaatgtagtctgtatctgggcagccacatgcccagataaaattttagggggtcctagt

SEQ ID NO: 240385 - DNA, 487 bp, Homo sapiens
taggcctgttggtgagggtggatttgtctctgtgtatgtagtatcaggtgttctcaagagcatctggttagctgagcagtgggggaaatgcgaagtctcagtagagaatggctttgcccttttcctttcttattctggagaacatgattgagctgctggggttacaggagaaatcttgtcctaggaaacaaaaggtttgtagccctcattctggctctgagccctgtagcaagcctcttggctttgagccagtatcgtctgtgaaatgggtaggtatcatgatacctaccctccctgactcagatgtgttccaagcttgtgccagacgatggacacttagatattatctaggagcactgccctgcagaaacaagaagtcgaatatgaggtggaatggccacatttcctagaatcacgacatcttcagcagttgtgatccatttgattgttacttagtactcctttcaatttgataggattttgctta

SEQ ID NO: 240386 - DNA, 435 bp, Homo sapiens
agaatatataatagttaatagaaagatagcctgggagtcagtcaacctgaattatgattctggttttgccattaacttactgtgttaataatattgtgggcttcattttcctcgtgtaatatgtaggggttggtctagtctagggatcagcaaacattttctgtaaagggcaaaataggaaattttgggggatttgtaggccaaacagtctgttgcaactactaaactctgcacttgtagtacacaagcagctataggtgatacataagtgaatggctgtgttccaatacaattttacttacaaaaaaacaggtagtggccaggcatggtggctcacgcctgtaatcccagcactttgggaggctgaggtgggtagatcacaaggtcaagagatggagaccatcctggctaacatggtgaaaccccgtctctact

SEQ ID NO: 240387 - DNA, 978 bp, Homo sapiens
caaggtgctgtacccacagtcatatcatttaaccctctctccagcccagatgtcctgatcctaagggccaggcagttagatgggtatacccctaaagtcctatacaactcagggcccctgaaaatgccccctcatccagcattttccctacatatggaaacaaacaccattgtttgaaaaaagtaaaaaaccttctttacactgagctgaaatttgcctccagtgatttcttcttggactacaccgaataagtttcttgctcttccactccataagcctacaaaatactggagaacagctgtcaggagagataacaaacccgaagcctggaaatcactcatcaaaccagttttcttccttttaagtgacaaatatgtgggttgggtcaaaactggaagagaagatctgctgccaggccacagtgccctttggtttttgctttccagatgctcgggagccattctgcaggcaagcagacctatttgcagggacgggcaattgttgctgtggtgcaatgaagcaagtggggctgggaaagaatccttaagaagatggttcctgccagatttctttctgccagtgccacaaactttaattaaagcgagccctcaggctgcaccagggactacaggtgctgtgatgttggtgtccaatggggtcaacagaaagaactgctaactgtgagtgaggcagcagccaagatgcaagcaccagccaacatgcaaagagaaaagagaaaatgaacctgtgttcccttccgataagacagtatttacaaaccggagatctggagactgacaggcggggtcccaaactcagctctggcacttgaataaaccagatgacttgggacaaactacttaatgctcctacctcccctcttccacaccttttcttcctctatataaggaggatgataatatctactctgtggagttgtttttaatgatttaccaaaatgaacaaatgtcaggtata

SEQ ID NO: 240388 - DNA, 1387 bp, Homo sapiens
tttttttgagaccgagtctcgctgtcacccaggctggagtgcagtagctcgatctcagctcactgcaagctccgcctcccgggttcacgccattctcctgcctcagcctccccagcagctgggactacaggcacatgccgccatgcccagctatatttttgtatttttagtagagacagggtttcaccgtgttagccaggatggtctcgatctcctgaccttgtgatctgcctgcctcggcctcccaaagtgctgggattataggcatgagccaccgtgcccggccacatctgtgagttttaaacaggtcatatctaatttgaatacactataagatagaaattattcatatactatgaggttatctatgacagtatgttttgttttaaattagtttcccatcagatataaagttggtgcttttctttataatgccatgagcctctcaagtctctcagggaagaatttcattcttacatttatttgctgtttcactttgcattccttcctttctattttgctttcttcctttgggagccttcatccttccagtgaaagaagactgaagttgtctcttcatgataaataattcaatggaaaatgtcagaatataataatttccaaagactagtcatgtaatgactgatttttggtaatgctaaaggcaaaataactttagcctataccataaaaaagatctagatattccctttgtatttgtggtaacttgattttaggtataccctttccattacccttcagaaatggaatgtttgatgtactatcgagaaaactgaatcaattctgcatttcgtgaaccctgttacttatctttagtagccatggaaataattccccagtaaatatatagttgcaaaatcactgcctaattacctttctttacatacaaaatgactaatatttgataaaatatgaagtttttaaaaatagttacgatattttgttacagtgaagcaatttatatattttcttaacatctccccaaaactctgaaacacagtgaatgcttctttggaagccaaggagcttgttgctgacatagtaataatttggttgtttgcacattttataaaatactaaaatgttgcaagttaccatattccttaaataacttatggtaagatcttattgctgaagtgttggcttgtgtgtaggagggaaattatgtgttacagtgttatataaaactgactcatatgagtaggtgaaagatcccaagaataccaggacacccacactagaaaaagccaatatgtacactttctctttacactatgttctagcaggctgcttaatggaactctatattcattaaagaaatttctgtaatttctttcattgccttggtggatatctttctggttga

SEQ ID NO: 240389 - DNA, 802 bp, Homo sapiens
ctcctataaatctttaacaaaacatagttagttgtttacatactttttaaatcccagagttggttttaaaacctgcatgattgccatttttgcatattatcttagtgctctaaaattatccttgcctatgtgcacaaatagggaaacgctgcctaaaaaatggagttagttatgttcttttgctacttcactgttacactattatctttacatacttatatgtgagatgaattgagctgctgtccgttcttggaaatctgttccttttaataccttttattacccgtatgtcatgtaagcactagtaaaattatttctaccaagtgggtcttatccctcagtgctgttttaacagccctcgtgctctgcatagcctttaaatactgcctgtctccccactccctggttctgacccactcaggagtacattagagttgcccattttcccagtgattgctgtccttctcaatagataataggcaatagaagcagacagataaaccaattattggagggaccttgagcctggaagaaagacttcaactcctttcgaatgaagataagacagtggatgaatccaatcaggaggaaggattctactccacagctaatttaaagtctgttcatcagtcatcagttgaaaacatgggggcccttggtcctcaggacagatccaagaaggtgtcaggcagtacactagaggaggaagtctttcttacttccctcacagccttgcctgaggttaatcaaatgaagatttgctctctactagaagaggactgtagaaatctcacatagtcat

SEQ ID NO: 240390 - DNA, 993 bp, Homo sapiens
agagagaaaaaatagaagagacatgccaagttggaatgaagcctcctgtccctggtggttatactttacaaggaaaatggataacaacattttgcaaccaggttcagttagacacaattaagataaatggctgtttgaaaggcaaactcatttacctcctgggagactctacactacgtcagtggatctactacttccccaaagttgtaaaaacactgaagttttttgatcttcatgaaactggaatctttaagaaacatttgcttctggatgcagaaagacacactcagattcaatggaaaaaacatagctatcccttcgtcactttccagctctactctctgatagatcatgattatatccctcgggaaattgaccggctatcaggtgacaaaaacacagccatcgtcatcacctttggccagcactttagaccatttcccattgacatttttattcgcagggccatcggtgttcaaaaggctattgaaagactgttcctaagaagcccagccactaaagtgattattaagacagaaaacatcagggagatgcacatagagacagagaggtttggagacttccatggttatattcactatcttatcatgaaggatattttcaaagacctcaacgtgggcatcattgatgcctgggacatgaccattgcatatggcactgacactatccacccacctgatcatgtgattggaaatcagattaacatgttcttaaactacatttgctaagggataaatactatacaaaatcactaggaaccaatctctgcacataatcccacatgtattgtaaagtaagttttactcattttaggaactaaggaaaataaatttaaaagaatctgtttggggaggaaggctatgtaaggacaatgacaactgataagggatgcaaaaccaagagaatcattcatgaagaatgactataccatgcctggttctgatgctcgtttaaaatattaaaaaagttttt

SEQ ID NO: 240391 - DNA, 406 bp, Homo sapiens
cttcaaagcaggaggaagactagacgactgcatgctttaaccatgatgtgccagattaccttaaaaatgtactttaaattacctacacacaaattttccttaaagaatgagatagtttgagtttgcggacttaaaatcaactcagtagttttgaaaagtgcccctccccccccccacagtctttccattttaaactgtgaacctaatataacttctaggcctttatacaattaattctgaacaatcaagggactaaacacttttacaatgtaattacagtagtacaaattgtttgcccaaacctcattctggataaggattttacaattagcaaacagttattacagttggggcttgctgagagaaattgcacagaggatgtctagagttgcaatatagtagccat

SEQ ID NO: 240392 - DNA, 111 bp, Homo sapiens
cctatcaccacctataggggccagaaaatgttgtcatggagacaacagctgttgggttatgagtgacaagtctcaagagagaagtgtcttggaaagggaacacctcaagta

SEQ ID NO: 240393 - DNA, 445 bp, Homo sapiens
tcagcgaggtgtggtggctcacacctatagtcccagctactcaggaggctgaggtaggaggattgcttgagcccaggagtttgaagctgcagtgagccaagaccgcacgactgcactccaacctgggtgtcacagtgagactctatctcaaaaaaaacacagcagtaaaaacagtaaaaacaattggttgcgatggctcacacctgtaatctgagcagtgtggaggatcacttgaggtgcggagtggatgaccagcctgggcaacagagtgagaccctgattcaaaataaataaatcaacaaacaaacaaacaactgagccaggtgtggtggcacctgtagttcccagctacagctagatcctgtctctattttattaaaataaaaaagaaattacttccagcctgggtctcaaagagagacactgtctcaaacaacaacaacaa

SEQ ID NO: 240394 - DNA, 496 bp, Homo sapiens
ataatttcagaagacatgttaagtgacttttaaggaatggagtaatcaaattttcttacaatatcagggatgtaaaaatattcatcattagatattttatatccaaaagtgtaacttccgggtaacaagattctacctttgtggatcaaaattagtcaccactttccaaagttaacatgtgctggggatctggtgttcctggaggtagcacctgatttagtctctgtgctctgtcacagttagtgttccattttaatgtttaattttaggtggaaagtttttaaaaaaacatttttttttggtggaaaatgcataagctactgttctaaatttatgtaaaaattcactgcactgtttctgtaaacctgccatacattctttattttaaatagacagcttttctaaatcattgtgctccgcttagacaagttctgtctccatggttgaatttatgagtggatttgaataataaattcacatttcagtgaacatattt

SEQ ID NO: 240395 - DNA, 485 bp, Homo sapiens
gcttcctccctaccatgcctacaccaagggaatgcctccctggggaagaaggtgctgatgataccacaatgttcaatgactaaggaaacgaatctcatggaatggtcaagaaaggcacaatactggatgcgctccttgctcaggacacacaggccagcagatgatcccttgttgtccctggaaagcaccccaatggactgggcttcatctgcaaattctcagagaaggaaggcaggtttggttttcaccttcccattcatcttctaaatcctgaattaagcttaccaaagtgtggtagggaaagttctgttctctatccagaggctacgtacgagtaggaagaatcaaagcatttgccaaggaggtagcatggcatggttggagaaacacgggctttggtgggaaacaaacttcaattgaatcatggctcagttacatcccagctgtgtacttttaaacaaaccactttcacctctcagagcctg

SEQ ID NO: 240396 - DNA, 474 bp, Homo sapiens
ctctgttcatatcttgaaggcagagtgctggctcatagtagacatttgatgaatttctgttaaatgattgagtgaatcaagagtatctgcagagtatagcatttatgatgagacaaagctaattgggaaacagaacaagattggtgtcctggggtaactgggtaggtcttaagatgaagattttggggtgtgctgggtgcagtggctcacacctgtaatcccaatactttgggaggctgaggcagggggattgcttgatcccaggagttcaagaccagcttgggcaacatggtgaaatcccgtctctacagaaaacacaaaaattagctgggtgtggtggtgcacatctgaagtcccagctacttgggaggctgagtttgggaggattacttgagcccaggaggcagaggttgcaacaaggtagatcatgccactgtactccagcctgggtgacagagcaagacccagtctgaa

SEQ ID NO: 240397 - DNA, 594 bp, Homo sapiens
ttaaaaaggaaagttcattcctcttgcccttgtgctttctgtcatgggagcacacagcatttctcttctccagagtatgcagtgtcaccatatggaatgcagccctcgccagaaaactgaatctgtccgctccttgatctcaggcttcacagcccccaggtgaaaccagcacaaaatggactaaggcatctagtatgcaggaacaaaggatatgtaacataacccatatttgaaataaccaaaaataaaattcttggcaattaaatctagccaaataagcaccaaatcaaaaagctatcaaaactattttgaaaattacagtttaaaatacagttatatatgtataaaacatacatagaatgtagatacatatgcacgtatatatgtgtatatacatataaaacttctcaatattgtcaataattgttatttttactttacagtaatattttaggaagtaatagcttaatattcttggactcacatagtaaaagttcagaaattacttcacctgattttcctttcatagattcaaattcacatttaaaaatattatgcttcctcatgtgtcaatatagttacctgcttcttgac

SEQ ID NO: 240398 - DNA, 648 bp, Homo sapiens
ttaaaaaggaaagttcattcctcttgcccttgtgctttctgtcatgggagcacacagcatttctcttctccagagtatgcagtgtcaccatatggaatgcagccctcgccagaaaactgaatctgtccgctccttgatctcaggcttcacagcccccagaatggtaagaaataaagttctattatttataaattacccagtctcaagtattttgtgaaaccagcacaaaatggactaaggcatctagtatgcaggaacaaaggatatgtaacataacccatatttgaaataaccaaaaataaaattcttggcaattaaatctagccaaataagcaccaaatcaaaaagctatcaaaactattttgaaaattacagtttaaaatacagttatatatgtataaaacatacatagaatgtagatacatatgcacgtatatatgtgtatatacatataaaacttctcaatattgtcaataattgttatttttactttacagtaatattttaggaagtaatagcttaatattcttggactcacatagtaaaagttcagaaattacttcacctgattttcctttcatagattcaaattcacatttaaaaatattatgcttcctcatgtgtcaatatagttacctgcttcttgac

SEQ ID NO: 240399 - DNA, 445 bp, Homo sapiens
gggacaggggaaggggggggtgttggactggaggggaggtggggagagatgggggaaatagcgggaggtagggaggaggtgggaggaggtgagggggaagtgggggcgggggggtagggccagggctccttccagaaggcaggcagggtgcacttagcccggggcagggacccccatgggccggcgggtcctcctagacccgcctcagtcctggaaaccccgaggggacgacagcggaagccgcctgggccctgcgctctgggccctggggtgcaacccctgaaactcgacagttagcgccactccccgcctccggggtcccctcatctggtggcggcggctggagaagggcgcaccccgcccgcggagacccacgcgctcaccttccgggggccgaggtccggctcgtcgtccggctcaaggctccgggccgtggtcccgccgg

SEQ ID NO: 240400 - DNA, 260 bp, Homo sapiens
ctaaagatttttctattaccatatcttgattttttaactgagtttttgcctacaggatatagatagactgataatatagatatggagataagtgtggatacaggcatagatatagagatagatagttgatgtaagagattgtcttacaagtatgtagccagaatcaagaatataaaagaaattatagaagagactccaaactgaaactcaggcattgagacagaaatcagaaagatccaaaagaagagtaaccagtgaaa

SEQ ID NO: 240401 - DNA, 510 bp, Homo sapiens
agcaccagttttccacagccctgtacacgttttaaataaatgaccagaaaagagatggcacctgagaattcccagggagccaggatgagggactggcagtgggggattctggaggaagggtccaggatggagggactgcagcaagaacatttcctaaggcatgcaaagcttgactgtgtgatctgctgtctaccgtcaatagtttactcttctaagcaggggtttgtgttgctttcaggaagatggcctgatagagtgctgctgttgggatgaaattacagaagcaagaacaatagcagaaatagggggaggcaggctgtgtgccctgggctgtaggcagtaggtcagactctcaggctctgctggtaggcaccattggttaggaactgcatggggtttccagatgcagaagagaagttctagaaggatctggagctaccctctccgtgtagctcaggcttcttcaagatgatcagactacatcaggcaatgtttgctgttaaaaaaaaa

SEQ ID NO: 240402 - DNA, 637 bp, Homo sapiens
aatatcaagcgcttagattaagcactctcttgagtctcatccaatcctgaatttgtgtttataaaaccgatccagagagtgtgagtaaatctgtgaacagctacttcagccccgaacccagtggtgttgagtggactggtcctgcacagagggacaatgcacctgcatgggcaaaaactggggctgggccagagtcatgggcttcaatccctgcttttcagccactagcaagttgttcatcttctctgaacttcaatatcttcattcgtaaaatgtggacagtaatagctcctttggccgtttcgagtttaaattagataatgcaagtagaagacatagtacaataatatctaataactaccatgttcaggaatataagtaccaataaaatggtacctattgtattaatagcatttgagtgagaatttttaagtctttttatttctcatcttttcatttctacctttattggatttgtagaatctattacagtcaaatcatatagtttggtgttgtggtggtgatgttttttgtttgctttttaacacacttgcctttacttgttttggcagaagggatcctaattcattcagctttctcgaatgtcatataaaaacacataacacatgttcacgtt

SEQ ID NO: 240403 - DNA, 1090 bp, Homo sapiens
tggaggtggaggttacagtgagctgagattgcaccagtgcactccatactccagcctgggcaatagagagagaccccttctccaaacaaaacaaaacaaaaccaaaaaatcattttggaagttttcagactggtcctttttttagtataaaagggaggagctttggctttatcaaaaacctgatctgggaggattccctcagtatgtctgtaacatctccttttggcctgtgctgtttatctttaaaaattctgatcactcaagaatattgctgtgtcattagaagttaaccaaagcttatatttaaagttttattttaaatattttttataaataaatttgaaaaccttaggaagataaagttttgaaaggagtttttattttaagggactataaaagtcactatttgtcgtattattttagaacatgcttttcttaatatggaatttgctgctgttatttctaaagtttctgttctttggtcccattttatcagcaaaatcagtttattaatgaaacaaatctgttatttaccttttactcctgtatgcaaaatactgaatttttattttcacttgtaaacttaggaaaaagcagatattgtttttaaatttaatttctactttgagttattaataaaaagtttcacaaaaatatgaaaactttcaagtttatacacatactagaaaataaaagcattcacttatttcttctactgtattagttttctattgctgtgtaacaaattgtcacaaacttagcttgtggctaaaaacagcatgtacttgtttcacagtttccataggtcaggatctaggcgttggttagctgggtcttttgctaatggtttcacttgggtgatggaggtgttttccagggctgggctcccatttgaaacttcgggccctcttccaaattcattcaggctgttggctgaattcaggtccttatggttgtaggactgaggtctctttttttgtttactggctgtgggctgggggttactctcagtttctagtggctaccctcatgtcctagtagccattggtcccatttctggtctactacaatagttatcatcggagtgact

SEQ ID NO: 240404 - DNA, 413 bp, Homo sapiens
gggtgtggtgtgcatgcctgtagtcccaagtcccagctactctacttgggaggctgaggcagaaggatcacctgagcccaggaaggccaaggctgcagtgagccctgatggtgccactgcacttgaccttgggcaacagaatgagaatgagaccctgtcaaaaaaaaaaaaaaaagaaaaaaaaaaagaaagaaaaagagagaaagagagagaaagaaagaaagaaaagaatgcatagtgagattttacagtaaaactctttcttagaggctaaaaactctggggatctcacgatgtgggtacatttctagagataatattttagatctctatagatattattttaatacatctttttctttttggtttgactgtgtatcatatggcttttcttcttggaagttatcaaactt

SEQ ID NO: 240405 - DNA, 1251 bp, Homo sapiens
  misc_feature (237)..(237): n is a, c, g, or t
  misc_feature (487)..(487): n is a, c, g, or t
  misc_feature (538)..(538): n is a, c, g, or t
  misc_feature (1127)..(1127): n is a, c, g, or t
gtgctgttaggttactttgaaaaaaaaatgatgttgtatgcttgtccaactgagtaataagcaacttgtctttggcttaaccttttgccagacgtggggtgttcagataagtaatcagatatgtagggataaacaatatgggaaataagaggaaactacagcaaataacctttttaaatttgagctgaagtcattgtgaaggaatgtgctttgtctgtagtgttgctccttgttcanattgaagcttatgtacagcacttagctgtctgacctttcacggcagctttgaatcatacattttcttttgaggaatttgttaggcttcttattgaaataaagtctcagtcttagacatcatcaggaagaataatatctcccaaataaatgtttacatgagcttgagaaaagaacagtggcttgattgagagaatgcttctttacaggtaagtatcttttggtgatcttggacaagtcgcatacatttaantgttatggggtaattctcagtgaaaggcctaaaaacacagatctcaccacnaaaaaaggcagcctgcttggattgcatcagactctgggcttattttcctttctctagtggttcctgctcatgtcctgaatttctcatacaagttatagatgtggtagaagtaggtgtttaaagaagggtggtgagagacgatgagtgatgtttctttgccttctttttgtagatctgctgcctcaggcactagtatagtggttctcaactctcactgcacattagaatcagtcagggtcaagaagctccattaaaaaaatatataacagctgggtgtggcagctcatgcctgtaatcccagcattttgggaggccaaggcgggcagatcacctgaggtcaggagttcaagaccagcctggccaacatggtgaaaccccatctctacaaaaatacagaaattagctgagcatgatggcgggtgcctgtaatcccagctacttgggaggctgaggtgggagaattgcttgaacctgggaggcggaggttgcagtgagccgagattggtccattgcactccagcctgtctcaaaaacaacaacagcaaaaccaaaaaaaaaaaaaagccctaaagattagctgggtacagtngcaggtgcctgtagtcccagctactcaggaggctgaggcaggagaatcgcttgaatccgggttgcagtgagctgagattgtgccactgcactccagcctgggcaacagagtgagactctgtctc

SEQ ID NO: 240406 - DNA, 397 bp, Homo sapiens
gtacgcacagtgtctgcacccatcacctgcctccctctgtgtttcttctccctgcctccagcacgttatttttaagcgtgtctcttacacatctgtagcctgtgcatcttaggacgcactgactcacagcagtgttataaatggcttttggaatccaccctgcctacagtatcccatattttcatcaggtttcagaaattactccactacttgaatcttctagattctatgctttttcgaaactgttatattgtgactgtgctgtttttactggaactatagttacttgatactgtcactgacataggaatcatcaggagagattatatttttttctggctaaccagaaaagtttgtttttcctgtgaaattttttttttttgaaggcaataggtgt

SEQ ID NO: 240407 - DNA, 368 bp, Homo sapiens
caggcattgccctgggttttgtgaatataaaaaacagtccttgacttccagcagcctgtgcacaccactgcctcctccttgaagttcagatgcatcatttaaggtatttgccttaactcaaattatattttcttaagaagcttctggaagcttttcattttatcagcctcagaggacaatctcaccagactgaaaactaaatgcctgtttactaagccaagtggttgagaccttgaggaagagcaaaaggacaacccccctgaatgtgcacattgaccttgtcctcccagcagccctgcagtcaatggctatgatttagtctggagcatctgccagatccagattagggagaccctccttttcacttc

SEQ ID NO: 240408 - DNA, 1222 bp, Homo sapiens
  misc_feature (2)..(2): n is a, c, g, or t
  misc_feature (4)..(5): n is a, c, g, or t
  misc_feature (9)..(10): n is a, c, g, or t
  misc_feature (237)..(237): n is a, c, g, or t
  misc_feature (715)..(715): n is a, c, g, or t
tngnntatnnagaaatagatgttttctgtttgtatcataagcatttatagaaaattattctaaagcttaatggtttgctataattctcaaatactaccactagcttataaatcacttttatgtggacacacacatgcctattgaatttaaaaaggaatgagatttaaaaattaagtgcatatatataatatacatatatatatatatatatatatatttttttttttttttttttgngacagagtgagactccatctcctaacagtaaaaaaaaaggaaagataccacatttttaaccaaaatgtactttatacatattactgatgccttatacaacgtatgggaccaatgggaactcctggaagttatccaagttcatttcaaggcactatggccactgagttttcaaggccagcataacatatctctgtcagagggcattaataagctgtaagtgcaccgtgtaattaggctaattaaatgtactacaagcatttttcaaatattagcaatagaccactcctcagctcttaataagtcttctctggagtcttccttttcctgatggcattacttttactgagtgttcagtttctcagaagccttcagaagctagtttgatttttaaatcctgttgtttttactagtgaaaatgttctgaattaaaacattgtgaaatgctgttaggtatactggcatttaacattatggatcncaatgaaataagaaacaacaaaaacaggtaacaatacagttgagctcaccaaaaccttacctgctgtggggaaagaatactgccccatgaatctttcacacgtttctctattatacacttatcaaagctgtaagaccaaaatctcttagaaatctttaaaaggcacagttaagcaagccaatgttgtgtgggcataagagactagtgatgaatgatcaattgatgaatagttttctaaatgtgtttttcgcaagcatttttaaatcacatgttagacgtaagcttttttaaaagcattgtggaaatcacagcaacatggctttcttgtttgattttattaggcaaaaacgatggatggtttgatattctcttagaaaggctgacagctactatatagaaccactcaggaacaataatgataggtatcaacgatactgattagatgaaaaattcatttatgtttttctgctgaaatatcaatcttaataaatagatggcttttaaacc

SEQ ID NO: 240409 - DNA, 1907 bp, Homo sapiens
  misc_feature (1047)..(1047): n is a, c, g, or t
  misc_feature (1052)..(1057): n is a, c, g, or t
  misc_feature (1062)..(1063): n is a, c, g, or t
  misc_feature (1253)..(1253): n is a, c, g, or t
  misc_feature (1346)..(1346): n is a, c, g, or t
  misc_feature (1485)..(1485): n is a, c, g, or t
attttcgtgtgtcttaacactattcctggatttaatttctttgaggatagggtccatccttttattttctcactcaacacaacaagttgccctgagtaggctcaaacatttatttactgttgattcccctctctcttgttaagctattcatccttttttttttctgtcttggagcagagctattgagggcagcactgaaaagcagatggtagagctgtggcagaatcaacatggttgggagagcggaaagaacacaagctctggacttctctcagccccttctttctcgtctgtaaaaaaaaaagttaataatagtgcccaacttaggatgattgtacttgagaaagatcgtgttgcaaaaaatggggatgtagtaagtgctcagtaatgccttctcaggcagctgagcaggagactgtgtgcaaggccctctatctcagggccctgtttttttgtaaaaagttgagtaaaggaggggcagacatcttacacatttcagaattgttatcagttctccaggaagaagagggaaagaaaaacatttatagcatttcagtaaagattactccatgattgacaaaacaattttgaggatcctaagaggcacattctgcctcaggctggagcagtttttaaaactaaattgacagcaactagttcaagttggaacagtcctaacttaattatagatacctgcagaggttccttcaaacaggtgggtttcaacagcgtggtgctatctagcaaaagctattgtttgcttagttatttgtttgagagtcagcttagaacataaggaaggagtcagagttggggtggaattctgtctctgattggatcagagcctccattttcctaattgtaatatggaaataatgattgtccctcagaggatggttataagggacaacatatttgttacacatttggcatagtaagtacttcataaatgacacctataaaagtttttgtttgaaaattttccagcttttgtttttatttatttattttttgagacagtctcactgtgttgcccaggctggagtncagtnnnnnnatctnngctcactgcaacctccgcttcccggggttcaaacagttctctctgcctcagcttcccgagtagccgggattacaggcacctgccgccacacccggctaatatattttttttgtatttttagtagagacggggtttcaccaagttggccaggctggtcttgaactcctgaccttgtgatccacctgcctcngcctcccaaggtgctgggattacaggcatgaggcaccgcgctgggcctttaatgggttctttagagaacattgtaaccgaaacctctgggagnatgaggctgtaacagtgtcaacgtgacatttgtctatcttagacatagaatgacttcaggtatcttttgaattatagttttctaatgtatgtatatatctccatcatgcagggtagttcaaagggttggagataatgtntgaagtccctggcatgtaataaggcaacttaattgtcatcagtgcctctatcatcactaccatccccaccacaccatcatcattatcatcatcaggattagaggcagaagctcatttatatttcagtttctgcctcattgggaaatggagaatcttcaccaatgccatgcttttctgtggttctgcagagggcccatccagagcccacattctttgaggtttaagacatttcactgcaagaaaactggaaagctgttagccatcctgttttgtgtttaaaagaacttcttaacaagaagtaatcccagtgggtaattcccactaaacaagacagaggtggtgcctgtcatcaggaacttacattctggaacaaaatattatcagatagtgtaactgtcctgaaggaaacaagtaagagcttc

SEQ ID NO: 240410 - DNA, 375 bp, Homo sapiens
agaccgattccagcccttcccagggtgcacgcatcaggcatcctcttcttcaccagggctggggattctgttcctctacgggacagtcagaaatcagtattttcagagcagaactcctttctattctgaaaatccttcagaggaactccttcatttgcccccaacccctacacacacacacacacacacacgcacatgcatacacacacaggctctttaaaggctgaaaagggagccgagtgtggaattcagggaagtgatgacacacacaacaatgctgttacacctggctgctgcagggctgagcagcggaaatgcctgtgagaagaagaaagaaagacagagagacgcagagagccagcctgggtggtcaaa

SEQ ID NO: 240411 - DNA, 391 bp, Homo sapiens
gatgaagcaggtccagtggaatctcattcaaatgctaaggtgagtggagataactcacagaggaatcaaaagacaggctatccagttacataaagttacaaaggggtcatagttcaacctgatgggcatccaaatttatgtaatatcaaccacactctaaagatattctacttttgtggagttaaatcctgtatcacttgcaaaagtatcccaaattcatgtgacttaataacataagcaagtaatgggcataacttaaggcgtaagatctatttgagcaagaactgaagggttcagcaagccatacatacaacaccaccctctagtttttctttctgagttagccttcactcagccaaatgattcaaaacattgtgtcaagtaggaagcc

SEQ ID NO: 240412 - DNA, 528 bp, Homo sapiens
tttgtgcgtggagtgtgtagtgagtacactttttgaaaatcctgggtcctctccaggaagaattcaaatgtgttgaactttcagtccctggcattgggatggatggggtgttgtcactaattagccaatcagctcagcacatttcaggaatacttccagacagaaccttgaaagatttcaacattgcattgctttgcattgcgcattttgcacaccgtcctcataattataaatttttgaagcagtagcccgtgtggtatagactatgatgtgagaattattagaatgcttttgaaagtgtgattaccctttaacctggtagtagaacagtgcacttttaaattttctgaagtccaaccacttgtctttggatagtaggattcttatgctcagaaagtgtcaactagccaattattcttatgaacaaacctctttagatctgtaagagataactcacatagctcagatggtctcagctccagtgcttgctttttatattttgaaaataaaagagtttctttttactat

SEQ ID NO: 240413 - DNA, 429 bp, Homo sapiens
ttaatttgtttaatgaatagttatcagacacctgccatgtgccaggcactgtgctgggtcctgggaatagagctgtgactaagtcacgtggaatttctgtgtttatggcatttacagtctagtgaaggaaccaagtgataaaggagaaacaaaaaagtatgacaagtgccatggggacctgaatggtgtgcatgctgggagggggtgggcttgatggcattctggggttcttcaggaagaaacatttaaactaagatctaaaggatccaaaggaagcattaactagatacaaaatatagctgtgtggcctagcgcggtggctcacgcttataatcccagcactttgggaggctgatgtgggaaaatagcttgagcccaggagttcaatatcagctaggacaacatagcaagatcccatctcaacaaaag

SEQ ID NO: 240414 - DNA, 440 bp, Homo sapiens
ccgagcagggtcattagggccctatgagatttccttccgactccgctctgaactcactctcgtaggcccaagctgggcgcctcccccagggaacaccgtagtggcccggaaaacagagagcacaggttacatttggctcacattcttggtgtgtccactgtaggttgctgtgaagtaaattttaaatttttatataaaaacaaacagataatttcttgagtgggacataaaagcatgaatttgaaagttaaaatgtaagatattgaccttttacttaataataatgtaacaatattgctttattaactgtgacaaatgtaccattgtaaaataagataatcataatgaaaactgggtgtggagtgtgcaggaactctgtattatctttgtaataatatggtaaatctaaaattgttctaaaataaaaatttttctcttta

SEQ ID NO: 240415 - DNA, 358 bp, Homo sapiens
ccacacaagaaagaggattatcggggaacctgatgcaagcccaaaattttgtcagtctcaggtgggatctttaaatccgttaagttgcaatgtgtatagagcaatctgtttaacaggaaaataatatggaaaaggtgggtatttcacagaacagcagcacttcacagaagtacactaaggccggccgggtgtggcagctcatgcctgtaatcccagcactttgggaggccaaggcaggtggatcacctgaggtcaggggttcaagaccagcctgaccaacatggtgaaaccctgtctctactaaaaatacaaaaattagccaagtgtggtggtgcagacctgtaatcccaactcctca

SEQ ID NO: 240416 - DNA, 501 bp, Homo sapiens
atgttgaaatgttctgactcttctctaatacaacaatagtaaagtgaattcaacagcctactgctcactttaaaacaccggggtacctctgtgcttcccagatattatcgtttcccatggcaggttctaaactggtagtctgaagcctagctctggtctgcagacatgttttatttggactccacagtatttttacaaactttgagccaaaatgtaaaaatagggagatttcacaccaaaaaaatcagagtcacttcactttaatgagaatatgtgacaagactagactctcgtgtggcatggatccttcttcgtatgacagtgagcagctggaactggctagtgactaccctaagatgccacagtttccaccgttccctaccattgacctgactttggggctgagttttcatttactgatcttggggccagttttcatttactgatctttgtacttgctatgttatttatctcaaagtaaagaaatatttatctggccca

SEQ ID NO: 240417 - DNA, 579 bp, Homo sapiens
gcctgggaggcggaggttgcagtaagccaagatcacaccactgcactccagcctgggcaacagagcgagactctgtctcagaaaaacatgtggttcctctctttgacaagttccaaatctattgatgtaattgatgtatagatacatcagtaaatcacagatgtattttcaaagttctgaaatgtaactagagatttgtttatttttgagatgaagtcttgctctgtcacccaggctggagtgcagtggcatgattatagctcactgtagcctcaacctcctgggctcaagtgatcctcccacctcacccttccgagtagctcgcactataggcacttgccaccatgcctgggtaatttttttagaaactttttgtagagcaggagtttcaagaccagcctggccaacatggtgaaaccccgtctctactaaaaatacaaaaattagctgggcatggtggcgggcgcctgtaatcccagctactcaggagaatcgcttgaacctggggggtggaggttgcagtgagccgaggtcacgtcactgcactccagcctgggtgacagagcgagactccatccc

SEQ ID NO: 240418 - DNA, 711 bp, Homo sapiens
gcctgggaggcggaggttgcagtaagccaagatcacaccactgcactccagcctgggcaacagagcgagactctgtctcagaaaaacatgtggttcctctctttgacaagttccaaatctattgatgtaattgatgtatagatacatcagtaaatcacagatgtattttcaaagttctgaaatgtaactagagatttgtttatttttgagatgaagtcttgctctgtcacccaggctggagtgcagtggcatgattatagctcactgtagcctcaacctcctgggctcaagtgatcctcccacctcacccttccgagtagctcgcactataggcacttgccaccatgcctgggtaatttttttagaaactttttgtagagcaggagtgtccctatcttgcctagactggtcttgaactcctggcctcaagcaatcctcctgtctgggcctcccaacgtgcagggattacaggtgtgagccactgtgcccagtcagaggtttcgacatgagcagttattcagaaagggacctggaagaatattttgaaatcagacctagagtcaaatcagacttatttaagagaattaaccaatggagcctgaatttggcttctcccatttcctaccactgatcccctggccatgaggacagtcctgcaggaaattcctgtgccaggtgggctagcccaggacacatggctttggagactag

SEQ ID NO: 240419 - DNA, 475 bp, Homo sapiens
attgttgaccaaaatgagatatttcttcatagatctttcatgcttctgcatatcttactgtatgtgcctggaatgcaagtcccagacaactctttacctggttcatttctcaggtctgaattcccagtgagcaaccttgaggaataaggtaacatctccctctgggacaaagagcaagcttgcttcctcctaactataaaagtgatgaattcccaaagctcagtactcttcagctgtaatacaaactcagtgcagatgcagtgtttatttgaatccatattgctttctccctttgggactttcagggaaccaaactgatacaaacatgctcatttacctggtactgcctatgctgtgaatatttataatcatttgtctctgaacttggagccttttgtcttcttccagcatctatgatactaacagcataacttattaacttgtaaagaggctaaaatataatatcagacctgga

SEQ ID NO: 240420 - DNA, 412 bp, Homo sapiens
ttttcttctaattctagttgaatattttcattaagaaaggatgttgtattttgtcagtgcttttcctgcaccaattgagatgatcatgtggtttctgtcctttattaatatggtgtgttgggccgggcgcggtggctcacacctgtaatcccagcactttgggaggccgaggtgggcggatcacaaggtcaggagtttgagaccggcctgaccaacatagtgaaaccccgtctctactaaaaaaaaaataccaaaaaattagccagacgtggtggtgcgtgcctgtagtcccagctactcaggaggctgaggcagtagaattgtttgaacccgggaggtggatgttgcagtgagccgagatcgtaccactgcactccagcttgggcaaaagagtgagactttgtctcagaaa

SEQ ID NO: 240421 - DNA, 663 bp, Homo sapiens
catacatattaattacatacttcatgagcaacaggtctttgagtataggataactgattatgtttttacagcaaaaacctttaaattttttcttcttctgtacttatatttactccttgttatgcctagtacagtgtggaccacaggtaagcactcaataaaatgtctgagtaaatgaatagtactaatataagaatatactgagaaaagagataaaagactatcaaacaatgatagaaaagattgttaggaggaagatagcaattgattagtagttgccaaaagtcgttcaatagtgttcccacatcaacaaaagaggacaaacacagacaaagatcaatttttcttttgccgtgcatttctaaagcaaactcccacatcactttctccctctaacttagtaaaagcagaagggcatttttgccccactcctggacaaggtaaattagcatcattacctattcacttcccctctctgcctccactgcccaacagtgacattatcatacacaaaaggaatgtgtggaaagacacatcaagaaatacaattgacttcaatctacattaaaacacattttaccccttgggtctcatatagcaatatattgaacttcctttgccaatttcctcttatttgcaaagcactatctctacaactacatt

SEQ ID NO: 240422 - DNA, 465 bp, Homo sapiens
tcttatattttcaaggcttgaggcataatctttcagtatagtccataagcactgtttataatctgacagtgttaatactgttttgagtataaatattttgctgaaatgacttgacaaaataaaaacgtattaactttcttttaaatctgccaaattacatattcatatagccaagtgggggaggggactctaacaggccttaattcctgaaaggaagacattaaatatacttaagttttcctggttgtgaagcccctatcatttacactcaaatgataataagaaatgtagtttgggccgggcatggtaactcacacctgtaatcccagcactttaggactctgaggcgggtggaccacttaaggtcaggggttcaagatcagcctggccaaaatggtagaggttttaccatttctactaaaaatatactccagcctgggtgacagaaggagactctgtattaaa

SEQ ID NO: 240423 - DNA, 202 bp, Homo sapiens
atgtggaaaaagacacacggaaacaaattggggagacaggaacacttttgtaatcagaatcatctgtcaaaggaaccctgctgcgtggtggctcacgcctgtaatcccagcactttgggaggttgagtgagtggatcacctgaggtcaggagttcaagatcagcctggccaacatggcgaaaccccatctctactaaaaata

SEQ ID NO: 240424 - DNA, 457 bp, Homo sapiens
tcattttagaatagctttctaaagtccatggagctccctaatgccccacatggcttcccccattgccaacatggttcattaggatggcacctttgaactgactggagcgatgaactgactggatatattgccgtgatctaaggcccataccttattgaggcctccttagtgtttacacaatgccctcctcttccttcctccccatccaagacaccacattgccttgagttgtcacgtctccctaggatcctcttggtgacaatttctcagattttacttgtttgggattacctgagaatgtacattttaggtggtgctcatgctgctggtcttgggaggacattttatggatggctgattgagctgacgggcagagtcctgcaatctgcagaggtctggaaaggtcccttcccaaataggctggattcatttattaaagactacttttgtaagaaaa

SEQ ID NO: 240425 - DNA, 335 bp, Homo sapiens
ggacatactggggttattcagttatttaaaaaattatttgaccaggcgcgggtggctcacacctgtaatctcaacacattgggaggctgaggtgggcagatcacctgaagttaggagttcgagaccagcctcgctaacatggcaaaaccccatctctactgaaaatataaagattagccgagcgtggtggtgcactcctgtaatcccagctacttgggaggctgaggcaggagaattgcttgaacccaggaggcagaggttgcagtgagctgagatcacaccactgtgctctagcctaggtgacagagtgagactccttttcaaaaaaataaaat

SEQ ID NO: 240426 - DNA, 555 bp, Homo sapiens
ttacaggggtatctgggagacacagctgtgcccaccacagatgccctcggtttactgaggatttttaaatgattttttaatgaggactttgtgtctttgtatgtatgacaatcttcaaaaagtaacatgaaaatctggggccatctggatggcttccttatatcaagtatcacctaagattttcatttcatttgtattccaatcaggttgtccatctgtggcactatattaattgttgccaaataacgagaaactatcacaagcagagttaatacatatatgatgagtttgtacaaatcaaatgcaaaaagaaatcctacaggaagtgtataaagggtaggttcacagtagtttgaataaagtggcaagagctgagtcactgtgtgactcatagtgagaaaggcctattgaacataaaggaagatgcattttagcaggtagaaccatgctcagggttttagtggtgatttattttttcaataaaatattatccttaccattaaattaatttaaattctgttgggtaacttttctgtatttaacttataaatttgt

SEQ ID NO: 240427 - DNA, 406 bp, Homo sapiens
gcagttttgtgtcaccctaatcttacaaaaccaaggagatttagatctctaatacagaggtttgagatttagctctttaacttcctaccccatactgcttgaaaatctggcagtgtcttggcctggcgcagtggctcacacctgtaatcccagcactttgggaggccaaggcaggcggatcacctgaggtgaggagttcagtattagcctgaccaacatggtgaaaccccatctctacttaaatacaaaaaattagctgggcatggtggtatgcactactaatcccagttactcgagaggctgaggcaggagaatcgcttgaacccaggaggtggaggttgcagtgagccgagatcgcaccattgcactccagactggggaataagagcgagacttcgtttcaaaa

SEQ ID NO: 240428 - DNA, 287 bp, Homo sapiens
caagagaaataatagtttaatgcagtattataaaaaatcaaaatcaatgcaaaagtccataatgaacacactatcagaaatttaaacaaagacatgatgagtatggaaccatgtaagatggatttgggctaaatatatctaagttaaatttctttactttgacagttgttacttgtgaggcctcagaaaatttatattctccaaatctctgttttgtcatttgcataatggaactattattttctgtgggttatttaaaagagtaaataaaataaggcataaactac

SEQ ID NO: 240429 - DNA, 314 bp, Homo sapiens
ttgtttctttccattgggttggtatagaaaatatgctcagataatataatttcattgatgtgatttattgcagtattgatggttttattacagtatttatggacttgataaaaaagtatataatgtaatttttgtcaaaatcttagaaagttttaaagtcaattatattaatacatttaaggccattaattatacttaaaaggattgagcatgctaaattaaattttaaagaactataatacatttgtataatcttaaagtaataattacattcaatttcaatccagcaataaaatattgagtgcctatcatca

SEQ ID NO: 240430 - DNA, 326 bp, Homo sapiens
aatttacagatgtcaaataataggctaatttgtcataatgttctagtttaagataattcctaggctggtctcaaaactcctgacttcaagtgatctgcccacctcagcctcccaaagtgctgggagtacagggatgagccactgagccgagccaattttgcttgttttaaagggttgtttttttttttttttttttgatagtcagtaattgttcaaactaggaattgtatccccatctttcttttttcataattactcaggtaattgatgagtgtaacagaagctcctcaaaacagttttattaaattgcctttcattttttgtgg

SEQ ID NO: 240431 - DNA, 386 bp, Homo sapiens
attttccctgctggggcttaaaatcaatcagttctccaaggaatcttgacttctttaattggagaattgtatttaggaactatgttcttggtgccaggtgtgctcaatgctattgtggtgtcactgcttctactcacagaagagacacatgtataatcacacatgcttatacacagacatgtacttattccaccttttctgtatttttatacataaaatgagtacatattgataccactgactccaatctagcaccacaccatttattctagcctgtccactttttatttataatgtctctctctaacaactgtttttgaatgtttaactcatacctttatgagaaatttatcaacatacaacatatgtatggcatcctttttgtc

SEQ ID NO: 240432 - DNA, 435 bp, Homo sapiens
gatagtcacaggtcactaaagcacagataaatggcagagagaagtaggaaagaggaaaggggacaggaaagggacctatgtgtattgagcactaatatgtgccacatgtttaacagcctttattttagttaattgtctcctctctcccacctagagaagtaggccccatcatccttattttacagatgaggaaactgaggctgggagaggtcaattaacttgcccagagtcatgtggctggttggtggctaagttgggacttcttgagctctggtctcctgatccttccttccttccttccttcttttcttccttccttccttctttccttccttccttcggcagagcgtccctctgtcactcaggctgggattgcacccctgcattccagcctggcgacagagtgagactctatctcaaaaaaaaaccaaaaaa

SEQ ID NO: 240433 - DNA, 493 bp, Homo sapiens
gctcatttcagttcaagaactatcaccctttataaacaggaaattatttatggattgtagaaaaaccctgccagatcttacacataaaatcattttatttcaggagataaacctaattttcctctttccttcaaaagtaagaaaatagaatgtcctcaatgatggtcttctgggaaagtttataactgcaagtcacagcaggccaaatgaggatgattctctctccagtttagtcagaggtcagatggatgggatgacttttgtatggtactctcattctgccctgttggctggagtgaaagaattctttaagggacagaggattctatagtgttgattttcttcatttccttccttccttcttttcttccttccttccttctttccttccttccttcggcagagcgtccctctgtcactcaggctgggattgcacccctgcattccagcctggcgacagagtgagactctatctcaaaaaaaaaccaaaaaa

SEQ ID NO: 240434 - DNA, 735 bp, Homo sapiens
actggcagagaccataagtcctggattgcttgggacacttccactttattctgtggttatatgtaattattaacagcatccccttttactctcaaaatgatccagtatggatgataaatatgatcaccctatgagttggccaaagagcagcttatcataattttgatgagaagtttttaagcagcagccataagttggaatttaagtgttaagtttaaactttaggaaaaactgaaatctaaacatgtgttttgacataatgcagaatataatatggatttttgtgtatcagtgttttattaaccccgatttaattgttcttgcattagagcaagatacatttttctaattggagttttaagcttggacttactaattcataagccataaacatgaatattattattttttaatttaaaaagtatttatttttcagttttattgtggcataactggcaaataaaaatgacatatattcaaggtgaaataatcctttccaacagttttgcaacctggatggggaagggaaattgtaagggttgttatttctgcaaaatcccgcgtacattatggcaaaatcagtgtattttttaaccatttgggcaattatctgcataatccttattaatcacaagaaaagaccccgaattggtcaagtttttttccagttcctaacaaaagcaatttttaaaaaatcgtgaattcaacggagaaggttgatacccctcttaaggc

SEQ ID NO: 240435 - DNA, 424 bp, Homo sapiens
atgagatcatgtaggcagctgctggaaatagagcttgctctgttaaataatgtagcagacagtacaggctagcaccaggcacagcaaatacagcaatgcagcaatgcagaaggcagaccttgtctaaactcctagtattgatggattctgcagacagactgcagaagggtgtggcttcttgcctcagctgcagtacagatgtccggattataatatcaagtcctattcagaggaaactttcatctttatttaaaagggaagaaagcagtaaaattaatcccaattaagtcataattggatttacttcattttacaaaatttgtgctttgaatactgaatactttttaaatatgaaaaatcttctattcaagcatggtagtaggcacaatgggctggtaccacgtgctgaacagggccaaggcga

SEQ ID NO: 240436 - DNA, 938 bp, Homo sapiens
attgtcattgtgaaccatcaccctaatgcattgcatgcccaattatatttcataataaaaaccttgattcctctctctctgctcctcagttaacacctagaaaattctgcactgtgtctctcatatctgttatctatcttctcttttgctttctcacttctgcttgctactccatttcttcattcacaacaaagaaagaaatgcagtgatagttctcttcctcccaaaacctccgctagaaaacattggccatctcaaggtaaacagcaatgggagggcctctcgtgatggccgggaatgatatgcattaccagaaaagcatgagctactactgctcttcactttccttctgccatccatctgcagtgcttccctaaagggggtcatggattcatattctcccataaattttccagtatgggtctgctatgaaccaattcagatcttcaggaagagtaaaggtgaacagaaatatgtttccttctccttgtattttgaaggccagtcttatttcaattagaaaataatgctggaaaagttactttgagaagaagggcaattgacctggattatgagtgacagaatatttttccttggaaacatatattttttcttaagtataactctaacatttggtcttaaaaactttttgaaggccgggtgcggtggctcacgcctgcaatcccagcactttgggaggcccaggagggtggatcatgagatcaggagattgagaccatcctggccaacatggtgaaactccatctctactaaaatacaaaaaaattagccgggcgtggtggtgcgcacctgtggtcccagctactcaagaggctgaggcaggggaatcgcttgaacccgggcagtggagattgcagtgagccaagatcgtgccactgcactccagcctggcgacagagtgagactccgtctcaaaa

SEQ ID NO: 240437 - DNA, 745 bp, Homo sapiens
ctctcgttgcccaggctggtgtgcagtggcacaattttggctcactgcaacctctgcctcccgggttcaagcaattctcctgcctcagcctcccgagtagctgggattacaggcgtgagccaccactcccagctatttttttgtatttagtagagatggggtttcaccatgttggtcaggttggtctcgaactactgacctcaggtgatccacccgcttcggcctcccaaagtgctgggatgctcctcttttacagacagagaaactgaggcctcctgacccccaaagcacccttcttccggtcacattttcatttgcaaacctattcccacatagaagaaagaagctgagggcttttaaaatatgtagtaaaaagagacatcaaagaagaaagaagaccagagacagaagaaatatacatagaaaaaaatatgtgtaaagtgcagggcttacttttgctgtgaaagagaaataattacagaagggcaaagtagatgttctaagtaagacttttttttttaaagagagaaaagtctggaacacatgctcaaactcaaagtagaaatcttacaaattcctattgcaaaataactcctggtcagccaaccacaatctctataaatatatcacaagatcaacagcccaggaaaatagggggagggggagaacaactgcatgaatttttttcaaaatcaaaatagtatacgcaaaatagttcctctcacagctggaaaggaaggaatca

SEQ ID NO: 240438 - DNA, 447 bp, Homo sapiens
  misc_feature (129)..(129): n is a, c, g, or t
  misc_feature (180)..(180): n is a, c, g, or t
acctctaggcaggagtccctccctcccgtgtgaccattgtcaaggccttgaccgtcttctgcctctggagtttcctgccccacctcaccaatgtggccagagagatctcccaaagtgcagctctgaccntcatgcccctaattcaaaaataactgatgggctgggcacggtggctgacancctgtaatcccagcaatttgagaggccagggcaggtggatcaccagaggtcaggagttcgagaccagcctggccaacatagtgaaacccccatctctactaaaaatacaaaaaattagcttggcatcgtggtgcgtgcctgtaatcccagctacttgggaggctgagacaggagaattgcttgaacccaggagatggaggttgcagtgagtcgagattgcgccactgcagtctagcctgggtgacagagtgagactccgtctttaat

SEQ ID NO: 240439 - DNA, 892 bp, Homo sapiens
tcttgttgccctggctggagtgcaatggcacaatggcgcgatctcggctcaccgcaacctccgcctcctgggttcaagcgattctcctgcctcagcctcccaagtagctgggattacaggcacccgccaccaccatgcctggctaatttttgtatttttagtagagacggggtttcatcatgttggccaggctggtctcaaactcctgacctcaggtgatgccccctgcctcggcctcccaaagtgttgggattacaggcgtgagccaccacacccggcccggggctcccttctcagacatgtgaaatgcaggtgggacaggttggagacaagaagacatccagctacacagcactcagcttgagtgagtgtggcgtggggctcaggaggcagctggagctccaggctggagggatccaggcaccatcagcagggagatggcagctggcatcaaggagggcatgcagtgcatggggccaaccatgctggggatacagagctctctaagaactcgcaggcctctctccaggagcaggcacccctcccacccacccgctatttcaggagtgaatgtggaagatgtcctatgcacgagcagcagaggtggaggctgacctacgaggctgaatgaacgaaaggagtgagaccaacactactaggacgccccactggactcagacgagatgaggctggagacacagccactggatgagcagtcctgggcacaggtgaggccacagtgggactgcagaggttaagtgaatgccctgaggaactgggtcagtggctttttagatggagatgatggctcagcaaagggagagagcaaagaagcaggcagacagaggcaggcaactgtgcatgctcacaccaggaacatggtttacagaag

SEQ ID NO: 240440 - DNA, 671 bp, Homo sapiens
ttttctcataatcttttatcttccctgccaccacataaatagaagtccttggtacatgaatccacgagatacatgagactcagagaaatgccagcaaattggagcaatatcaaattggaacacagctccatagagtagaattgactgttttggttgtttggcatatcagaaatctaagggaactaataaatcaagcccaccaaaattttattctgcttcaatatagtcataaccgtgtattctaggccaaggcccacaataattgggctgtatctgtgccaaaatagtcttataacaatttaatttaaggttctgtggctgccactcatctttaaatccatgagtctgtccctagacctttttcaaaagttgattaatttgtgttttttgagagaaaacattaccactgtgactgaactgatgtgtatcagagtcagataagtgggcagcgcagagcacaaacatctcagacattcccacacagaatttttagggaacaattactagtggctgtctgtgttactgtggagccttaaaatatatggcaaaccaatgcacatgcacaaaagtgaaacctggaaatatcacaggtatccaaccatgagaatttccgtatctggtcaagatggagtaatagggcccaaatttaccctcctgccttgaaacagcca

SEQ ID NO: 240441 - DNA, 503 bp, Homo sapiens
ttacgaaaatgactttaataaaaattacatgcctatgtatttttcctttatgtattataatattcgactatatgtgcatcttaagtgcattgatttcgtgcttttccatcttcataatatgatttctgcctaattattgctgtatactagtttgttatttgcaaagaaaagctatatctactctaggaaaatcataaacattatttagtttgttaaatgttaattatgggggtcatctgaggagttttctagggctgatttatttacagatcatgcattagattactgagtgtgtgtgtgtattgtcttcctaagtttgactttggttatgtgcagtgctctttggcattggttatatgcagtactggagactgttttcttatcagtatctctgacctgacccttttgagctatgttgtatcattccattttgacaccttttatcaagctttaatgaaatgacccaggcaaacaaattgtcattaaactttccatcacttcgt

SEQ ID NO: 240442 - DNA, 412 bp, Homo sapiens
aatttcacctttttaaaccgaagaaacatttgttcatacgtaatagcttgaggtttctgtgcccaactcacgtgacaaaatggctttagaaaaatattttttagcagtaattttatagtaatttcaataatatatggtaacagaaagcttgtcagttagaatctttagcttttcttgccagcttctacccaattcttccccctcaacccccgacgcttgtttttagtggtaacattgctaccaccgtctctacaaagttaggataactaatatttgaaagtggagttgttttcaacaaactttagtatttctgcccaagatgaacaagtataatgatggggatactttacttctctcataacagagcttgcagtgctcaatattaaagaataaaattacagacctttaccaa

SEQ ID NO: 240443 - DNA, 379 bp, Homo sapiens
ccgtaccaccacccaacactgcggtgggggtgcgggagccgtccgagcgcgtcctgcaccgcgaggagagccgggcctccctagctctcgcaagcccaggaacacagtccgagtcctacaactccgaggtctgactgggaagcaggggccgctgcccgacaattacccttttccgccgcccctattccggtgcccccctctgggaagttccgaatggttcagaccgcaccagctggggatgctgggggaaaccatttcattaagcgcgggagtatgctgaaacttaaaaatcattttaaaaagagatttgagggtaaatatagccaacctaaggcttcctgtccacataaaagagaaaaataaagaaaaaacgttataa

SEQ ID NO: 240444 - DNA, 537 bp, Homo sapiens
ccaaatgatagttattgccaactcagagagttctgttttctactttgtgacaccccttcttcatcagaaattctttatatgatatatttgtaaatgcaatacctgtgtcactcaaggtacaaatgagtacatgctttattggactttttagtgagtccatgtttacctaagcattgctgagtggaatggaacatcgaggggtagaaggccaggtctctgctgcagagacctgacagtcaaagaatgccgagtctagtgtttgaaagcagatggtggccatgtgaatcctggttctacctctttctacctgtgtgaaccccgggtaaggtggtgagctcaatttccttccttttctcatatgtaacatcaataatacttccccacaggcatggtaagatgactaagtaagatagtacatacaaattctcacaagagtgcctgccactctgtgagtttggcaaaggtgaggtgtatttatttagaaactactgtgccgcctcaccattttgattaaaaaaataaattggttttgtcttt

SEQ ID NO: 240445 - DNA, 376 bp, Homo sapiens
acatagagtaaaatccacttaatgtggctgacagagtcttacacggtgtgcttttcatccaccactttgggccatagatcgggtgattgggggaagacctgaggtatctgagcagaaatctggttggggagtgagccaacagttatctggagggaaactggttcaggcagagggaagagcaaatccaaagctcctaaagcaaaagcatatttttggtgtatttgagaaacagcaagaaggtcaatgtagctaagagccggaataagagaagagatgcaggcaggagaatcacttgaacctgggaggcggaggttgcagagtcgagatcatgccattgccctccagcctgggcgactgagtgagactccatcttaaa

SEQ ID NO: 240446 - DNA, 664 bp, Homo sapiens
acatagagtaaaatccacttaatgtggctgacagagtcttacacggtgtgcttttcatccaccactttgggccatagatcgggtgattgggggaagacctgaggtatctgagcagaaatctggttggggagtgagccaacagttatctggagggaaactggttcaggcagagggaagagcaaatccaaagctcctaaagcaaaagcatatttttggtgtatttgagaaacagcaagaaggtcaatgtagctaagagccggaataagagaagagatgcaggcagggatgagattgtttttggcttcttaggtcatggtaagaacttggattttattttttgtgtaatgggcacccatcagatggtgttgaggaggggactgacacaaaatcatttaggtattaaactgatccttccgctgctccatggggacccagagtggaagtagtagcaggaaaccaattaggcttttacaatagttcaggtaagagatgacagtgacttggactagggtgtagtagctatggagatggttgaaaatggctagatgtgggatctattttaaaggtaccaccaacagcatttgcagactcaaggatgatttcaaagttttgggtctgagcaactaggtgaatgataacattgtttactgagacggggaggcct

SEQ ID NO: 240447 - DNA, 724 bp, Homo sapiens
cttgaacttctggattcaagtgatccgccctcctcggcctcccaaagtgctgggactacaggcttgagccacctcgcccagctgaaagtgacactttaatactttcaggaaattataggagatgattgttaagagctcaggataaagagaagtttctggccgggaacggtggctcacacctgtaatcccagcactttcagtggcggagcacctgtggccaagagtttgagaccagcctggccaacatggtgaaaccccatctctactaaaaatacaaaaattgaggtgccgctgttgctgctcgtgttaaatctagaaccgtagccagacatgggactggaggacgagaattagtggatcccctaacaacagtgagagagcaatgcgagcagttggagaaatgtgtaaaggcccgggagcggctagagctctatgatgagcatgtatcctctcgatcacatacagaagaggattgcacggaggagctctttgacttcttgcatgcaaaggaccattgcgtggcccacaaactctttaacaacttgaaataaatgtgtggacttaattcaccccagccttcatcatctgggcatcagaatatttccttatggtttcggatgtaccatttgtttcttatttgtgtaactgtaagttcacatgaacctcgtgggttttggcttaggctggtagcttctatgtaattcgcagtgattccatctaaata

SEQ ID NO: 240448 - DNA, 2230 bp, Homo sapiens
ggcggggagggggcagtccacgaacttttgtcattcagcctgggagaccacggtgacattcctgtctgcgctgcgggcaggccagcctctccggccctggactagggggcgccgccgagagaagccgccgcaggctgcagagtcgccgaccgcgctgttcgcaggcagaccccgggctgcccaccgcggcctagcgcgcgccggatggcaggagaagtgtccgcggccacgggccgcttttcgctggagcggttgggcctcccgggcctggccctcgccgcggccctgctgctcctggccctctgcttgcttgtccggcgcaccaggagacccggtgagcctccattgataaaaggttggcttccttatcttggagtggtcctgaacttacgaaaagaccccttaaggttcatgaaaacacttcaaaagcaacatggtgacactttcacagttcttcttggtggaaagtacataacatttatcctggaccccttccagtaccagctagtgataaaaaatcataaacaattaagctttcgagtattttctaataaattattagagaaagcatttagcatcagtcagttgcaaaaaaatcatgacatgaatgatgagcttcacctctgctatcaatttttgcaaggcaaatctttggacatactcttggaaagcatgatgcagaatctaaaacaagtttttgaaccccagctgttaaaaaccacaagttgggacacggcagaactgtatccattctgcagctcaataatatttgagatcacatttacaactatatatggaaaagttattgtttgtgacaacaacaaatttattagtgagctaagagatgattttttaaaatttgatgacaagtttgcatatttagtatccaacatacccattgagcttctaggaaatgtcaagtctattagagagaaaattataaaatgcttctcatcagaaaagttagccaagatgcaaggatggtcagaagtttttcaaagcaggcaagatgtcctggagaaatattatgtgcacgaggaccttgaaataggagcacatcatttaggctttctctgggcctctgtggcaaacactattccaactatgttctgggcaatgtattatcttctgcggcacccagaagctatggcagcagtgcgtgacgaaattgaccgtttgctgcagtcaacaggtcaaaagaaagggtctggatttcccatccacctcaccagagaacaattggacagcctaatctgcctagaaagcagcatttttgaagctttacgactgtcctcatattcaaccaccattcgttttgttgaggaggatttgactctcagttcagagaccggggactactgtgtgcgaaagggagacttggtagccatctttcctccagtcctacatggtgaccctgaaatctttgaagctccagaggagtttagatatgatcgttttatagaagatggtaagaagaaaaccacctttttcaaaagagggaaaaagctgaagtgttacctaatgccgtttggaactggaaccagcaaatgtccaggccgattttttgcacttatggaaataaaacaattgttggttatacttttaacttattttgatttagaaataattgatgataagcccataggactaaactacagccgcttgttgtttggtattcagtatccagattctgatgttttatttagatacaaagtgaaatcttagagaagctaaaaggaaagaaaataaatctatcaaaattaccctaaacatcctaagctcatctatttctttttaatttctgcaaagtaattgatttatttgtttaaaaagcgctaatttctatttgatctgatatcagtccagtttgtccttagtcacaaagcccatataatataaaacaggatggtggcaggaaaatggacatcaaaatcaacttaagggtaggctcaaaacagggttgttgttgtttttttagtttctccttgttgtgattttcacctgttataataaatgtaccttcacaccaatagattgggcactgtggaatttaaatcactcaaattgttctctaatatgtaaaattacactttgaactactagaaaattgtgctggaaatggacacagtctaacaaattccaaattctcacagaagaaggaaattgaatttccatgagttacactggatgaaaatgtttcccttaagcatatattaataatacctatatc

SEQ ID NO: 240449 - DNA, 233 bp, Homo sapiens
caatgacatgtgacatatactgagaattcttatgagaatgggattaaattgttgtgtcatgtattttttgaagtggcacaatattaatgccaaataactaatgataagttaggacagcgtgtattaagccttgagcaatcactaaaaataaaataaggatagctaaaaagccaagaggaaatgaaaaatacttttaaatatttaattaataaaataataatggaagaacagaa

SEQ ID NO: 240450 - DNA, 293 bp, Homo sapiens
tccccttcccagcgccgcgtactgcggcggccttgtttgattacctgcctttccatttcttctgtatttacaaccctcccgactcccggggagagggcggcataggcagccaatcaggatgcagtcgtctctaaaggtcagggtgacacacatttcccaagatcattcacggacttcgcccttcgatgccttgttctcatgacaaaacctggctgccagcacttaatgtgatttccccccatctctggcaactgagagaataaaaaactgaacataaaaattaactcttttat

SEQ ID NO: 240451 - DNA, 434 bp, Homo sapiens
acatctgcactgaaactcctctacttacaaacattcacagataagaacaaagccatgcactaaaggaaaagtaggccagctccgcctgcttccccacagatggtgagcagcagtcatgcgcatccattttagtcttggccatcacgttagtcattagtgttggcccatgagctgtttaaagaagtgtcttcttaccatgaaaagaagaaagtcaaagtaaaaacatctttggatacatttctgaatcgctgaaaagcaccaagtagagccagaatcaatgccagcacatcaccggtccttttgagaaactcaactttatacagacatgtatactgcagagacttagaaagaaatagacttaaacacagccttttggatatgatgtatttgtacatgaatgatttctaaatttctaacagcaaaaacaacactga

SEQ ID NO: 240452 - DNA, 435 bp, Homo sapiens
gcatgtgtgctttgtgagcagctcttgtattctgtgtgtgaacacatgtgctggatggaagattctcctcacgttctgtgaatgtctacatgaagacctgcctctggtgaatggctctccttactttctatgcgtgtgcattagcacagtgtttggtggagattctcttcacgctgtgtgtgtctatatggacgcaaatgtttgctgaacagtccccctcttgttctcttttttttttgagacagtctcgctctgtcacccaggctggagtgcagtggaatgatctcggctcactgaaacctctccctcctgaattcaagcgattctcctgcttcagcctcccaagtagctggggttacaggcatgtgccaccatgcctggctaatttttgtatttttagtagagacagggtttcaccacattggccaggctggt

SEQ ID NO: 240453 - DNA, 427 bp, Homo sapiens
gtaacctcaatgtgaaatatattgtattgtaattggaaggctgggtcaggagccccaaagctttgaaagaacacctcctgagagtacagtgggaaatcaaccaccagcagatgatggttgagctagaagaaccacgtgtttccacagggagctgcacacgaggacccggtggtccctgacctgccctctccaggggggacctgcactttctgccaccaaagaggattctctgtagggaggccaggatgattctccagaatttaccatgccttgagatgaaatttcctttcaaacttccttgtgtccttttgtcctcattccatgttcaccagtcttctgactgtttcattttccagaaaggagaaactgaataacatgtatattttaaccttgcctgcaattgtaaatcaataaattggtgtattta

SEQ ID NO: 240454 - DNA, 621 bp, Homo sapiens
accctggcagggtgtggtgggtcatgcctgtaatcccagcactatggaaggccaaggtgggcagatcacctcaggtcaggagttggagaccggcctggtcaacattgtaaaaccctgtctctactaaaaatacaaaaaaattagctaggtgtggtggcaggtgcctgtaatgccagctactccagaggctgaggcaggagaatcgcttgaatctgggaggcagaggttgcagtgagctgagaccgcgccactgcactccagcctgggcaacagagtgagactccatcaaaaaaaaaaaaaaaggatgtacacatatatacttctgttacagcaaaatatatttaagaatcttcattttcttcaattagtaaaaacgacaaaaatgtaaggataagaaaacagttaagaaacggtaacaggccgggtgcagtggctcacacaaagtgcttgtaatcccagcactttgggaatctgaggcacgtggatcacttgaggccaggagttccagaccaacctgggcaacatggtgaaagtctgtctctactaaaaatacagaggcacaagaatcccttgaatccgggaggcagaggttactgtgagccaagattgcacactgcagtc

SEQ ID NO: 240455 - DNA, 506 bp, Homo sapiens
agctagtatagccttcacaccatacagactaatctcactgatgaatagaagtatgtaattgttaattattaatgttagcaacttgaatctacaggtgactatgaagtatttttttagtttgaagatagttttttccagaaatccaaggatggcttaatcatatggaataatcaagggcaaagccaagccaagaaggcttgaaagaagaacactagagatatattataatgctctaataattaaaatggtgtggtattaggttatgaatggataaacagaccaatggaacaaaattgcgaagccagatagaaatcaaccagtctgtggatctattaatttatgggaatgtcttttgtgagatatatcaattaatgggaaaaagactgtttaaaacataattcagtgacagttgactgtatggaagaaaacaaaattaaacccttatttcatttccagatggatttaagactcatgtaaaaaagtaaaactttgaaactcagagaaca

SEQ ID NO: 240456 - DNA, 129 bp, Homo sapiens
gtaattacctctttattagcggtcggcggtttgtaaacactcggcccgacgccgggccgcggaacggaagcgcccgcgctgccaaccctctgtcttccacgttaaatccgatttgctccagcagtgaca

SEQ ID NO: 240457 - DNA, 3552 bp, Homo sapiens
aattcggcacgaggcggcgagtaacgagcctgcctactgcccgctgcccgcctgcccggccgctagccggctccgccacttggcgcagcccagcccggaggccggtacccagggagcctcctggccccgcggttctgtgcactcggggagaggaggggtgcccgggacaggattggcaaactccgccctccacttactattttgcttatttttctttgtgcgcgcctgttagtttgttaaaccagatctagtccgagtcttttctcctcccttctcctccctcctcctccccccgccaacaccccctccctgctctttcttcccctcctccctcctatccctctgcaggagactcttgcagtgacggaaagttgcagcccctggtagcgccttgggggtctccccgcagtgtccaaccgccgccacccctttccgactacggcacttcggagatctcctccttcgccggtaccctctctcacttcggccggatcgcctgtgcccagaacgtcccacccatgacgatgctcctggacggaggcccgcagttccctgggctgggagtgggcagcttcggcgcgccgcgccaccacgagatgcccaaccgtgagccggcaggcatggggctgaatcccttcggggactcaacccacgccgccgccgccgccgccgccgccgctgccttcaagctgagccctgccgcggcgcacgatctatcttcaggccagagctcggctttcacgccgcagggttcgggctacgccaacgccctgggccaccatcaccaccaccatcaccatcatcaccacaccagccaggtgcccagctacggtggcgctgcctctgccgccttcaactcaacgcgcgagtttctgttccgccagcgcagctccgggctcagtgaggcggcctcgggtggcgggcagcacgggctcttcgccggctcggcgagcagcctgcatgctccagctggcatccccgagccccctagctacttgctgtttcccgggctgcatgagcagggcgctgggcacccgtctcccacagggcacgtggacaacaaccaggtccacctggggctgcgtggggagctgttcggccgtgctgacccataccgcccagtggccagcccgcgcacggacccatacgcggccggcgctcagtttcctaactacagccccatgaacatgaacatgggagtgaacgtggcggcccaccacgggcccggcgccttcttccgttatatgcggcagcctatcaagcaggagctgtcgtgcaagtggatcgacgaggctcagctgagccggcccaagaagagctgcgaccggaccttcagcaccatgcatgagctggtgacacatgtcaccatggagcatgtggggggcccggagcagaacaaccacgtctgctactgggaggagtgcccccgggagggcaagtctttcaaggcgaagtacaaactggtcaaccacatccgagtgcacacgggcgagaagcccttcccatgccccttcccgggctgcgggaagatctttgcccgttctgagaacctcaagatccacaagaggacccacacaggtgagaaacctttcaaatgtgaatttgaaggctgtgacagacgctttgccaacagcagcgaccgtaagaagcacatgcatgtgcatacctcggacaagccctatatctgcaaagtgtgcgacaagtcctacacgcacccgagctccctgcgcaaacacatgaaggttcatgaatctcaagggtcagattcctcccctgctgccagttcaggctatgaatcttccactccacccgctatagcttctgcaaacagtaaagataccactaaaaccccttctgcagttcaaactagcaccagccacaaccctggacttcctcctaattttaacgaatggtacgtctgaggacaaacacaaaccctgttaattatagaatggaccaaatacatttttaaaagaaaactgagaccaatcagatggaaatggagttttaaggcaagaggccatatatagggctacatcttgttaattgcaattgtccaggaaggttttgggcaagatccaaaagtagccatgcccttttctcaggatagaaaatatgttttggcatttgaagcattttttacaaaatctttacactactttttcttccccttcctcttgctctctgcacaccccattcttaaactcctccaattcattttaacacttgtcctgtttcttgagaggaagttatagaaggcttgttggtggtggtgatgttaaactgatggaaattctttttcgccttagtggtgattgtttaaactctcacagtcttaaaccgtgccaaagtcctgttatgtcttgaacttttcctcaaagcattacacttgtgaatgtatttttgtctaatagggtcgaaactgttgttcagtattttttcaggctgaggatgtgatgttactctacacattgtgacgtttagtatacagttgccttttgtaataactttttttttgtaaatacatatccattgatgccatatttatcgtttgtaatttaattattgctacaagtgccgggaactgaacaatatttatggataaatgttttctaacaaattctgtacagcttttgattataactgctttagcattaaaaattgttttgaaagaagaacacaatttacaattttggaaccactgactcctttctcttgttttgtaacagccttcttctacaaagaggagatgtgagcaaattaaatcttgtttgttggtatttataactcactcagatcccttttttaattgttaaattatttttctattacagtataaattccttacagtgtcagtttccatctgggaagactctcctttctttatctctatctcagatggttgtttaactgcgagtttaaatgtgtttgtcctggattttcggcatgcaaatcaaatattactgatcaattcagttagtggccatgacatctcaatcttgtacttcaaagactgagaagctggatttaatcatccctgccctacatatataaacataaggtaacctactgaattttatgtcccttagttctttattaccttacataaaaatgaaaattgcggcaggatgcatgtctgtctgttctatctagagatcacccatatacctatatatgtttgtatctatgacttatctaatctgcctatcaatctatctagtagctatctatatattttcaaaagatagcttatgtctaaaacagtggtgatgagtaaggccagttgagcattgcttacttatggttaaagtgcttcttaaaagaaccatagtccatttacaattttggaaggcaaaggctgatttgtttgctgtatatagttcaattcataattatcgcaattatccataacatttatatagcggtgtaataactgcagcagttctgaaatgatgctatggggaaaaaattgcaaaatatgtatttttaaagttcatgatttgtaggcaaagatgttaagagcattgtttccattaaaatcaataacaatga

SEQ ID NO: 240458 - DNA, 307 bp, Homo sapiens
tgcctcccaaagtgttgggataataagtgtgagccaccacgcctggcccaatccctgtctttcacctttggccaccatcaggccaaaggttgccggcaggttctcaggagcagcgtctggggacacctccaccagatctccccgcaaccccagaatgcatcccagaagggtcttgcagttgggggctgccctcttgccccttcctcatgtgagcccctcactgtggccatgacacaggcctggctctgctggcccttggcagggtggggactgagccccaactcctggtgcttcctcccagtattat

SEQ ID NO: 240459 - DNA, 615 bp, Homo sapiens
ggggagtgctgactgttcaggttggagatggaaatatagggggtggaagtgaggttttcttggggtcttctgctcctgggtgggatcgcagaactggttgagccagattaccagctaggtggtatcagctgatccatagagtgcagggtctgcaaaatatctcaagccctgatctttggttttacaatagtgatgttatcccgaggaacaatttggagaggttcagactcttgcagccagaggccgcatgactcctaaaccaaaatttctaatcttgtagctaatttgttagtcctacaaacgcagtctggtccccaggcaaaaagtgggtcttttcaggaaaaggttagttcagcctacacccaggaatgaacaaggacagcttaaaggttcgaggcaggatggaatcagttaggtttgatctctttcactgtcataatttcctcagttacaatttttgcgaaggcggtttcaacttcctactgttgctagtcctgaggacatctttttggctcttttaaccttgcccttacctgtttcctgattgataacaggtatatctgtatcataccattagaatggctggcattacaagagatcttccaatagataaat

SEQ ID NO: 240460 - DNA, 460 bp, Homo sapiens
gagacatatattattcttgaattttcagaacctaccaggaggagagggtatatgaaatatctagcagccccactaaagtggggacttctgcctcctctctgcaggtataagatgagcctctgttatgttctcagctgcacaggaacgtgagggcaggagcctgctgctcacctgcccaccatcctgtgagtcagttcaccagtaatccagagctaaactaaggggttaagaggagagtggcctttttaaagtaaaaatcttacttaccttagggccgggtgtggtagctcacacctgtaatctcagcactttgggagccgaggtgggcagatcacttgaggtcaggagtttgagaccagcctggccaacatgatgaaacccatctctactaaaaatacaaaaattagctgggtgtgatggcaggtgactgtaatcccagctacttgggaagctgaggcag

SEQ ID NO: 240461 - DNA, 355 bp, Homo sapiens
tttgcaaagctggtgttaaaaggaagatttttctgaatttgccttggagatgtttttatattttctcctaggttacattttattttccccaaattaaggaagtatacaaatatagtgacttttcctaaccttgagaactttaatatgtgttgctacccgggttgctgaagaaagaatcccttagtcttaacagcctgactctgtacaaactatgtttaattactccccttctatctccactttaggtgggttcttttgcaatgaacagtgtatgtcatttaaagttggcttgctggacctgaagtgtgtcaatgtatgatctcaaataaatgaaagactgatactaaaaaaatgc

SEQ ID NO: 240462 - DNA, 415 bp, Homo sapiens
taaatttaagttccttatctcctgagttatgtgaaaatatccctcagtacaaaacatttgtgtgtttcacagatgactctcttgttttgccgtaatgctaccaagtttatggaaactagtcaactgaaggatttttctgttgtgttatgtgtaaatgtctgaacagtaaaatcatctgtgtattcctgtaacattcacgaagtatgaggaagtgggtttctccttgtttgatgtgagtggttttgcttgttgcatgggttccctgtgctttgtaacttgcatgaacacaaccaggtttctcaacaatgatttgtctgctgactcttttcagagatagtgaaggaaaaaaaatgtattaaaaccccaaattatctaggtttccaagtaggaaaaataaagatacatatgactttta

SEQ ID NO: 240463 - DNA, 628 bp, Homo sapiens
tccagttctaaatccgagcactcttacccattctaattctttcagtaactcagcgaaacggatggggcccttccttccccggagcactcctccagggactgagaatctgcagagccaggctcagcgctcgcctgcagagcctgcggtctgtgggacccgccagcaagatgaggaatcactttcgggaggaagggtcgtgctggggagggtcgcgccggcggggtcaagagaacctcctctagggtgggaatcagagcctccgggccgcggtgtttgagggtgagtggaattaatcccgtgatggacgtggggccttctaagggggaccaggagtttgcgaagaggtgactttgggaggggttcaggatggccagaggtggaggctgtgacctcagtgaggctggatcaagggaggggcaggtggagaagaaaccgttttaacgaggtggctttaagcggatcctaagggccccaggagatttaggaggaaggacaagaggattaagacaccgctttctggtcgggtgcggtggctcacgcctgtaatcccagcactctgggaggccgaggcgggcggatcacgaggtcaggagatggagaccatcctggctaacactgtgaaaccccg

SEQ ID NO: 240464 - DNA, 1331 bp, Homo sapiens
ggttcctaatttggcaattgtgaattccagataacagaagttttcttcccaagttttctttgaagttcctagtttgagatttcacttcaccagtcagttcaccctgttggtcagaatttggttaacttttgccttgccatttctctgacttttaggagtgaaattgtcttctggcagaattagactcccagtagctctccaaataatcaaaatttctgaacactctgccagttttgtactgtgtgtcaggaaacatcattcatactttcttagatagatgagcagtgtgggtattctctcacttctctgtccattttcccctaacctctctcagttctttaccatgatttaccttcaggtttccatcaaggaggactcttaaaatacaagagttgaggtggagattccgtatctctactcctgtttaaaccctatctgttcaaactttggtgattcctatgaagttgtatttattcttgtattaaaaattttaatgcatcttcttatttataatctatatgttaatatttggctatctgaggcacaagttgtatttctgagagtttccaggtactttcttgtgagtttatgggtattttctccacgttcttcttgtagctcttaagttctattgcatttggtttatggttttttaatgcctttttaaaaattctgttgcttatttcagtttgaacccattttcttacgtcaacacatatccttctaaaacctagtttttacagtgagacatgttccattcctgttacagagtccctagactatgaatctgggccaggtctgtacattagctagaactgctctgttgaaatctacttcccaaacccccacatgtgctaccaattcctcattcctcagttctttcattcctggaagcggaaagcttattcagatgtgtcatcctactgtatttaagatattttggataatatcttaaatcttggtcaaaaataaaattcttcatttttaagcatgctttgtagccagctgtttatttctgtgacctcccttttccttctcagtcacagcccttaaggcaatgtcctaacctcctggtgttttgttatctgctctgggttaatcacgtaacagtagtggtggcttctctaaaaagctgaaggttcttattcttttcccttgagattgcacacattcatctgctaaaagataaggggaggaaaaaaactgttaaaatgttatgtgggattagataaactataaatttatttccagttcaaaaattgattttatataatgaatataagagggacctgtgaatttgtgtttaaatactctcacactatacagcttta

SEQ ID NO: 240465 - DNA, 1050 bp, Homo sapiens
catgttgggagagcttctgggtgagggtctgttaatcttggttacattgggtgtgcaatttgtgaaattcattgtgctgtacgctgacagtagattttatgtatcttatacttttagagttaaaaaatgtacttttttttttttgagacagagtctccctttgttatctaggctgcagtgcagtggcacaatctcagctcattgcaacctccgcctcccaggttcaagcagttctcctgcctcaacctcccgagtagctgggattacagatgcccaccaccacgcccggctaatttttctatttttagtagagacggggtttcgccacgttggccaggctgctgtcaaactcctgacctcaggtgatccaccctcctcggcctcccaaagtgctgggattacaggaatgagccaccttgcctagcctaaaaaaaagaaaaaaaaaaaaaaaaaaaaaactttgccctcgtggatctcatctggggtgagactagtgactccaaaatggtatctccagttctacctgaccactgagctccaagagactcacatgccactgccccgcagttatccacctggatgtttgatgggcatctcacattaacaattctacgtagaaatcttgatttttatatctaacttgttctgtccccagttgcactaaataataccgcctacccagctacttaaacctaaaacataagctgattcctctttccctcaccctgctgccattcagttacatagtcctgttgtctcttcttgtacactccaaatatatccacttctatttctgctctgagccaccatcatctccatcgcagacttgtgcaatagcttccaatcggtctcttcagctcttcccttctgacaatctcttttccacacagttgctttagtgatctttaaaatcaaatcaacttacatcattacctgctgaaaacctagtaacttcatatccaagttccttatgtgtgtctacatttaatccctaacacacttcgtattcaccatctagttttcttccccaatcagtctaatgtcagaata

SEQ ID NO: 240466 - DNA, 654 bp, Homo sapiens
  misc_feature (16)..(16): n is a, c, g, or t
ctagtgcgatccccgngctgcaggaattcggcacgaggttccttggtgcactgatgtggtctttgaaactcagaacaaatgttacctgggccgatgttacatgagtatttggccattaaaatcagataaagaggccaacctagcaagttactctcattgaagtgtggcttgtctgccatcctcattgggagcacgtagaacctccccaagctgagtgggcagggtccgtgtggctgtgtgaagggccccgtcgtcttgtgtagctgctcccgtgttgagagtatagcacgttgaaaacagccttggcaggaaccacgcttgctgttaaccagctcgtccactaaccagctgtgtataccctaggtcaggccagctgtttaaaaaaaaaaaaagtgaagatatttgttaagagagtagatctcaagtgccatcatcacacgcacacaaggggtgatgatggcagttgataggtatgttagttagcttgatcatggtgatcattttatgatgtatacatatatcaaaacatcatgttacgatgtatacatatatcaaaacatcatgttacgatgtatacatatatcaaaacatcatgttgtatacctaaatatataccatttttatttgtcagtcatacctcagtaaagcttaaaa

SEQ ID NO: 240467 - DNA, 331 bp, Homo sapiens
tgtctcctggtttttgcttgaaagaatctcagccttgcttggactaaaccatgctccagctgaactttctcattgcttacatccaaacagcaaaagctgctggagaaaagtcagtcatataacaagctaactggttttaattcatgacctcagtcctctcaggagcactcaacactggctggcaatgctattccagtctctgggttaaccattcatacgttcacatctcctcaaatttcacatcctttttccctacctctcatttttagctggtgaccttgcctcaacttcaaaaaataaaaaccacctatgaggaatgcttcaaatcaga

SEQ ID NO: 240468 - DNA, 431 bp, Homo sapiens
ctgggcttgctcacacttgacccagaagcctgagatgtggcatttctgaagtgtccaatttatgaagttgaaaactggggcaagctcatctgtttgtgcaatgttgattgccaacggttaatcaccaagggtaagtggaagaaatcattcctgttcatttgcaaatggaaatcaaatgaggactgtgccgaaatgcatcagcattttcacttccaactgcaaggatttcagaagacagctgaccttgggctgcctggcaggcacgggcctggcgccgatacttctgctcagagtgcctgtgctttttggtgcatgcatcaagtcctgaagtaatagccccacgtatcagatgtgtaatggatttctctccatgctgcgggattcattaccatgatttatggctgttttaatgtacacagccttcttaaaca

SEQ ID NO: 240469 - DNA, 631 bp, Homo sapiens
ctgggcttgctcacacttgacccagaagcctgagatgtggcatttctgaagtgtccaatttatgaagttgaaaactggggcaagctcatctgtttgtgcaatgttgattgccaacggttaatcaccaagggtaagtggaagaaatcattcctgttcatttgcaaatggaaatcaaatgaggactgtgccgaaatgcatcagcattttcacttccaactgcaaggatttcagaagacagctgaccttgggctgcctggcaggcacgggcctggcgccgatacttctgctcagagtgcctgtgctttttggtaaggctcaggacgttccctgccattcctgcccgtttcaaaggcagacccatttagtttggaaagtaggaagcattttcagatgctgtgaattcatgtgcacacaccactgccacttcttgcttttttatggctccgcagagacttgggatgcacttcaccttgctgaaggggctcagctaattatgctgaaatccttccaagaggcgaagtgatgtgtttatacatcctccttgctgaactgttggcctcaagaaattttataataataaagcatttccatgttgggtaggttctctcccctccacccccggaaagtgcaa

SEQ ID NO: 240470 - DNA, 334 bp, Homo sapiens
tccattctccacattccttcatccagtgccttcccacctgttctctttcctattgtgttcccaggacgatgggagccttttaacaccaatggagcaggagatgcactgattcacatgcacccaaatacaacaccaaccccacaagctctcagctcaccagtcacagacatcaccttctacggacatatttttatttcactgagctacaactacgggcaaggcaacgacgagctgtgtggagacttcaaaacatagaggacaacctctgccctcaaagacaacatccaactgaagaaaggatcaagaaagatgaaaataaataagttgtttgatt

SEQ ID NO: 240471 - DNA, 451 bp, Homo sapiens
gcgtcataacaaagcaccgcagaccgggtggcttaaacagcagatatttattttctcacagtgctggagcctgggagtctgagattaggtgtcagcaggtttggtttctcctgaggcctttctccttggcttgcaaacaactgccttttcactgtgtcctcatacggcctctcctcctggcatgggcatccctggtgtgactcctccttttaagggcagtagtcctgttggaccaggaccccaccctaatggcctctttttcatctcatcaccccttaaagactttgtcttcaaatacagtgacattctgacataccgagggatgggacttcaatatatggattttggggggatgcaattcagcccataacacttctcaagggactgacgccccatcccagtgtggggttggtgtttctctgaggatttgcagggaactctatcaggaaag

SEQ ID NO: 240472 - DNA, 486 bp, Homo sapiens
taaggattaattgagcctaaaagtttgacgttgcaatgagctgtaattgtgccactgcactccaccttgtaatctgtagattgcattgagcaggatagacacatttacaatattaactatttcaacctttctacaagagcacaatcaagagtgtgttaatttttatatatttgtgaatttttttagtttttttctcattatttatagtctcattccattttggtcatataaagtaatttatacaattttagttttaaaaaatttggtaagactttttttttggcctaggatgttgtctatgaaggaaaatgttctatgagctattgataaaagtgtgtatcctaaggttattgatgggtgccctctatacctttgttaggaataattgttttatactgccttcaagttgtctgttttcttactaatattctgtcttgttttatttttattacagaaagtgcaatattaaagtatacaataattata

SEQ ID NO: 240473 - DNA, 1020 bp, Homo sapiens
catgggggtagcagggacccaggcactgtgaccatcccccctgccatgtgggaactgcgatcagcctccttttggagggccatattcgctgagttctttgccaccctcttctatgtcttctttgggctggggtcctcactgcgctgggctcctggacccctgcatgttctgcaggtggctatggcatttggcttggccctggctacactggtgcagtctgtgggccacatcagtggagcccacgtcaatcctgcagtcacttttgctttccttgtgggctcccagatgtccctgctccgtgccttctgctatatggcagcccagctcctgggagctgtggctggggccgctgtgctgtatagcgttaccccacctgctgtccgaggaaacctagcactcaacacgttgcaccctgcggtgagcgtgggccaggcaaccacagtggagatcttcctgacgctccagttcgtgctctgcatctttgccacatacgacgagaggcggaatggccaactgggctccgtggccctggccgttggcttctcccttgccctggggcacctctttgggatgtattatactggtgcaggcatgaatcctgcccgctcctttgctcctgccattctcactgggaacttcactaaccactgggtgtactgggtaggcccaatcattggagggggtctgggcagcctcctgtacgactttcttctcttcccccggctcaagagtatttctgagagactgtctgtcctcaagggtgccaaacccgatgtctccaatggacaaccagaggtcacaggggaacctgttgaactgaacacccaggccctgtagaagctccagctgaatagagggagtagaaagcttctgagtttacgtggaggggtttagccagcccctagatgaagaaagagactgtggggaggggcatgtacttctttattttttaacttatgtatgtggttgtttttttttttttttttccttttgctgtgtgaaatctttcaagttgcattc

SEQ ID NO: 240474 - DNA, 736 bp, Homo sapiens
gagtcagaatgccaagcgggcaagagagtcgcgaggtcgctttactacggatagctcacggagctgaaaaactcggattgagtgtactgggtaggacccatgctgggcaccattcttgcaggcctcacctcgaatttctgctctctggtgcttcatgatggagatcttcctgacgctccagttcgtgctctgcatctttgccacatacgacgagaggcggaatggccaactgggctccgtggccctggccgttggcttctcccttgccctggggcacctctttgggatgtattatactggtgcaggcatgaatcctgcccgctcctttgctcctgccattctcactgggaacttcactaaccactgggtgtactgggtaggcccaatcattggagggggtctgggcagcctcctgtacgactttcttctcttcccccggctcaagagtatttctgagagactgtctgtcctcaagggtgccaaacccgatgtctccaatggacaaccagaggtcacaggggaacctgttgaactgaacacccaggccctgtagaagctccagctgaatagagggagtagaaagcttctgagtttacgtggaggggtttagccagcccctagatgaagaaagagactgtggggaggggcatgtacttctttattttttaacttatgtatgtggttgtttttttttttttttttccttttgctgtgtgaaatctttcaagttgcattc

SEQ ID NO: 240475 - DNA, 395 bp, Homo sapiens
gtaccacccaccagctgaccttcagtcgtgtcctctgggaaatgtgcaggagtttcttgatgttgggtgtcagaaggattaaaaatgctgaagaggaaattcggatgcccagcaggtgccagtctgcaggagcctttacgtttggtgcctgctgcttcctagacacacttgactctcttcactcgctcgtgatattcccctcacctgatgtgtctttacctctacttggcaggtgttttagtgctgactctggggacagactcctgggttcagatcctgcttcaacacttacaggctgagttaggcaaactactgaacatctctaaatcgtataataaaatcacaggtaataaccatgcctccttcatggaggaattgtgggaattaaatgagct

SEQ ID NO: 240476 - DNA, 547 bp, Homo sapiens
attatatggttttatgtattttcaatctcaaaatattctctaatttttttgctgatttatttactaaagaaatttgagggatttgctataatgttagggatttttctagatgccacattgttattgatttctaatttaattatattatgctcagaaaacatattctgtatgctttcaacacttttaaatttattgagacttgttggagggtccagcatataatctatctcagtgaacacactgtatttacttgaaaagatgtatattctgcagttattcagtgtagtgttctataaaatcatttaggtcaaggtggttgatagtttgttcaaatccatctacgtcttcattaattttatttatctggctctatcaattgctaaaagaatgttgttaaaaattgtcaactatgattttagaatcatttatttctccctttgattaatgaatgttgtttcatgaattttgaagctattcagagacaaaaaaaaaactatttatgaatattgtcttcctaaatgaactgatgattcttttggcattatga

SEQ ID NO: 240477 - DNA, 590 bp, Homo sapiens
tcaagtttccatctctaatatatagaattgctattgatttttatattccatgatcttgataaacttaatatttccagtagtttttttttttgtagatttcaaaagttggtctacatataattatgctctctgttaaaaccagtagttttaattctttcttctcaatctttatgctttctaattttatttttatttcttcacttgttgcaaagcagttgtcccaggtgggagccaaaatccttatctcattactaatcttaggaaaaagtaaaatgtttcactattatgaggtcacctgtaggtttcttatagatgttctttatcagattaagaaaggtcatttctactctcggttttctgatcgttattaattcagaaagggtgttgaattttgccagatgcttttatttgcatttattgagataattacatatttttatttattatgtggtgaattatctaaattgggtaaaaagaattaaaatcattgtccaattgaacattttgcctgtcggctatgggtttcccttttcctttggttaaataacagttctgccacaaaataaaaatctagaaacacacattcccct

SEQ ID NO: 240478 - DNA, 395 bp, Homo sapiens
tgaatggctgcaagtttacagcctgtgacgtgtggtgaaggtcagagttagacaatccacagctggagtggaccagtgagtttttcaaacatgaatcacaagacatgaatgtctgataaaatcaatcattctttaaaaatggaactatatatcatgcctgtaatcccagcactttgggaggccgagacggtcaagaccatcctggctaacacggtgaaaccccgtctctactaaaaatacaaaaaaattagctgggcgtggtggtgggcgcctgtagtcccagctacttgggaggctgaggcaggagaatgccgtgaacccgggaggcagagcttgtagtgagctgagattctgccacagcactccagcctgggcaacagagcgagactccgtct

SEQ ID NO: 240479 - DNA, 500 bp, Homo sapiens
agctggctttcagtctcaaatgccacctctttagtcattcatgcttatctcaaggcatgaaattcactttcatataactccttcagcactctctgtgacccttctaatgttcttccttgtattcttgttaatgtgtcttgtttctccgtaggagatcataagttccaacatgacataaaaatattttatgcatctttgtattttctgcagtgtggagcacagtcctttttgtattgggtcacttagtacatattctagttgaaggcagtttgtcatgtgatatggtgtctagtggtatgatagtttacaggtcaccaagctattgctgatgtttctaggaacatttaagttttgatgtaagaaattaagttaaatttgtgttttgtttgtttgtttttttgagatggagtctcggctccagcctgggcaagagagcaagactgtctcaaaaagaaaaaaatgtttaatatgtatctacttgtggcagtagtctacttatt

SEQ ID NO: 240480 - DNA, 414 bp, Homo sapiens
tccccaatctttggtcagggtcaatatgtttaatttaattcattcaaacagttggtcagttcagccatcaccaccaccactaggtcgtcttgttggtcattgtttaactattatattagccaaggtaatgcaagctatcagcaaacaaattctccgtctaagtggcttaaatacattagaagtttatttcttgctaatataagttcaattggtaacagatccgggaatggtggattttctgctccactgtgggctcaggctgatggagttaccatgaggctcacaagcttgcctagctggcaaaggggattaggagaattgcttgagcccaggagggctcaagtggagattgcagtgagccaagatagctctactgcactctagcctgggtgacagaacaagactgtgtctcta

SEQ ID NO: 240481 - DNA, 240 bp, Homo sapiens
ccgtcacccccggagcccggcggcggcagcagcagcagcagcagcagcgcggggaggagacagcagccagccgcagtagccgccgcagccgcgggagcaatgcagacagcaccttgagaacgcgctaaagcactccaaaccgtggaccatgccgtgtccctgcaactgggaggggggaaaaccagattttttttgacataaaagcaagccagccaaaaatatataattttgtccttcaag

SEQ ID NO: 240482 - DNA, 487 bp, Homo sapiens
tatttcgtcatcctccccgctcctcaacagcgcagaagatgccgaaaagcaattacaggaccttacagagctgctccgggggccgcgggaaacttaccagcatcctggaaaagacaaaaccagtggggtgcacttggcctctcctggctgcagggtgtggccgcccccacctttcaccttcccatccttaggaagcaaagtgacccctaagcctagacaaagctctcgaaagcccaaagcctcgggcccaccggccagctccccaccccgctgctgggccggacaggtgtaggggaggcggacccgccccgcagccgactcacccagctccagggcctggtcgcacctgagcagcgcggcctccggctgctgctggcgctgcaggctccgcgcctggcctgccagcctgcgcagccggcactcggccgggaagcacttctccagcaggccgctcagcaccacgttcacgcgccgcacctgcggccgc

SEQ ID NO: 240483 - DNA, 682 bp, Homo sapiens
ccagccttctttccttccacctctccctcttggccatcttcatgcttcagccaaagtgaactgagctcaccaggctgagtcatctgtgccagctgtgccctctccccgaggctgcctgccatgctcgtgctttcttgtctattggcaaaaggctctccatccttcaaaatccagctcttggcctcatatcttccacaaagccttcccagacctttactcacctgggccattaatcaccttccctctcagtcagctcctacaccatgagtgcttttgtatggtgactgtctggttacaaggtcatcttttcccctggatgagacgccccttggggaaaggaccaagttttattccctgtttaaccttggcctgacaacctaataggtgctcagtgaacagttcttgaatttaattctctccctttccccacactgatgtgtatttaagctccagtggtactcgatgtgttgttttctttgttcttttttttgagacagggttttgctgtcacccaggctggagtgcagtggcagagtctctgtgcactgcagcctccgcctcccaggaggctgaggcaggagaatggcgtgaacccgggaggtggatcttgcagtgagccaagatcgcgctactgcactctagcctgggcgacagagcaaaactccgtctcaaaaaaaaaaaa

SEQ ID NO: 240484 - DNA, 491 bp, Homo sapiens
gagacctatcaataagcagtgaggggaatcactctccttcctcaagcagcaccagcaagaaccagtgggagcccgagaaacaccagacatgttaagtagtccaatgtaacaccacaaagtctctgaaaattaaactgccattggaaccatagcctaaaaaagttggccaagacttacgtatgtgataaatctaaacagggtgactgccacttaaaataaaagatttaaagaggaccccagagtctcttaacatactagacaaaatgttgaggatacagtagaaaattacccatcacaccaagaaccaaggaaatgacaactcgaatgagaaagaaaatcacctgacactgcactaagttcaatgttggaattatctgacaaggattttaaattatatttgatcattgaaacaaaaattataacacaatacttaaggtaatgatatttaagagtgaagaagatggcttcctaaacagaatgaagtttccata

SEQ ID NO: 240485 - DNA, 1774 bp, Homo sapiens
  misc_feature (1110)..(1110): n is a, c, g, or t
  misc_feature (1248)..(1248): n is a, c, g, or t
  misc_feature (1335)..(1335): n is a, c, g, or t
  misc_feature (1692)..(1692): n is a, c, g, or t
tgagacggagtctcgctctgtcgcccgggctggagtgcagtggcacgatctcaagtctgctttttcagtttcatctctacccacattattctcaatcctgaccacctcttcttacctcatttatggtggcttgtgggtacctaacactttctaaaggtgaaatcagagttcctttatttctctgggatccctattctcatgctttttgagctcagtttcaatttcatccagcaagagagcacatttttgtatgtgcagatggtgcaccttagattgctccccgtgcgtgtccactttttccccaccatttttttatatcccttgtccaaggaagatatcttatccacctggtattctccaaatttactcgtactgggaattgagaggtaatagtctccaggcatgtcagtgagaaggtctagtcaccatcccccaccacagcttaccattggcctctcaatttcctgtgaccaatgactgtctttccatcatcagaagcttaggggctggaaaaaggatgtcagagctcatcattcctactccagttaagatgcttaatgatcattagaaggtcatcattttttaactgcttccagtgaggttttattttgcatttctatttatatattttctttttacaatacatttaggggttacaaaggtagttttgatacatgatatattgcataatggtgaagtctgggcttttaatgtaaccatcccctgaatagcgtatattgtaccaattgagtaatttatcatccctcaccgccccctcttcctcctacccttctgagtctccagtgtctattattccacactctgtatccacgtgtacacattacttagctcccacttataagtgagaacatgtggtattttaactttctttttctgagttatttcacttaagataatggcctccagttccatccatgttgctgcaaaagatattgtcagttctaagtgtgagttgtactgaggataccatcctaaagtggagataggaagttacttgcctcttggcaatgtattaccctttgtagcgtactccagctcaggaatttctaccctaaaccgttaaatgacattcactgttgtctgttgttntgtgtcatagcgtagctatttcatagtaaaactgtggctaagagagattgtttgcaatagtgcttcagtaagataaaggattgagtcagggaaaaaatgaatactgtttaattcatggaagatagggaaacgtagaanactcatgaaaaataatagacaagacagattttaagaaggtagaagagaaggatgacatcaaacaaataaaatatgtagaataagacngaagtaataggcaagtttatgttgttttacttgaatacatttagtgccaacataaacagattgctttttttttaatgctgtgctgcaatggaggatgatcactttgcatccagcctatagttttgtggttgatccgctaagttccctgatcgatgtacttaagcttaatagaaatgccctgtaatccaagcactttgggaagctgaggtgggtggatcacctgaagtcaggagtttgagaccagcctggccaacatggtgaaaccccgtctctactaaaaatacaaaaaatcagccgggcgtggtggcaggcacctgtaatcccagctacttgggaggctgaggcagtagactctcntgaacccaggaagtggaggttgcagtcagccaaaatcacgccattgcactccagtctgggtgacaagagcaagactctgtct

SEQ ID NO: 240486 - DNA, 570 bp, Homo sapiens
tggggtatataagcagaagtggcattgctggatcatatggtaatcatgtttttaactttttgaggattaaattgaacattttgcgtaattaatagttgtacacttttcaaaactcaaaaagcacaaaaagaaaacagtcaaagcagtgtttttactacccctctccccagccatctagttcatctccagagaggaagctactgttgtcaggtctttatacatccttctaatctggagatattttattcttatacaggaaaatatgtatgtttatgtatttgtttttctaacaaatgcaagcctgttatataaactgttccacatcttttaaaatttaacatatcttggagattatttcatgtcagtacatagaaggttgcctctttctttttaatggctctattgtattttgttgtacggatatcccatagtaaattcaaccgttcttctatcagttagacagaatttccaatcttttgtttttcatgtattgatggagtaaatgtccttgtagcgatgtcattttgcacatgtctgagtatgtccgtaattaaattccttcaggtgaaa

SEQ ID NO: 240487 - DNA, 473 bp, Homo sapiens
agctccacctcctatcagatcagccatggcatcagattctcataggagcgcaaaccctattgtgaactgcacatgtgagggatccaggttgcgtgccccttatcagaatctaactaatacctgatgatctgaggtggaacagtttaatcccaaaaccatctccttgcaacctcgtccttggaaaagttgtcttccgtgaaacccgtccctggtgccaaaaaggttgggaaccactgcaataagatacaaccttacacccattaggatgggtactatccaaaacaaacaaatagacactcccctgcccccaaaataataagtgttagtgaggaagtggagaaattgaaactcttgtgtattgttagtgtgaatataaaatggagcagctactgtggaaaaaagtacttaagttcctaaaaaaaaaataaacagaattattatatgatccagtaatttcacttctaggtatatac

SEQ ID NO: 240488 - DNA, 1033 bp, Homo sapiens
atcttaaaaaaaaacaaacgtagggctgggcacggtggctcacgcctgtaatcccagcacttggaaggttgtgatccaccctcctcagcctcccaaagtgccgggattataggcgtgagccactgcagccagcctagaaaatgttttgttactagattgaacataaatctggagccaaggggttgggggggcctgcaaaacttgaagttaatttacttcagttacagcaaagtaataaggtttggctttcctttgaaaaatcctttggaaaacatcacagaatgagagcacattacaatcagggaagactacaggaataagattgacagccttattttaaaagctggaattaagtcttgccaacttgctcattaggtattttttttatacatgaaaatgaagtaatggggtgttttctttttttttgctttctgtcctaggctggagtgcagtgcattgcagcaggctcccccaggctcaagcagtcctcccacctcagcctcttgagtacctgggaccacaggtgctcaccaacacacctagcttgtttttaattttttataaagacaaggtcttgttacgttgcccaggttggtcttgaattcctggcctcaagcaatcctcccacctcagggctcccaaagtgatggggttacaggtgtgatccacttcacctagccagattgtaagatttttaatgtactttaataaacctttcattttcccagagcacagaaattctatggcaaaatggcttttcaccgtgtttcagtgacaaatctaagccttctaaggaaatgacactatggatccttcatttcgtgatcatcaacatttttcaattaagctctgcctttttaaatcaatcttattaaaaatgttcatgaccttctaaggcagtgtggacgcaaaagcttcctgtgtgtctacagttattttaggagctgaccatacatgatgagtgatacagcctgtactttgctcatctagagcagcactgtccaataaaatatgtgtgtatatgtatattggt

SEQ ID NO: 240489 - DNA, 453 bp, Homo sapiens
gaagtatcatctattctaatcaatattaatttactttactgagatgcaattatcatactaaaaaatgtatagaacatacatagattgtttgtgatttcatagttaaatacattcatattaccaccaccaaaaataaaatatagaataatatctcactaaagtttctttctggtcatcctccttaacctttattttttatttgtatcaccatacattaattttgtctgttcttgatttttcacaatggaatcatacagtatatattttgtttgtatgtgtgtctggtttattttgcttaacatgatatttttgtaatttatccaagtcattttgtccatgtatagtgtgaaaattctgtatgatcaccgtaatccttggaagtcccttaaacatgtcttaagccagcaaaagcagtggcaattgattcaggaattccagcttctccaccaacat

SEQ ID NO: 240490 - DNA, 284 bp, Homo sapiens
ccaggcacgatggtgtgtacctgtagtcccagctacttgggaggctgttgggatgattagtttgggactaggaggtcaaggctgcagtgagccattatcatgccactgtgatccagcatgggcaaggaagtgaaaccctgtctcaaaaaaaaaaaaaaaaaaaaaaaaaagaccctacaccctgtagaacagaaagcattgcagaggctgacaccactacttcagataaacagttggaaactctaagacagagtagagagtactccaggaagaaaaaaaaggga

SEQ ID NO: 240491 - DNA, 396 bp, Homo sapiens
ttcaggttcaatttatgtttgtctgagaaagtctctgtttctccttcacttttgaaagataattttctgccagctgagtttttaatccaagcttttattttgcaaatcagtgagacttcgtgctttcaagatactgaacactgcagcctaattactgcttctcccaaaccaaaactgctttcaaattttggaagggtaaatatttactctaaatcttcaacaatcccttcttttctattcattgactcaggtatgtgagccagataagtatatgtaatcttcagctgagtatcttattagtgatttcctcacagttcaagagatgctcaggcgctgttgttcatttgtttctgtccagtctcctcaatatcctcttaaaaaaacaattctttgctc

SEQ ID NO: 240492 - DNA, 371 bp, Homo sapiens
aaaatgcctcctctactaatctgcagtatattgcttagcaagtactgtctgtatgtgtcatcagtttctgttttgttttgtttcattttaagaacccactatttcatacttcaacgcatacctattttctctaattgccacaggcaaaggggaggtccctgacagaataaagaaggttattgtgacagatgaaacataattcacaatgagtactcttttcatccagctctaagtagcagaggattacttccaagctgaattttgtggcagaatgtatgagctgattttattaacacataaggatagggcaaaggcagaaaaactatttctcctcagctggatggtggttattttgtgtgtgtctgtttggg

SEQ ID NO: 240493 - DNA, 419 bp, Homo sapiens
tctattccctgtccatctggattttacaataagcagcaagatagattcatccaaaagagctcagttttttaaaagatattgagcaaagatgagcatgtacaaaaacatgaaaaaccatgctctgaggaaagactcatgcgttcattgaacaagtaagataattgagctgtagaaagaaatatggtgaaatacccttgcaaagaaattttgaaaaatgtcatgttgccttttatgttatcttgatgtagaaccaaaaccacaacaaaattgccagctttgcaagaaaagtcattatggctaggggaagaaaaaaagaacatacaagacaaaagcaatgttggtaaatgacaggaagcatgccaagttcttcagtcacatataaactacaatgaaataaaataaatcttacattaataaga

SEQ ID NO: 240494 - DNA, 440 bp, Homo sapiens
ttaaaaaagcagccatcctaaccagtcaaagaaaattaagaaatttaaataatgaacatgtatttcctgttttgattacttgactgatgaacagagattttaataaaatcatgagtaactgtattatttatcatgccttcagtgatgtatagtagacttcagaaatgtgttcaagtcatagagagtcagaaagtcattattctttaatagcaacacaataaatcctgaggtattaattattatcaattatcatgtgaattaacaaaatatataaaaaataaagtctttaaggtgtataggactatttaaataaatatgacatacaacatatatcacaacgaaaagcacatggttaaaaagtaaatacttcagtgaaataaaaatcttggctatttggaagttatttttttatgttattattgtttgtaagtcaaacaaat

SEQ ID NO: 240495 - DNA, 548 bp, Homo sapiens
cgagactccgtcagaaaaaagaaaaaaaaagaaaggacagcataacacttgacccagcactcaataaagcagaggtgcagaaaacaccctgtaatgtttcccctgtgcatcccgggtggtaagaatatcccacagatgaatatggccagggatgttttctaggaaccgaggcccaacctgctgtgattttcctcccacgaccaccagagtaccgagcgcagatccaacccagcctgaccccctttgggcaccgcagctgccttcccattgatcggcactgtaatggtaaatagctctctgcaggcctcctcactgggacctttagtggctctctgcttgcttctgtctgagaaaacaggaaagaaaatgcaagctgacgtggattcctcacttcattttgaaagaaatggctttccctaggcaagacaggaaagggaatgaggtttgctgaaggaatccagagaaataaatgttcatactcataaaaaattgagcatatgtagtcatactggactgacctcaaattcagtagcttacattgctttaga

SEQ ID NO: 240496 - DNA, 594 bp, Homo sapiens
ttttgtatttttagtagagacggggtttcaccgtgttagccaggatggtctcgatctcctgacctcatgatccgcccgcctcggcctcccaaagtactgggattacaggcgtgagccaccgcgcccagccagaaatagttttaaaaaaagaaataaggagcgtgcggcccgcgggggaagcgcctttaccagctcgagcctgcagccccccaggccgcgccgtcctcggctcccccgggcagcgccggggttttgtcaggcgcgcgctgctgtttgcctggattgcgctcattctgaccctgaagccagcggccccactgacacgccctgaaaagtgggagccacacgcgggatccggagaccgcgctaaagtcccacgcacgacggcgcccgccggcgagtccacgcccgcacgtcggcgcatgcgcgcggccaagccggtgcccgcgcccaccagcgcgcatgcgcgccccgtcccctccctccccccgtgctctgccccgatggttcggtccgcgccgggggcggggccaggggggatttctttagcccaagagtggaggctaagctacttacttccaagcctgggtgatc

SEQ ID NO: 240497 - DNA, 329 bp, Homo sapiens
ttgctgataccaataataatctttttattacagtcttaacaagagtcatgccagtcagtgaggttctaaggatgggagtggtgggagcagtccaggctgcaggaaggaacattttgtcactggcattgtttagaattgctggtgcatgcatgctggtaataaaaagcagaccaactttcagtgtcaggctgccctaacgaagtaccatggactgggtggcttaagcgatagacatttctttctcacagctgtggaggttggaagtcgaaggtcaaggtgttggcagggctggtttctcctgaggcccctcttcttggcttgtggatgcc

SEQ ID NO: 240498 - DNA, 307 bp, Homo sapiens
tgacgcagttggaaacattcagaatggaggagagaaagctaagggttcccaaggacattatctgcactttccaaactgaagaattagagcaggtgggtgagaatcataatcacctctttctcctcttcctcttcttttcatcctcgtccatctcctttttctatgtgttgttagtatgacacaatttacaatattacctactttattcataatgccccaagtctgaccttttctgaactaattctatttccaaattagatctcaatttaaaataaaacagcaatttaaaaaaattggtctagtccca

SEQ ID NO: 240499 - DNA, 391 bp, Homo sapiens
agtgggtgagaatgtggagggagaggacactgtgtgattacgggctcccaagaacgtcacaggcaaaactcacactggaaggagtcaagctcaggccagcagtgctgaggcagctgcacctcatgaccgaaccctggggtgaagagtgacctcatcagttcacaaaggcattgctttggcaaggccattcagaaacacacaagaggaagaccaaaactctcaacttccaaaccaaggcttctattacctaataagcactaatgacacaaaacgagtcataatgctgtgacagttaagtagttcaaggtgtaaataaagaaacgctacagcacacgcaaacgtcctaatgagaattaggtcactgtgagttttatcccatgagggaaaaaaa

SEQ ID NO: 240500 - DNA, 599 bp, Homo sapiens
aaagaatatctgcagtacaaatacctggaaatggatttgcttggtaagctgatctgtgcacttaagattttgaaagacattgctaaattgccctcactagaggttatatgagtctgtatcctgtcagtgtataaaagttcctatttccccactccctgctagcagaatccttcatccaacttttctgtctttgccaatctgacaggacatgtagtatctcactacaatattaatttttatttcccttattgtaagtaaggttgattattttatatgcttaggagctagttgtatttccttttctgtgaattgattgctcataaactgattaaatctttgatattctggatggatcctgataaaaaaattttccttatttataagagctctttatgtattagggagaaaagccctgataaaaaattttccttatttataggagctctttgtgtattagggagttgttttagtctttgactttgcttatgatgtgtttttcttttatcatgcagaagctttgcactttatgtcgttgactttgtcagtcttttatgacttgtgtgtcttatgacatccttagactttcctcactccaagat

SEQ ID NO: 240501 - DNA, 472 bp, Homo sapiens
ccctcttgggtcttttggaagagtggacatcctaaaaaaaattttctttttggagacggagtattgcttttgttgcccaggctggagtgcactggcgcgatctcggctcactgcaacctccgcctcccagattcaagcgattctcctgcctcagactcccgagtatttgggattacaggcacccgccaccacgcccatctgatttttgtatttttagtagagacggggtttcaccatgttggtcaggctggtctcgaattcctgtcctcgtgatccgcccgcctcggcctcccaaagtgctgggattacaggcgtgagcgactgcgcccggccaaaaaaaaaaaaaaaattaatttgggattgcgtaatcaaaaagtcttttagacatctcaaatgcattgcaacttattcgaataaaaagggctcctgacacggacaaaaaggcagtataggttgaaaattagaatgctta

SEQ ID NO: 240502 - DNA, 370 bp, Homo sapiens
catctccgcgctcactaactggcctcaggcctgggaggattctctgagcctccataggctctgagcccatctaggggatagtgttaggagtgccaggtcgcgtacctcccaggatggctgagggtttccaatgagaaatacatggaaaagtatagagggctacaagtgtgtaagaattatgcttttacaattgaagagaattgcaagccactctttcctttatatactcccagcatcagttacaattgtttttagtattcatgtactgcttctgcctcaatcacatgaatacaaatagtacatcctgatagcctactctgttcacccaatggcaaaaaataaatacaaagaaagacagccaataaatcat

SEQ ID NO: 240503 - DNA, 507 bp, Homo sapiens
accatggaatgctgtatggcagtggaaataaatgaacagctacccctacaggcaaacaggaatcacagcaacagctgggagtgacggcgtgaagcagagggacaagaatgtgcactcatgcccggtctgcctggcttacaatcctggctctctgcttgccagctagaactatcatgcaaatcatttaaccactcggtgcctcagttccctcatatgtaaaatggacatggtaacagtgtgtatcccacaggccattatgaggatttaaatgatttaaaggattgtgggctgggcacagtggctcaagcctgtaatcccagcactttgggaggccgaggtgggtggatcacctgaggtcaggagttcaagaccagcctggctaacatggtgaaacctcgtctctactaaaaaatacaaaaaattacctgggtggcgggcacctgtaatcccagctactcgggaggctgaggcaggagaatcgcttcaatctgggaggtggaggttgca

SEQ ID NO: 240504 - DNA, 446 bp, Homo sapiens
cttaataattctgaaatttcctgattttataaattttatatgcatctatgatataggttacttgaagaccaaatgcaaaactttaaagttttgtactgttaaataggaatactaggcacatcactcatctaattttaaattgtaaagtaactacatttttaaaaattttaaatttaattttaatgtctttgacttaatatattcaaaatattatattaacatatagctctaagttattaatgaaatattttacattctattttttgtattcagattgaaattccaggtatattttatatctgtagaacatctcaatttttgtttggacacattttaagttctcagtagccatatatgtggctagtggcgactgcgttggctggcatagttttggacttagatagcaacttgccagcatttcactacacagaaaattgctttaaaga

SEQ ID NO: 240505 - DNA, 287 bp, Homo sapiens
agggagccatagtgtcccagtgtggaggcagaaaggtagaaaggggtcattggagtagcttagagtaatcttgtgagctttaggcttaaatcagctgactgagcagggtcttctcttccactgttcaggatgaggctatgcctggggtcaaaaagaaaaagcctccaactattttacattggcagctatgaggatggaaaaaatagtagtgatggtgtttgttttttcattaacaggttaacctgaccattgtgggaatgtcattaaatatttttctaagatataat

SEQ ID NO: 240506 - DNA, 128 bp, Homo sapiens
tattttttagaacagatttaggttcacaacaaaattgagcagaaagcacagagatttcccatattcactcaacccacacacaaaattggcacgatcattgttcactgcagtcttgaccttccaggctc

SEQ ID NO: 240507 - DNA, 232 bp, Homo sapiens
ttttatagtggtctttatcatattttaagaatggaagcgagagacaagaacaggatatgctatccaggttcttaatttatcaccaactaggattgcaatagaatctattatctgccagtaaaaccaatgtttttagaagtcaaaaacaggtggaccactagaagtctccctttgtgaaagtggtagaaattgcccctgattcaagtcagctaatactagtaagacttttaga

SEQ ID NO: 240508 - DNA, 413 bp, Homo sapiens
aaaatgtgctataaaatttcttaacctcttgtttacaaggtacatatatatatatatatatatatatatatatatatatatatgtgagtttatggtttgaaaaaatatttcactgcactattagaaagagtctattcctgtgacttcttggagttgggatgtaggggaagcaaatttaattttgtctttacaagtaaaattcatgcataaaatacaaattaaagttaaattacggattgccaagtttgcagaagtaagtgaatctttctttcttaaggccttttctgtggccctttctgataaggaaactcagaagttctgttttcagtttgttattaggcagttataaaattacagtgaaatttttaaaatattgatactaaaggcaaggcatggcagaaaatatcttaaag

SEQ ID NO: 240509 - DNA, 389 bp, Homo sapiens
gctgcacaaaacctttcacttacaggccagaaaatagaaaaccgcctcttatagaacctccactgcttttaccactataatgagatctccagtgtatctacgactccctccactctggaagggacagcgctccatcgcttacagctccctccatctaactccacgcttacagctccccccatctaactccacactggctactacgtctcccccttttcccacgtaccaacattgcgcgagccgcctctgagcaggaccccttcttcccttgggtttagtattatcctctctattgggattagcagggacagctacgggagacagagccttgggaatccagcataaactgtcttgggagactgaatggccctccagcaaacggcagaggg

SEQ ID NO: 240510 - DNA, 474 bp, Homo sapiens
tcagaaattccaacatctattaaagaaaaaggtaaaatgtattttaaatcaataataaatgtacagaatattaaaatcataagaatgcacagtgatgcatgcctctaatccaaactacttggaaggatgaggcaggaggatcacttgaggagcccagaagtttgagaccagcttgggaaacatagtaagactctaccttcgtaaaaaaattgtgcacacttgtgtgtatgctttagatcctgttttttgttgttgttgttttggtttggtttggttttttaaagcataagactgacgttttgttacaaagcattcctttgggagcatgcctgggaacttattagaattaacattcattataagtattggtaggtaattaatgcagtaagaactcttccctctgtatttattagatgcaaagaagaataaatttattaaaatttggtatctacaagtgaactgaagtatacaagt

SEQ ID NO: 240511 - DNA, 368 bp, Homo sapiens
atgtataaagtgtttaatgcgtaccaaatgagtgtctagtcactcatctcctgtttgagtatttatgtgtcttattattctgagttagggcatccttttacctcctgtgtctctttttctttatgcccaagttccatcggcagatactgaccatagagctttgcaatgtagacagttttgcctaaaggctaagacaggggctcagttccacttcactgacacttagtgacattacgcgggctttggaatttaggaagtgaccaatatgttgactttggtttgttatttcagaatgagaaccctaaaggccacccaacagttcaccacagagaaacttgtttccagccacataggagttgacaagctgc

SEQ ID NO: 240512 - DNA, 295 bp, Homo sapiens
agaatggtcctgtactcgagtttgagttttaaactaggaaaatgactaataattgaaaataatgggaactctgtggaattttctttgtatgtcatcatgaaattgctgtgtaacaaacaaccaagatccaaaatagcaagactgggagagtttgtgtgctgcaggaagagaccaacaagaaacagaagatcagtcagtgcatgggtagatgacatctgtgcatcccattgtgtgaaaaataatctgctgattttgccctttgttctaaaataaattcattacataggccatatca

SEQ ID NO: 240513 - DNA, 404 bp, Homo sapiens
agaatggtcctgtactcgagtttgagttttaaactaggaaaatgactaataattgaaaataatgggaactctgtggaattttctttgtatgtcatcatgaaattgctgtgtaacaaacaaccaagatccaaaatagcaagactgggaggtacgactgcagaaaaaaattcatcccatgataagaaccaatgggttgaaactgtccaataaacgttgcttaatgaagcccaggagcgattataaacatccaatgaatgagtttgtgtgctgcaggaagagaccaacaagaaacagaagatcagtcagtgcatgggtagatgacatctgtgcatcccattgtgtgaaaaataatctgctgattttgccctttgttctaaaataaattcattacataggccatatca

SEQ ID NO: 240514 - DNA, 626 bp, Homo sapiens
gtctcaaaattcctctgcctctttcttatacatgtgattccattcagggccaggataagctcctcctctgaagatccttaacttaataaaattattttgccatatgaggtaatgaaatggaaaagtgctccaaagctcaaatctctaggggaggatacagatgggcaggctgtggggctccgactcccatggcagtgtctaggggtgaatgtttacagctgaagtcccagtgggcgtgtgttacagggtgctcttttagtttgccgtctataggtgacttgtattaaccagctcaattagaccccttccttatcacaaggacagagggatttctgtatcccaggtttttgccttgctgtactggaagaattggatcacacatgggcttggagaatgagtgcaaggttttattgagtagaagtagctctcagcaggtgggggagccagagggagatgattttcctctggagtcccaccactcagtggccctgggtctccgactgccccggccaaactccgcctcttcccatgtctgtcagtgtgctcttccactggcattctccctccacgtcctctcgctgtccagctgcttgtatctttatccgctgatgtgctcctctccacgt

SEQ ID NO: 240515 - DNA, 371 bp, Homo sapiens
ggattaataatggatgcagaaaaaaaaagcacttgacaaaattcaacacccaatcatgatataattaagaataaaacaaacttcctcaacctgataaagggcatataccatgaatctacagttgatatcacattaaatattgaaagactgcatcatttccctgtagtatcagtagcaaagcaaggattacctctctcaacacatctatttagcattgaaatataggctctggaggtctgatgtcttgtcagatacatttgcccttctgccaaagacctatgatctaaagattaaaattatctgcttcatattcacattctacaacaaaggtacagacatagcaactgcagggcatttttctttgaaaatgg

SEQ ID NO: 240516 - DNA, 169 bp, Homo sapiens
gaaacctaagagtatcagtactgattagtgatttgaggcagaaaacttgcaaattaggctgggaattgctagtaaggttctggattcaatcatgatgaagtgacttggttttatgtgcctaaggaccctgtctaatgagttgtatcgtcttaataggccacgtactggt

SEQ ID NO: 240517 - DNA, 327 bp, Homo sapiens
tgatagccttttgcatttcaggtttcttgaagtatctctgcttgtttgcttctgtttcaaagatcataacaggcagcaggccccattgtgggggaaagtggtagcaaatggatctgtgatagcaggtgtcatcctcatcatctctttacagtaatcgaattggttgaagatacatggaaatccaactagatacacttgtaaaaatatcacctgccagtgcagtggctcacacttataattccagtacattgggaggctgaggtgggaagattgcttgaggccaggagttcaagaccagcctgggcaatgtagcaagactccatctct

SEQ ID NO: 240518 - DNA, 492 bp, Homo sapiens
gatagtgaacatactgcttttgcctgtgttggcactagactaaaataaaaaccttttcctttatgttttcccagattccaaaccaacttggcctaacctttcaagtctctaagaaatttatagttttatatctattaaaaaaatcttctggtagacttcataaatatgacttagatttttattaaacttttttgctcgtatctttctgtatctcagaaaacctttaatttttgagacagtagctatttgtgtaggctgtcttatatgttcacagatggcattattttatcagtcctcaaaccatctgtagcatcaacttagtctattccaattggtgtcatctttcatttatgcaggagtgagttattaaagtaaaactttatatttgtataacattttgggtaaatgttagagtaaaacattggtttattttatcacaacaatcctttgcaaagaaaatttattttttccagctcatcttgatttacttta

SEQ ID NO: 240519 - DNA, 447 bp, Homo sapiens
tttgctaagataaacctgataacctattttcccactcatcacaggacagtgaatacaggcattctaaatgctacctctcaaacagccaccaggagtgcaaactgcctccactcacgtcacagacgtgatcctgccggtcatcctttactctttagaaagtgagatctggttgttttaaaagtaggaaggttctattatggcacttctgcagtaaacccacctataaggcacatcgatttcttgtcctgtgaatttattcccgtacaaatctatatcctttatatcctgggttgtcctaacacaaggacgacctgtgtttccagtgacacgtgcccatccccgtccagcgggtgggaagagactggaggagagggactaagtgagtcttgcatggtggagagacgaaacctgtccagcagggaatagagcctttggtgtctaaaatac

SEQ ID NO: 240520 - DNA, 410 bp, Homo sapiens
aatgacttgctctagagcatgcattttatatgcaaaccaaataaccccaagttcatactcctgcttgtttccttttatctgctacgatatccttttgccctaaacaccgcaaagctgggtgctggacaactagggactacccctagagcctagagcccatccaaactcttcaaactatccaatcctaaacctgcttagcttgcttaccttgtttcaattgttccttcctgcaaaaaccacaataaagtcacttgtccacagttcctctctctctctctctctttctctcttttcctctctctctgcctgctcatctcacctgggcattttcctgtgtgatcctgcatgacataccatccctcttgttcttaggagactgtgagtataataaaaacttctttcttcatgga

SEQ ID NO: 240521 - DNA, 469 bp, Homo sapiens
acagctcatttatttctcagatagtcctatgaaacaaacattgccaatgccaatttcacaggtgagaaaatggaagcttggaggagtgaaggaagttgcccaaggccctatagctagtggatggccgggctgggactccatcgccaggcctgcagtcctttcacttctgccacgctccctggggagtgaaggcagagggaggcgttttcatgtccaagggccctgtggaggactcaccataggagggtctcaggggccatctactatcatcttttgaagcctgccaagtgccaggcatgcaggtgtggggacagggttatgaaccaatatggacagagtccatggagtagtagaagacatagaatcagcaagtatatgtgggtcatggggcggtaggtaccatgaaaacattaagtagggtaaggatgatggtgctatgtttacagaaagtcaaggaaattggaatggc

SEQ ID NO: 240522 - DNA, 415 bp, Homo sapiens
acagctcatttatttctcagatagtcctatgaaacaaacattgccaatgccaatttcacaggtgagaaaatggaagcttggaggagtgaaggaagttgcccaaggccctatagctagtggatggccgggctgggactccatcgccaggcctgcacatgtccaagggccctgtggaggactcaccataggagggtctcaggggccatctactatcatcttttgaagcctgccaagtgccaggcatgcaggtgtggggacagggttatgaaccaatatggacagagtccatggagtagtagaagacatagaatcagcaagtatatgtgggtcatggggcggtaggtaccatgaaaacattaagtagggtaaggatgatggtgctatgtttacagaaagtcaaggaaattggaatggc

SEQ ID NO: 240523 - DNA, 2615 bp, Homo sapiens
  misc_feature (596)..(596): n is a, c, g, or t
  misc_feature (637)..(637): n is a, c, g, or t
  misc_feature (2234)..(2234): n is a, c, g, or t
gttttcagtaacattcccacagtgcttgccacagagccctgcttaaagaaagcaccagttcctggcctgcagacccactaaatgaagatgatagtggtacctcttcccctgcccaacaccacgccctctggcacaaggtggatggccactggcagtgatggggatggagtaagtgctatgagactaggagaggaacaccccaggaacacctgaggtcacagagtgaatgaaggcaggtaaaggagcaaagggaatgggggcccccacatacgtgaccccagggcagcagcttggcctgcaccgagtcctccatcacacacactcccccgccccacccccgcatcctggctgtctaaccacaatccctgctgccttcagttaatcaaccaatgagtggtcattcattgcacatctgttctgggcctcatgggggcagcgggaggtgatgaagaagcaagggttctacaaagaggtcaaagctacgtgaggagccggggaatggcttgcttttttttttttttttttttagacgggctctcactctgtcacccaggctggagtgcagtggcatgatcattgctcactgcagcgatgtntcatgggctcaagggatcctgccatctcagcttcccaaggngctgggaccaaaagtgtgtgccaccatggcctgctatttttttttttatttcttggagagatgggctcaagcatctacacacctcagcctcctaaagtgctgggattatagctgtgagccgttgcacctggccaggatggctttttttgaaagtgaggacacgaaagttcagaaaggggaagaaactggctgtggtcctgcagcaagctggcagccgtccctcacctagccctgcgcttcagaaccttactcacagatcatcttacaaatgcctctttgctactttgtgagggaggcaggaattactcttcacccttatcagatgagaaaaccaaggcccagtgaggtagctgaggctgtctaaggttacatgggagtcaggaagggtcaagactaaacccaggtccacgtggttccagcctggcttcatccctgtttgcagaccccccaatcccaacccgccactggccagagcctggcccagctcttaggccaatgtcttattccaaaattaaatggcagcagcagaggaagggatagattggggggtagctgcccccagatgccaggacctatgccctggagaaacccttgggctggggatagctgtgacatgtacacacataccttgggccccttgtctcacccactctgagccaactcaggacccagtgggggctcactccactaatttggagcctgggctctgcctccacttctctctgccctgggaactccatctgcctccagggcctcctgaagacacgcaggggagagttcagtatttctcccttcctgtctccagtgtctgcaacagcaaatcctatcattgccgctccaaatttttctcaaagaggaagccttctttcttgctgaaatagaaactaaaccaagctacataatacagtttgagaacagcctggccaacgtgatgaaaccccatctgtactaaaaatacaaaaattagccgggtgtggtggcgcgtgcctgtagtctcagctactccagagcctgaggcaggagaatcgcttgaacccgcgaggcggaggttgtcgtgagcctagatcatgccactgcactccagcctgggcgacagagcgagactccatctcaaaaaaaaaaaaaaaatgatgaggtcatactacagtgtgtgaacccctaatcctataggactgttcgcctttgaaaaggggaaatttagacacagaaacagccatgcaaagagggaagatgatgtgaagaggcacagctcagacacccatcttcaaggcaaggagagaggcctggaacagatcagaaggaatcaacctgccaactccttcatttcagactgctagccacaggaactgttgtttaaaccacccagtctgtgattctttgttatggcagccctagcaaactaaccagcaatgccatcttcatctgattctctttaaatactccaagcaggagaccagttaccatttaagtccaactaccccaagaatatcagactggggaggccacatgtaggtacaatggtcaacagccccggctgaactcaacagccagcactagcatgcgaatgagccttctcaggcatcagcccagtggatcnttaaccacaaccctgccaacctctgatagtatccgcatgtgagactcaaagcaagaactgccagggggagcacttcctgatcctgacccacaaaatcctgagtgatgtacaatggttgcttgaagctgccaagttttagggtaacttattatacaacatagtaaccagagtgcttaccttccccttccctcccttgccactggccggaacacagatgaggccatggtgggctgtcttcagtcctgtaaatgacatagatgagggcatggggaagccacaaacgaggagcctgggctcttggatgccctcatggagcacaactgccaactccccacgtgccactcacatttcatgcaagagaaataaatttccatcttgttt

SEQ ID NO: 240524 - DNA, 429 bp, Homo sapiens
aatatagaaagacaatcatgatcaagtggactttatcccagggttgcaaggctgttttaacattccgaaaatcactcagtataattcatcatattaaaatagtacaaataaggctgggtgcggtggctcatgcctgtaatcccagcagtttgggagactgaggcaggcagatcacctgaggtcaggagttcgagaccagcctggccaacatggcaaaaccccctcttgactaaaaatacaaaaattagccgggcgtggtggtgtgtgcctgtaatcccagctacttaggaggcagagacgggagaattgcatgaacccaggaggcagagtttgcagtgagccaagccactgcacgccagcctggacaacagaacaagactctgtctcaaaaacataaataaataaataaaaataaaaataaaatagtac

SEQ ID NO: 240525 - DNA, 689 bp, Homo sapiens
aagttgtcaaaagagtataagttcagtgttctgcaagccaaaataattgtttcaacaagcaatgaaaactcaacactgttataaatatagagtccagttagatgtgggctgcacaacaccaactgggttgagaaattaaattgtttagaaattaaatcattgttactctaacaagaagattggaggtagcattcagattctggtgaattgcattttgaaatgggataagatgtaagtttttaatactagcaatgtacactactctttttttttaaagtttgcatgaagagaggtagagtgattaatagctatatagatccatatgattaaggaagcattttagaaaacctttccaaataaatgtctggagacagacttttaaatcaaattaatagcgtctacttagcaacagcatcacctacattacttccaacttaaagaaaaaaatgtttgtggcatacctggggagctcaccagatccctgaaatgtagatattattcacatttgatggatcagaaaactgaagctcccatgatttgggcaatttaaacaagatctgaaggtcagttaagcagcagaggtgaaacataaacccatttctgcctatattagttgtaagttcttgttctcatgcacatgttatcatatatgacaatgtttcttaaatttaagacagcattaccacttc

SEQ ID NO: 240526 - DNA, 578 bp, Homo sapiens
tttagaggttcaccattcctcctttgcaattcttatgtccagtgagctccttcaaggaaaaggtttcccccccccccaggcttgttccaacccccccaaaacaaaaaaagaaacatgtaggtccaataaagaaaggagtgtcatggagctctcatgggtacaggctggaagctccaggcctggcgtgctggagtcacgagatgagctgtccaggcagcatggcatcgtgagtgaactccgaccgtggcaggtgaggcttctgcacttagctggctgtcttcatgtgggccgattctgtggttagtgattctgatttctcatctgaaaagtggtgcatcacttagcccctcccacacttggagggttctactagtgtgcctgcgtggctgggttctgcacactcagctactttagtttctttagtctatccttaaaaagattcctaggtgtgttcctgattttgaggttccgtttggtcattatgctctttcagagttcatcttttgcaggtcaacaaattgggactctgaatgtgagtgtgtgtgtccacacaccactagggcttattaccttattgt

SEQ ID NO: 240527 - DNA, 485 bp, Homo sapiens
cctccgtggggactgcaggtctgggtcctctgtgtgccccggggccaggccaaaaccaggctggaacccgccggcagggcccccgaggcgcctctgcctgctctctccgttcttgccggcggcagcgattcggactcccgctttcgacaaagtctcagctccgcagcagcacccggcgcggactcgctgggcgcgcggactgagctccgggtggaaccaggaccctcgcgccctcgccctcgccctcgccctcgcccgagctggaccaccgcgagcaccgccgacgccagccgcagagccgcgggtgcgcggggaagaggaaacgaaagcgcgggctccggagctgaggtgagaagtgagcagaaagtgaaaagagaatccatcggaaacagataaaaaaggaaaaacaaaacccactcgaaaagaaagaaaacgttacaacaaaaaggataaagtaacgctaaatgaaataaaaaggagccata

SEQ ID NO: 240528 - DNA, 515 bp, Homo sapiens
tccaagacctgattttgccaaatcatttgctcatcttacttggtgggcaaacatttccgttgggaatgtaagagcatgtgccctgctattttggtttctgctttttgggccttctgccaaaactgagacagaggcccttgaaacatccaggatagtgattaaatctagcaagtgcaattaagtaaacatttccagctcctgtcctcctttagagaaaaacaaatgaagaaaaagtttaatttctagagggagattttgtgcatgagcaggactaaatctaataatcccaatagtctggcatatggcatacgtggatattcagtgagaatgtaaaatcatcctgcaagcttttctgtatttatttttggggattgattacaatctctatagtacagtgacttctctacatggattacaggagactgttgtctcagtccacagttcttggaatagtcatatttctgagcaactgattttttttaaccttatggacactgaattgattgtttttcact

SEQ ID NO: 240529 - DNA, 177 bp, Homo sapiens
atgttgcccagactggtctcaaactcctgacctcaggtgatccgcccacctcggcctcccaaagtgctgggattacaggcgggagcgcccagcccaggttcagattttaatggtaactttgttaagtatagggtaggaaaaaagagagatcaaacatagcttccaaagtattagaaa

SEQ ID NO: 240530 - DNA, 369 bp, Homo sapiens
ttgcccgggtgtgagctatagtctgctcaagccgtgcttgttacagggaactgcgacccactgcgctgccttgagtgaaggggtgttgctgattgtcaaagatgacaaacaggcagcctcaaggctgtggaatgggcttttggaggctggagctggatgagcagggagcccttctcctgggccccgtcagcctactcacttttcataaggtccaacttagcggccactgtcttttccccctgtttggtttcagtctccattcctgactatggatttctatgtgtctcaatgttctcaaaagagaaagcatttctaatgcccttgaatcagcctatggatgggagagtcacttgctcacctctcatccat

SEQ ID NO: 240531 - DNA, 330 bp, Homo sapiens
atccattgttcttagctatcacacaagaaatgtcaaacgtcagggaagtctgaagcacctgtgcttttgtttccctttttgtggatttgagtgggaagaatggcccacaaataatggggtaagaggcacgtcctagaggattggaacctgactgtatttgggagagggttgcttatttgatgactactgtaagactctacttttacacatagaggggccaaatatctgtctgattcactcttacagccccactgtctaatacagtgcaatgtgcaaataatatttttgaatgaaatattgaatatcaaataaactagatgagtgataata

SEQ ID NO: 240532 - DNA, 585 bp, Homo sapiens
  misc_feature (381)..(381): n is a, c, g, or t
  misc_feature (394)..(394): n is a, c, g, or t
  misc_feature (429)..(429): n is a, c, g, or t
  misc_feature (443)..(443): n is a, c, g, or t
  misc_feature (470)..(470): n is a, c, g, or t
  misc_feature (475)..(475): n is a, c, g, or t
  misc_feature (489)..(489): n is a, c, g, or t
  misc_feature (491)..(491): n is a, c, g, or t
  misc_feature (499)..(499): n is a, c, g, or t
  misc_feature (557)..(557): n is a, c, g, or t
  misc_feature (559)..(559): n is a, c, g, or t
ggattcaaacctctctagtctgatgaaccccaagttgcctctacacctgattcccccatccccacttgtcggacctcagagacctgctgccccttgaatcctgtcatccataggcccctaaaaccccaaggttccagcctctggaattctggtcccaaggatcccagcccaagcccccagcaatcctcagaattacccctttatcttagggtgggatccctaccatttggaactcattgtaggaccacccagggtggggcacagtggctcatgccttgtaatcccagcactttgggaggccaagggaggaggatcgcttaaggccaggagtttgagaccagcctgggcaatgtagtgagaccgtctctaaaaaaaaaactncggaggggggggncccggtacccaattttggcctataaggttgagtcngtattacaaatttnactttggccgtaggttttacaaacggncggtnacttgggaaaaccntngggggtancccaacttaaattggcctttcaaggaaaattccccctttttgccaacttgggtaaatnangggaagaggccctgaaccgatttgcc

SEQ ID NO: 240533 - DNA, 687 bp, Homo sapiens
gattaaagttttgtgaagaatgtttctggcctgctttacttttgccttagttacttggaaggggagaccttaatttgttagcagtttgtgctcatttaaaatatcttgtgccaaacctagggaggccttcttttcattgtactggtggggcatcggtgaagttaaataactcgtctgctcacactgctggggtaaggatgaagctagggtgggacaggtgctttgactgcagagccacatccttaatccctgtgcgggctgcctctgcaaagcccaccagctggcaaactcaaagtggcctctaacgtccagcccaagaaccaccttttggaagcttttcctcacacttgtccttgcccagtaaaaatctttgatgtacttcttgtaacttctgacagaaactgtgggctgtaaaggctgtacttacagtcatttgacactaggtggcatctgtttctagaaccgtgaatggctgtttgagtcctagagaaaacagtaacaaagaaagcatccttgattttatttctaggcactgctaggtaagcagatggatcaaatgtggagagatgggggaagcaggcattttttgttttcttctggaagtttttttgaggactttccctcaacaaccccatcagtgaaaacctttgtttaaaataactactgagatgaagacatgaagtcttt

SEQ ID NO: 240534 - DNA, 1751 bp, Homo sapiens
  misc_feature (135)..(135): n is a, c, g, or t
  misc_feature (186)..(186): n is a, c, g, or t
  misc_feature (247)..(247): n is a, c, g, or t
  misc_feature (532)..(532): n is a, c, g, or t
  misc_feature (890)..(890): n is a, c, g, or t
  misc_feature (1301)..(1301): n is a, c, g, or t
  misc_feature (1520)..(1520): n is a, c, g, or t
atacagtaaactgcaaaagtattttccaaggtgagaggtttaggttctgtaagaagaaagcaagagcaaaacaggaagagtgtattggggtgttacagtggctgggggctggaggtgaagaatcctgatgtagangggaatttcccaccagcctcaaaggataaatggcacaaagtgactctctcntcttggaggccaattgaggagggtcaaagaagagaggtgggaatggagtccacctgcttgntacaaaaataagtgtaaacgtagtaatgcactttattttagcagttacagtcaaaggaggaaaacataaacaaaacagggcttgagttagacagtgatgcttgtacatgtcttttgggtgcaagaaaattctctataagcctgagactttggcaaagcctgagcactgtctcagggggatacttttgtagtgtcctggtagtggctagcagctgggctgtgctacattaagaagtctttgtgaagaacagattttaatgatgaaagacaagtttcactaactgcncatacttagaatgataagaataattgttaaagtgctttgcaaaaatgagaaacatgatttaagcattttgttagtgatgatgatgatgatatcagataaaaacatattaagaatatttaaatctaaaattacaaaacgaaaacataaatatgtttaaagctcaaatgtccaatagcttgcattatctgtactggtgtttccaagtagtaacaagaaattatgtatattataaataaggttgaaatactggcaaattgttagtcttatatcaatgtattaatagaataaaaaagatcacggtagttctatttatcaaaagtgttttcttaaaatgcataaaaatcttagtagaagctangttattaaacaaaattggagaaaaatagttatattcaaaagatttatacattttggagatgatcccagttatgatgtgattgacaaaggactttttttttcatttttgtttaataaaaattgattgcacttattacagcgtcatgcatcattctattactggagctaggagacatttcttccttattcctatttgcagtcacttttagccttcaaaaacacattggcttgaaattcatcatcattgttctcctgattcgtaaatgagaattttcattgaaaatttggtgaaattccattctccattttttgagttactggagcattaaaattagatatttttcacctgcatgtcgttttaggtacaatttggagtatttttctggtgaaggtcattgaagaaaactttggngtgagcatattcctgaaagtagaaaactattttgaaaaattttatataaaatttttggtatttactttggatattatagtggaaacaaaatttaaaaaacactctaaaactacaatttctgtttattcttaatttatagtatttattcaattctcttttctaattcttatcgttgtactcacatctttctggggacactgacatgtcttttcctacatnagattcagtacaaaaatacactgtattttcattataatctaaaagagtaagtgtttccatattgtaatgcatatcaattaaggtattttaaagattatattctatgttaaaaataaatgtgtgtgtaattttttgtaacttttatcatgacttaattccttgaaaaaaacaaaaataatgatttcatctggatttcatgcctagttacatgacccagtagatttgactcag

SEQ ID NO: 240535 - DNA, 359 bp, Homo sapiens
cgggattgtattgaggattaaatgagatcatgaaggttagaaacctggcacaaggttggcattcaaaaatggagcttgttggctgggcgcggtggctcactcacgcctctgatcccagcactttgggaggccaaggtgggcagatcacctaaagtcaggagtttgaaacgagcctggccaatatgatgaaaccccgtctctactaaaaatacaagaattagctgggcgcagtgggatgtgtctgtaatcccagctactgaggcaggagaattgcttgaacttgagaggtggagtttgcagcaaaccaagattgcaccactacactccagcctgggcgaacaggacaaggctccatctca

SEQ ID NO: 240536 - DNA, 844 bp, Homo sapiens
cttttatccattttaagttaaattttgtatatggtgttgggtaagggtccaacttcatctttttgaatgtgaatgtccaattttcccaagcaccatttgttgaaaagactgtcctttccccattgcatgactgtggcaccattgtcaatagcattttaccatatatgcaagggattatttctgggctgtttattctgttggtctgtatgtctgatttgccaataccacgctatagctttgtagcaagttttcaaatcaggaaggtatgtgtcctccaactttgttctttttttcaagctgcttttgactattcagggtcctttgagattccatatgaattttaggatggatttttttatttctgaaaaaaagaagtcatttggattttgataggggattttattgaatgtacagaatcaataaaatccatattgatcaatacagattcaatatctgtatcaatctggggtagtgtggtcatcttaacaatattaagtcttccaatccatgaatgtggatatctttgtgttttctttgatttctttcagcagtgttttgtggttttcagtgtacgagtcttttgccttcttgattaattcctaagtattttttattctttgtgatgctattgtaaatggaattgttatcttaattttctttttatattgtttattcttagtatatagaaatggaactattttgtgttgactttgtatgctgctactttcctgaattcacttactctggcagggtttttcgttgtggaatatttagtgttttcttcgtaaaagatcttagcttctgaaaacagataagttttcttcttcccaatttgggtatcttt

SEQ ID NO: 240537 - DNA, 426 bp, Homo sapiens
ctcattgtgcaacaagtcactctgtagacggagccccttctgttcccagcagcgggccagatgcaagttttgtggtctccacctgctctcagcctgcaggccagctggacagaaaacagtttctcacctgcagttcaacaggcccacccacagtagcccaccttcccatggaaagtccctgcaagcagagctcagtggcctcgccaggaaccccagctctgagggcgcttctcctctctggctcagtgcttcctctgagacggggataagtccgcccaccgcatagggcagctgtgaagatcgaatgggaaaggcacaggggctctgagcacagggcctggcagccgacgccgggtaaaggcgggctcctgtgatcatcagtgctagtagaaatactgctattccagggtagatgctgcagctttt

SEQ ID NO: 240538 - DNA, 313 bp, Homo sapiens
cagagagggggctaagggtcgggcttgatgacggtgtgtgaccactcatgggacagagtggtctttaactggagggaaaatgctcgtgccttgatgtgaagtgggaaaagaccaatacaaagacatggtggtatcactgcaagcaaaagactgcttacagacaagaggaaagactggaaggaaacacccagaatggccagtggtcagctttgggacatgagtatgactgatttaatgtattcctttataatttagaaaatgttctgtggtgggcttttgacaattgttgaataaaggttgtataacaaaagtg

SEQ ID NO: 240539 - DNA, 358 bp, Homo sapiens
aggagggtttcaaaccaaaagatcccctggttaaccttcagctaattataagatttaattaactagaaaaactcaatccttgtttattctatttaattgagattttaccatatttaaaatgatgttactcaagtgttctcattaatatttaatgaaagtgtgagagaattggctaaccaaatttactgtgcttaggtaaactgtaattaggaagggttagcagagcatcccaagggacctatcaatcacaaaatgaagcgatacaattacagatgaatttcaacaaggaaacacacaaaacagtgatcctcaaaaaagatggaataaaattacttgaatgtggtagtcggttctgaga

SEQ ID NO: 240540 - DNA, 762 bp, Homo sapiens
gcaatccacccacctcagcctcccaaagtgctgggattacaggcatgagccaccacgccagcatcatgtataataggaatttagtagaacgtaaagatggcaccacaagtcgaaggagaaagggcatacaggctcgttggatgaagctgaacaaaactgagtccatccctaactccaggtacaagtgtagaattcaggcagactaaagatttaaatgagactggtaaaattagaaagtaaccaagaaaacaaaagattatctctgtggcttggtgcagcagcacttcgggaagatgaggcaggaggatggcttggactttgataccagcctgagcagcatagtgagatcccacctctacacaaaattacaaaattagctgagtgtagtggtgtgttcctgtagtaccagctactcgggaagctgaggtggaagaattgcttgagtttgtgaggtcaaggctgcactccagcctaggtgatagagcaaaaccctgtctcaaaaaaaaaaacataataaaagattatctttgtgaattaggtatctaagggaaggactaaacaaaaccttaaaggcaaacattgtaggcaaaaagttgatgaacttgtttaaatctaatttaaggattttgtgctattaatgacatcatagacatggttaatacacagataatttactgggagaaaacattttcaatgtttaaaattctcaaggaatgtacagggaattcctgcaaatcaagaagaaaaagaacaaccccagta

SEQ ID NO: 240541 - DNA, 447 bp, Homo sapiens
tttttggttggtattgaatgttgctgtgttatgttccagcctttgagtcatcagaactggaataaaagccttactaactagacatcatacatttttgtcccgtgtaataaatagcatgttactatctgggagctgaggtgagttttctttaaaaaataattttattctgattacccttgccttagaattctgaaaagattaaaatagctcttatctgaggaacttggattctgagcatttaaactggaaaaatgttctagtcagttatcgacaggctgatgactaacatgtggacataatcattaccaaagagtgtgctaacttgttgacagcatgtacttttaaaaatgtataaccgctataggaaatgttggcagataaataattaccttgagagatttcagtattgacttttaaattaataaaagttacgtttattttcttaag

SEQ ID NO: 240542 - DNA, 401 bp, Homo sapiens
gctatagactctccaaggatttctttcaatctgataaatgagctattttcctttagcaatctgaatttggataagaaagcttacaggatctagaatccactattattgtcagtcccataagcctgtaacccttggacactgagaaatgctattaacagcacttgccatttgagtgacattcaggtaccatgtactgcacagagtgattctatcatttaacttcttaaagtttcaagtcatccaaaagaaatatgctccacctactgaagttgcagtatttaacaaatgacaattttctgcctgtcttgccccaggagcaccaaatatttgaatgcaaaattttcataagagcatgagacaatttaatacatttatagaattctttaaagagaaagagagag

SEQ ID NO: 240543 - DNA, 452 bp, Homo sapiens
ataaatttactaaatcacaatccagtccttttatgtagctcattctttataaaagaattaaaatcttcttcagtaacatctacttaatactagttattcttcttagagccatatataaagatatttcttccttttatgttgtaacctgttacatattggaggagtactatcatattcttcatgttttttttttccaggtttaaatatatttggtttattttgctgttccttttatttgtcatggtttccagaccttttgctttcctatttttccttctgtttcctgtaatttgtaacaccagaagtgaatttttattttagcaaccacatttcattactggattgtaggcaactgaagcctaagctattttcacatataataccattaaacaaaatgcctcttaggctgtactttttcaggtgcaattgtatgtgtgtagttaatgcattga

SEQ ID NO: 240544 - DNA, 2080 bp, Homo sapiens
  misc_feature (866)..(866): n is a, c, g, or t
tcgcaatgaatactgtttttatagtgctgtttttcaaaatttctcacctccctaccctttacttcatttggggtctgcattttctttgtatttccccttgcccttactttcttcttataatacgtattacatttctgtagcatttaaacttttgatgaatactttcccctggtactatttcttggatactcacagaaaccctacaaattaagtaatgtccatcttttccagatagtgaatccagtactgaaatgttaaattaattgttcaatattccttagctagtaagtgggaagagccagaattcaaacctatctcatcgctttatacttaaattttttttctatcggtcttttttcagtatttgcgattttattaagaaggaagtttagaccatgggtggcttaacatgccctaataggtgaatttttttttggctttccagatggcttttatttatttgcattgcaaatgctttttttttaaaaagagattttctgaggctcttagttgtttactacttaatattctccactgtcatttctctttaatgacttcattaaaaataattgagcaaagtgttataaagtttgattctatctcctaacatatttttccattattgctaactactatgtaggacagaaaaaatgcttgaagtttcctcaaatagattttattatttaattctgtctgactttaaaagatttgcttcaaaaatgtctgttaagcaaaaagtatgcttgaattactaatttaaacacttcctgccagaatgcatttttttgcgtattaaacatggcattccagaagaacatagtggccttatatgagcttggtcagaacttcttttggctatctgaatntgtaaattgtcattggaacacaatgaaagtgttttatgaagtgtatttgatggataagtgagtaaatcaatgaaaagcttgcacatagttttttttacaataactacttacttgaatgtgtacctttgtgatgttgctgatattttagaggtaacaacagaacaaagacttctagatgaagaacactgacaagaactttgtataaattgtttattgtgatatttgcttatattaaaagtcatgtatctatttctgtaatttgcagatagtctaacatcatttataaatatttaactgaagagttggcaatggcttttttaatatgaaaatattttcaaatgtgtgaaagccggttctgacaattaaaaaaaaagttttctatttagtttctacacatacaataaatatacacacttggtaattttgtactggtaacccgtaaagaattttcctgtcctattgcggttaccgttactgttaagtttgcatacagtaaaacaattttaccttaatgcattagtttattggaaatttactgttagctatgtaaatatactagcataattaaaatgttatttgataatctgaatgtaaatacacttaaaaattacttttcaattaagaaatgtcgaaggaggccgggcgcggtggttcatgcctgtaatcccagcactttgggaggccgaggcgggcggatcacgaggtcaggagatcgagaccatcctggctaacacggagaaaccccgtctctactaaaaatacaaaaaattagccgggcgtgtggcgggcacctgtagtcccagctacttgggaggctgaggcaggagaatggcgtgaacccgggaggcggagcttgcagtgagccaagatcgcgccactgcaccccagcctgggagacagagcgagactccgtctcaaaaaaaaaaaaaagacaaaggaaattcttctagttcctttaaggatttctctagcacaggatcagagaggatcttggttattggtgactggtgagattctgttgggtgtttggaagcttcaaatgcatggagccaccccttaaaaatgtctcactggaggcaggcacggtggcttatgcctgtaatcccagcattttaggaggccgaagcaggtggatggcttgagtatatatacttcgcgagcaccgtgggcaacatagtgaaaccctgtctctacaaaaagtgcaaaaaaaaaaa

SEQ ID NO: 240545 - DNA, 1105 bp, Homo sapiens
aggagtctggtggcagcatgcccaataccatgcacctgccctacctcaggcagcgtggtggactgtgtggggcctccacctgctctgtctcccttccaggctgcctgatggagtctggctcctggagctgagccacaataatctcagccatctgccggctggcgccttccagggcttttggggactgcgggtgttgctgctttctctcaatatcctgcgggatctgtctgatggggccctagggggcctcagtttcctggagcagctgaacctcagccataaccagctggcccatctgcccacagacttctcggctaccctgggctctctgctctgcctggacctctctcacaacctactcacttccctggaccccaccagcctgtggcgcctggggggcctggagcagctcaacctgagccacaaccagctggctgaactggccgcaggggtctttgggggcctcttccacctacactggctctcgctggctgggaaccagctgcagcgggtgaagggtgctgccctgaccactgtgccgggcttggaagtcctctctgtagctgggaatgacatcagtgagctggaggccgaggcgtttgcaaccttaggagcactgggccttctctctcctgggtaaccgactgcagcacctggaggtcaaggcagtggcaggcatccggacagcaggcatgcggctgctgttgttggataacccctggacacgtgactgtgacctgcagtgagccttcggaaagttgggtcacctgcggcacttgagtgtcgtagacctgggcatcctgacttgcgctgggcccgaaaggctgtcaggggcagtgctgagtggtgtggaggcccagctttgcctggctgagactgccactgtgctgggcatcacaggcaccgtgctgctcacagtggctgtggctgtgctgatggctgagcgcaagcgaagacagggcccgcaagaagccggggagctggggagctttctggagagactatttaatcagcaggcagatcaacaggccaaaatttccaccataactgcaaacttgaatgcggatgaatggattacaacatggtcaaaccttgcaatgagagg

SEQ ID NO: 240546 - DNA, 468 bp, Homo sapiens
gccggggcggcgcgtgagacccacctgctccagagcctccgcccgcagctgtcggtgcctctggcctgcgcccaccccgcccgctcctcggggcgctttggaggaggcggcatcggcgctcgcccaggggaatgaggttctaaatgaatcacaactggcgggtctgacgtcgggcctttgcagctgctgttcccctgcctggagcgcacttatcacaagatgcctcagcagcccccacacacctgggatgagtatcaggtgctttgttgatcccatgctgtgtgctcagggagacaaagcatgcacgcatggggctgtatccacctgcagcagctggtgaatgactgcagaaggcagccccagcccacatactgctacttcagtgtgactgccactcctctcactgagagtccgggggcgtattccttccccttgactgctctaacaaataaagaatggcagaagtga

SEQ ID NO: 240547 - DNA, 455 bp, Homo sapiens
ccttactctgtctcaggcccccatccctgtggccggaatgtcaaaggacaatgactactttgtgggtttccgtatagctctcctttcccacccattccctgggatgctcactggggaaagagaccaggcctctctgctgaagcagcagtgcctggagcacaggaggccctccatttagtgatgagatgcctcagcagcccccacacacctgggatgagtatcagcccatgcagaagagtccccatggaaaggaactgaggccccagctgacagccaacatcgaccaccagacacgtgaatgaatgagtcctcggataattccagctcccagcctttgaattttccagctgaggcccagacatcctggagcagagacaggccttccatgctgtgccctgtgaattcctgacccatggaatccatgagcaaaataaatggttgttttacaccactca

SEQ ID NO: 240548 - DNA, 750 bp, Homo sapiens
taaagggcaaactaaatcctggtgacacataagatgaacactctccataaaagatattatggcttccaactttgttactgtctgctcagtcatttgctctgagagagatcagctgctatggatgaagagaggttcacatagtgaggaactgagacctcagaccaagagccacgtgtgtgagccatcttgggagcagctactatgaccccagtcaagccttcagataactgcagccccaaccaacatgttaatggctgtctcatgagagatcccaagccaggaccacccaactaagctacccctgaatttctgaccctcagagccagtgtacgaaataaatgtatgtgtttttattttattaatattgtttattttaatgagcactctcttgtcccagcatttgggaggaggagccaacgtgagagtcctcttccagttacatcaccatccatcctgaggtctggaacacacaccattcacaggatgcaaaacccagcacaggggttgtggacctgagaacctagatgagggtatttttatcttcatgcttttgaatacagataaaccacctataaaaagcttagcccagaggacccacttagtggctcttgtcgtggtatatcatattgacttcctattttctccatttaaatatgtgtcttctcagaaattatgggcctttattccgtgatctgaaagttcgttaattcaaggagaaaagatttctgaaaaccaagttactattaactc

SEQ ID NO: 240549 - DNA, 437 bp, Homo sapiens
cctctttcctttataaattactcagtctcaggcatttctttatagtactgtgaaaatggatgaatacagacagccgactgcatggcagcacttcacacatggaggggggccttgagggccgtgcacaggcaagtccatgtgactgaagatgaggtgtccattcctgggttcttgatgtgaactgcaggtctccacaattccttcctcccagagaacttcatgaagtaggttctcaagatattatcatttatttatagatgctttttaaaattcaaaatataataaaccatacaagggaacataacaaacacctgtattcccaccacccagaactgttagtatcccatttaaccctcatttcttgtcccatttttttccccaatacctccaaaggcaaacaccatcaagtttggtgtgtgtcatatatacctttatta

SEQ ID NO: 240550 - DNA, 440 bp, Homo sapiens
tttacctaattctcaaaccaaagccagcccagtaacaaaatgacagaccatgtaataagtcttggttgtgtaaacactggaagaaaaggcaaaaagccagcacagcatcttgcttttccaaagccctaggctattactgaaggatgcctcaactgtgccttcttggcaggagaaggtcatggcgacatagaatcaggtcaagaataagatagaattctaaaacaaagggatggttaaaaaataaaccacattaactatttagtttttcttcctagagctattggcacaattcctggttctgtcctgaaagataggttgtagtcatctggtaatatttctgattttttaatatctgtcttatgccccagtttgataaagcgtttttttaaaagacttaatagtctttgataactaaaaatactatctttatcacttatatc

SEQ ID NO: 240551 - DNA, 453 bp, Homo sapiens
ccgggcccgagagaaagaaactgcactttcgttttttagcagcaaagtttgttgatgtactttacaacttatcttttctgcttctactcaggacagtcaagacagtgctcagctagatgttcacataactgtagacataaatgtgaatctatttaacgcagtaattaattcaaaaagtgtttttagcatcctagcatgcatcagttgatatgaaagtagtaaatgttaattgagtggtcttgtgcatcctggacttctcatctgtgcatattctcattctttgcctgcaaagggccagtaaaagcacagtgatggttgaacgaatgtgacagcctcctttgctgatgccttaccccaaggtaatttggggaaaggttcagggaaacagagtatccaatccaatactctggactgggtgctggcaggaaggagggcgattgtatgattaagtat

SEQ ID NO: 240552 - DNA, 371 bp, Homo sapiens
gcgaggccagttgtaaatatctctatagatccatatagctagatataatactataccttaaaaaggatatcttgccctgacgtgctgcaatgagagcagttgaactctactgcgactcatactctgtaggttaagtgtcatttgctatggatttggtcattttagcctgcacgttgccagatctccccttgttgagtcttgtatgtggtctgtcctctgtgtcatttgagtcctcagctgtccccaaccccttcccagcccctccccagcctgcagtcaccccctgtccagcaagctgcctccatcccatccctctcctcacctcacaccaggtaactctggaagtgcagaatgcttggtagtttggagct

SEQ ID NO: 240553 - DNA, 428 bp, Homo sapiens
cagccagtagctgggcttgtagctcagacctgggacctcttccacataagtttattatcaccttactgcccccactagatgcatattgggagctggagatggtgaaaatagacacagcactttaggggctagatgagtatacagctggtttaggagtatatctgagttatgtttataataaatagataatatgacagaataaatgtttgggattttcttttggttccatcgaaagttagaggacctccttctaggatttgtttgcctcttctggaataatgcagggcctatgtgactcctcagggaccctggatgcacacagttcatgtccccagggatgaggatgccaagaattgggcagaggtaaatgaagtggtcatgcttgggttaccagggagttagagctgaacctggacagtagttaaagg

SEQ ID NO: 240554 - DNA, 449 bp, Homo sapiens
ctgtttcctcagctatagaaatgaaaaggccgtccttttcttattcctctctgattatagtatgatgtcataatagctggtgttaatcttgtttatcaaaagttaccttgtctgtttattacctttatgatgtaaaaggtgaacgttaacacaggagggagctggtgagtgatttgtgttaactttcatgcttgagattgaaataacgacattcctttctttcttccttggggagctgtaagcagtgttgcctagaaaaaggctgctttgggaggaaaatggaaggattaggggaggaggaaaaaggtgaggcaggagagcatatggttggagcaagccaattaatctgaggcaggagaatctcttggatccaggagaccaaggttgcagtgagccgagatcacgccacggcactccagcctgagcgacagagcaagactccatctcaa

SEQ ID NO: 240555 - DNA, 529 bp, Homo sapiens
ccgagggcgtgttgaggaaattccattcaagaccctcatttccgaaagtgctctgtgattagcccggctttgtgccagccccagtccagaggcagagaggccagcccttaggtcaccaaaagcatcaggaaaatacaaatgcgggcccctttacagcccggcacaggaggttaaaggatttgctttgtagtttgtttatctcacagactgaagccaattatcccaattactaaaaaaataaaataaagtttactacagattgtatttttaagttcatttaatctccaaaacaggctgctacacacagttttcctttggttccaacaactcacgcccagtctctgtggcagggaagacagcccctaagggtcacatgtccaagggccaggggaggtcagaggtcacttaatggttcccaaatgcgctagcaagtagtcatagatttgaactttgcattgttgctgcggacccagggccttcttgggaggggagagctgggggagctatctctgcagttcaaaggcgggcg

SEQ ID NO: 240556 - DNA, 599 bp, Homo sapiens
gtccggtctctagtactgatcttaagaagaaagatttggaatggtttgccttttccagaatggaaattttgctgtaatagcttgagaacaggagaaaaaaatatttgtcaataggctaatcctaaagcttaagctactagttggaaagcagtgtccccaccacaagttttgtgctgctttttcctgaagaaattttttaaagtttcgttatgtgtcaaaacaattttgatggtttcatcctacatttagtagaggaaaataaaaatcatctccataccagaccagatgaatctaacaaaatcttttttttacttgctgcaaacacttacatccatgccactcatgagagctgagcatttgccgttgtacgttccttggtctactgttctcttctgtcatgtaagagtgggccttgggcatgaaggctgaagaatttagaggttggaccacaaaagacaaacgggagattttgagggcagaggggaagccacagccatttggcagttctagtgcatcatcaaggagtacctggctcccctctccccctcacctgttggcaagcattctgccttccccgggacctcctccagctgctccag

SEQ ID NO: 240557 - DNA, 912 bp, Homo sapiens
aggagaaggccgggcgcagtggctcgtgactgtaattccagcactttgaggggcagaggcaggtggattacctgaggtcaggagtttgagaccagcctggccaacatggcaaaaccccgtctctactaaaaatacaaatattagccaggcatggtggtgcatatctgtagtcccagctactcaggaggctgagcaggagaatcacttgaactcaggaggtggagcgtgcagtgggccgagattgcacctctgcactccagcctgggcaacatagtgagactctgtctcaaataaataaataaagtgaggagaaaaaaataccatctctgtcttcacagaacttatagtttgagaggggagaatcccacaagtaaattataaatctcagctgagattatgcaaagaagcaaaggccggacgtggtggctcacgcctgtaatcccagcactttgggaggccgagacgggcggatcatgaggtcaggagattgagaccatcctggctaacacggtgaaaccctgtctctactaaaaatacaaaaaaattagctgggcgtggtggcgggcgtctgtagttccagctactcgggaggctgaggcaggaggatggcgtgaacccaggagcacaggttgcagtgagccgagatggcgccactgcactccagcctgggcgacagagcgagactctgtctcaaaaaaaaaaaaaaaaggaagcaaagtgcccagctgggatggtggtttcagaggccacagtgggagcttcccagagaagggatgattgagctaagtctaagcaaaaggggtggtcagggcagcagctgctccaaaacaggggctgggggcttatgtggagagagaagacatggagagaccatgcccagaaggaggcggcggcttcagtgaacagtgcagg

SEQ ID NO: 240558 - DNA, 400 bp, Homo sapiens
agccttttaaggagtatttgtgaagaggagatgagaaggtagatgaagaggaaaatgggtttgaacttattttttttttagattttagatgatagaaacctgagcatttaaaaaactgatggaaaaatccaccagtagggcagacattgaagacaaagaagacagtagggataatttttggtgtgaggattctgagaagtttgggaaatgagatccagagcaggtaaaaggattgactttggagaggagaacctctgttctatcgtagccagaggcagagaaggagagaatgagagttgatgtgtgtggtgggaaggctttaaggaagcttccctttgaagggcattttttatgtaaagtaagaagtgaagagagttgagagtgaaaagagaagaagtat

SEQ ID NO: 240559 - DNA, 369 bp, Homo sapiens
agcgccataacgttgatctatagatgaggaaactcaggtccagccagacacagtaatttacatggatgagcttaaggccagtggtggaagcttgctaaagagctttccaatcacatttgaagtcttacatcttggatactctggcctcatttgccgctctatttcatcacttcaaatttgacacatcttgtattttgattatgtagattatggtttaaaatggaagtctctgttgacacttgaaatgtccagagtatctgttcatagaacttttgtaaataaacatgtaatctattttaatatgatgtcatctgggatgacaaccacaagtgcaataagaagtaaaaactattgtgtgtttattactgc

SEQ ID NO: 240560 - DNA, 498 bp, Homo sapiens
gaatacaaaacccagaaagaaatccatgtgtttacagccaaattttttttataaagttgccaaaaatatacattgataaaggacacaccctcttcaataaatgttgctgggaaaagtggatgtccacatgtagaagaatgaaactaaacccctatctctcatcatataaaacaatcaacccaagatggattcaggacttaaatgtaagacctgaatctataaaactactagaagaaaacaggggaaacacttctggatattggtcttggcaaagattttatggctgagaactaagcacaggcaacagaaacaaaaatagacaaatgatactctattaaactaagaaccttttgcacagctaggaaacaatcgacagagtctctgaagagacagctggtggagtgggaggaaatatttgtaaatgatatcccacaagggagttatacaaggaattcaaacaaatcaacagcaaaaacaaaaacaaaacaaacaaaaacc

SEQ ID NO: 240561 - DNA, 437 bp, Homo sapiens
atttctctgccagagaggcagtggtagactcagtttctttaggttgaagtgacctgaatagcaatgtcaaaaaatgtaagatcagtcttgctgactttggaaccacatagacaagatactgtgaatgtgtcatttgattccactagtggttaataaaggcaaccctgaatactagtaaggtaggaagaaactaacattgaattctgagtgtacacacgcacacacacacacacacacacacacaacatagaccaggtttccagaggtgccagttgttcagttcaagccacagaacagcccttagcatgctaacctgcagaataacagccatccagattccctcccagcctgatcccacttcatttatcctcttgacctccttacctcttactctttccttttccctccttcgttttatccgatcagatttcaagatt

SEQ ID NO: 240562 - DNA, 429 bp, Homo sapiens
cccaccttccttacgaggcaggttgtgttgactataaattgttacttgaatattccccttagtgggatacagagggtgtctcatctcactctgccccaaatgacttattagaacattccttcccattatcagttaggaatgattttggctgcaaataacaaacacaacaaagatgagagtaggttttaaaaataggcatttatttttctcacatttctggaagtccagagataggcagcatctggtgttatttctaaaactcagtaatatcaaggccaattgctacaatttcttggcttttctctcataatgggcaaggtggctgctgcagcaccagtcatcttgtccacattccaaggagggagaatgggaaagagaaagggatggcacctatatcaggaaaacaaaggatttcactgcaaccctgga

SEQ ID NO: 240563 - DNA, 377 bp, Homo sapiens
gaaagggttttgtcaataaattctgacagaagccttctaccagaggcattattattactcttcccagtatacaattaaagaaacagtctaggggagattaagaaacctgccttaggctgggcacagagggaggcagaggcacacagatcacttgagcccaggagtttgagaccagcctaggcaacgtggcaagaccctgtttccacaaaaattgtaaaaattagcctggaatggtggtgcgtgcctgtaatcccagccactcaggaggatgaggtgggaggattgcctgagcccagggaggtccaggctacagtgagccgtgactgcaccactacactctagcctgggtgttggagtgaaaccctgtttcaaaaaaa

SEQ ID NO: 240564 - DNA, 413 bp, Homo sapiens
ccaaggtatttacgatatggactaaactcaagcatagaaaatctagtacaggcataccttggagatactgcgaatttggttccagaccaccgcaatatgacaaagtgaggtctcacaaatgtttcatgtcccagtgcaaatacaatcatgtttataatgtagtctattaagcgtgtaatagcgttatgtctaaaacaatgtgcataccttaatttaaaatattgggagagaggaaggaaaaagtatatatacatttgttaattgctctgaggaaggagggtcgcatgagcccagaggttcgagattacagtgagctatgattgtgcctccgcacccctgcctggcgacagagtgagaccttgtctctaaaaataaacaagtaaataaaatacatgactgctaaaaaaatgcta

SEQ ID NO: 240565 - DNA, 424 bp, Homo sapiens
ccagcctaagcgacacagtgggaccctgtctcaaaaagaaaaaaaagaaaactcagaagttgtagaatatttggggtaaggcaacccctaaaaagtaagatgattcctatttagattcctaatagacaatagtcatataaatatggattttattccctttctgctgcttaaaaagggtttgattccggaggccctcataggaatcatttaaaaaataagtcttaataaatgattatttgccaggcactgttgtaattaaaatctgacagtttagtgagttaaggactgatatcctcatttttcacatgaggcagctgaggcaggaagatcacttggatcatgtgagcctgggaagtgagggctgtagtgagctgtgattgggccactgcaccccagcctaagcgacacagtgggaccctgtctc

SEQ ID NO: 240566 - DNA, 2358 bp, Homo sapiens
  misc_feature (681)..(681): n is a, c, g, or t
  misc_feature (1691)..(1691): n is a, c, g, or t
  misc_feature (2149)..(2149): n is a, c, g, or t
ttgttcataggggtccctcgttttctgagacacctcatctgagcactgacgaggggacacaactcttggctgggaagcaggagactgagcattgccttcaagccatccccacacatgtgacctcagtcagcattctgccctttcatgggtgtcagttgtctcgtccataaaatgggatgatgttcttgttccagccggcatactggatgactaaatgagggaacaggtaagaagctgcattggaaaaaggtaccattcagctgcaagacatccttgtgcagttcccccagggctaatggggtttggttgcccacctttgctgtgtctcttcgtggcgccagcaggtggcagcattgcctttgcatgtgccggctccacctctggcctctcccagacatgcagcgtgtagggcaggggaccattcttcacccaattcatttcaggggtcatgggaaggagggatctgaaatgccctgaatgggaagggcctggaaagaaaatgaaaatctcattcctcccctcaaagaaacacagataagccaggagagcaggatctggtgcatgagcccaagagggctaatgtgaccacttaggctgaagggggaccttacctctctctgccacaacggtgtcccccaccacctggaggagggaactggggatccagaaggcttgggtccntgtctttggttggaaaagtcagccagcattgcagtggggcagcaggaattcctctatttttgtgtgtgcaacagagttgaaaacttaattcactctataatttatttgtgcaaaaaaaaggtaatttccttatttatgagtctataatgaatctggcctttcttccaacccctgcctgatgataagcgagaaaaacaatgaaattttcaacttgatttgaacatcctggggccagagagtttagccggtcttgttaagtgatcttattaatttctcttggataaaatgcttagttctcagactgctttgcccagcttctcccactgtggtgctgttggggttttgtagacagtcaagggcagcttgtgtggcatctggtaggaggcatgagttgggatcctggggtgtggtgtcctctagacccagcaaggtcccctgtccctcctggccactgatcatactagaagctgagtttatgaaactcatggtccagtccctcctgatctgactagagcccatgtggcgcccctggctggccagccctcctgcacctgggcccctcctccccaccaagtctcctagctgtgccaccatggccccagtagggctgctggctcacaggaatggaagttggctttgaaagctgaactttagtggtgcctctcccttaccggggagccctggtgctggaggcagaggccgagttggtttgcagctgcctgggatgccacttcttcccagagttccaatgtgagttggggacaagggcttctttctctcagggaggggtgagtgggccagtgcttggctctgcttgttatccttctaatccccttcgtaccatcccctgggcaggaaggaggggaccaacactcttcctcttcttgctcagtcatccattacataaaattccagggccacacccaaggagagggatgagggaatccaggaaacatgctctcaaaagaatagcctgctttagaagacttttgatctgcagcataatcctnttttgcatgtcaaataccaaacattaccacattttttcttctgtgcattctgtctatatcaaacattaatcctggtctctctttaagcagagatgcatgcctcaggccaatgaagatgaagatcatgtaccatcaaggcaaaagagaaaagcactgcactccaacccgggcaacagaattattattattattttttaagagataggatatcattctattgctcaggctggagtacagtcgtgcgatcatagctcactgtaatcttgaacacgtggactcaagtgctcctcctacctcagcctctaggtagctgggactaggggtgtgtgccaccacacctggctaatttttctattttttttcaatagatggggtcttgctgtgctgcccaggctggtcttgaactcctgagctcaagcaatccccttgcctcagcttcccaaagtatggggattacnggcgtgagccattgtgcctggcccaaaatttttcaaatatcatccttttaagcttcaaatgttaccaacattggcgaatgcaaccagaggagacataacacataaaacatggggggtttatccacaaggagaattcactatcttgctggtgttaggatctgtccttccagggaggatacgccatgagtcagaagtagatgccactcagc

SEQ ID NO: 240567 - DNA, 534 bp, Homo sapiens
gactttttcgtaataaggctgtcataatactgcctgatgtattttatgtaatgaattgcagactgcagaaagcggggacttagctgagaaaattaatcgtgcactcattcagcaaaggtttcagggcctgctgtgtggagacacggttccaagcactgctgcagtagcagggaggaaacagaacggacctcaaacgctgtcccagcaaggactccagtctctgccttgtggatgtgtaactggcacgtgatgtaccagaaactcctgtgtgtggttgtatccggtgcgtgacacagtactctctccagctgctccttggatttgggaagcagccgaagatttacgggccatggaggctccttctatccctggaaatcggcccttgggaattaagctgagttatgtggttaaagccgtcatgacagccatcccctggctgggccagttctgggaataactataatgcttatactacaggatggccaattcagaacttcttactagtgctgaattcaataaaggtttaataacaca

SEQ ID NO: 240568 - DNA, 380 bp, Homo sapiens
cttgattatagttcctcatttttcctggccacaggccaaccctcaatatcctccacctttataaggaagacagcttcaacccagccctaaagggtgactccagcctcttatgatctttctttcatgttgcaaactggactctcttcttccaactttctaattgcaaaattgctctttatttttatgggttcttattacttccaacccaggtgtgaaaatgtcttcttggacacccttatcccatctgtagggcctgtgtaggtccctctttctctcattcttagttgaggattgactgagtagactgcacaatgatgaccatattttaaaagggacaaaggtcacatagcgaagtctctgttcattctcccaggcacaat

SEQ ID NO: 240569 - DNA, 373 bp, Homo sapiens
agtcttgaataaataaatatctaattaaaattgtgacaagtgctaagaaggacaagtataaagttttttaagaagaatagaagccaggccgggtgcagtggctcacgcccgtaatcccagcactttgggaggccgaggtgggcagattactagaagttaggagttcaagaccagcctggccaacatggtgaaaccccatctctactaaaaatacaaaaaattagctgagtgtggtggcaggcacctgtaatcccagctactcaggaggctgaggcaggagaatcacttgaacccaggaggcggaggttgcagtgagccgagatcgtgccactgcactccagcctgggtgaaaaagtgagactctgtcccaaaa

SEQ ID NO: 240570 - DNA, 430 bp, Homo sapiens
atggatctataagcagcaggaagattttttccaaggactgggagcaaacttgcaggctctgccatgtacttattgtggggtacctttagatgaattccctgtgagtgagagaagttgatcaccccaggaattagtcactaagaattcctaagaactttctatcaaaagcattggatccaagccatatattgaaatacaagcgtgattaatcagtaattcacattgccgatatgcatatgcaacttataatcaaatagaactagaagagactttgaagtcacctgactcagccccttgtgtttacagacaaggacatgtagtccaaggttgcatggtgagttcacagtcggattgtcctccctccaaactgaaactaatttgattttgatttcatattcaatatgcaataattatgttctatcagagataa

SEQ ID NO: 240571 - DNA, 338 bp, Homo sapiens
aagacgagaaaaacatcccgggtgctctgcataaaccacacgcaacgaaaaagctcaccgccagacagcttctgtaggtttaagaagactacgtttttctgaccacttcaaaaaaacaaacacgaattcagccgctgctttaataacctctgaccagaggagctgattttgccaccgagttatcggtcagtgctgcgaggtcagtggcctgtgatcatgtttatagcaggtttggcttggatttggtgacacagccagcaaacctgggagattatgaaaccgtgaaccagcccagggaagtgtagtcaagtttcagtttgggcatttctccgggtgag

SEQ ID NO: 240572 - DNA, 368 bp, Homo sapiens
tttacatggcagaagctttgagtgatccacaattggttaatcacaaggatgtttacatgaagccagtgaaatgagaacctctgagggtcagaggcccaggagacagctattgtgctattgatttgtttcttaacttcagaaaggggaagctgatgccatgagcttggatgcaggattcatctacatagcagggaaatgtggtctggtgcctgtcctggcagagaactacagtaagtggaggggagtgtccgtctccattttttctgtccacagttcccctgggctgtgggcatagaaagatgaggaaataacttagtttagtgttgagataataactattgttggaatgtatggagctagtagaaaaa

SEQ ID NO: 240573 - DNA, 543 bp, Homo sapiens
cgggacagttgaaggaacattgagtcaaaattagaattcataaaatccgttgtaacacatctaatgtgaacgcattataaacatggacctgtacttctttataaccagaaatactaggagtagtcaacaaaaggtcatcattaatattagttctgcggttttttccacgtaatttaagaaattctgaacatgtttagcaacaagcatataactatgacaaacactcttagcgtgttttattagattgatttgtaaaacttaagggaactattttatttactggaaccaactattttattttaccagaaccagcacattggattaattggtatcgcacactgtagtcctagctacttgggaggctgaggtgggaggatcacttgcgccctggatgttgaagctgcagcgcgctgtgatcattgccaccacactccagcctgggcaacacagcaaaaacctgtctctaaaaaaacctagaatatctttgtgctatgcaaatcctaatttgaaaaatttgtcattaaattctctccaaacattctt

SEQ ID NO: 240574 - DNA, 553 bp, Homo sapiens
cacgtggctcaagcactggagtaaaccccagactgcagtttaaagatgaaggttttagacccacccttaccacttagtagcactttgagtttaggaaagcaatttgtttctgagctttagcctccttgttgtagtgctaatacctgtttcacctgatagggttgctgagctagcgaatcccgagtcctgcatgttaggggaaccagtagaaaccgaatgtgtgtgttgtgacacctgtgtttctaccttgtgccacctttataggaatgcctggtcagcacatctctaatggcactcggcttgcttctcaggccttacgcctgttaactttttttccccttatgcatctgtttggttttcttccctgactcaacgactgattttcctgaaagtagaagctctcatacgccctctagtgttccctggacatgaccagtattccagcaccacgaacagtgcctggcagctctgggaggttcttcataagtttgttgaactgagtggattctaggtcggcccgatgaattgttttgcctgtctgatttgtataaca

SEQ ID NO: 240575 - DNA, 607 bp, Homo sapiens
cacgtggctcaagcactggagtaaaccccagactgcagtttaaagatgaaggttttagacccacccttaccacttagtagcactttgagtttaggaaagcaatttgtttctgagctttagcctccttgttgtagtgctaatacctgtttcacctgatagggttgctgagctagcgaatcccgagtcctgcatgttaggggaaccagtagaaaccgaatgtgtgtgttgtgacacctgtgtttctaccttgtgccacctttataggaatgcctggtcagcacatctctaatggcactcggcttgcttctcaggccttacgcaaaaggcccattcagtgaagggtcattctgcttcctagtctgtacttttctaccctgttaactttttttccccttatgcatctgtttggttttcttccctgactcaacgactgattttcctgaaagtagaagctctcatacgccctctagtgttccctggacatgaccagtattccagcaccacgaacagtgcctggcagctctgggaggttcttcataagtttgttgaactgagtggattctaggtcggcccgatgaattgttttgcctgtctgatttgtataaca

SEQ ID NO: 240576 - DNA, 400 bp, Homo sapiens
ggatttttaaaaaaatgtttaagacaattatactatttactaatatttttaaaagtagatcatgtctacaaggcagctatgccaaacatttttaaatagaggttaaaaattaatgttttaaaacattcttttaagcctagaaaaatgataaccaactgatttttaagatattggcatggctagtttgcagaaaaacacattttggtaaacagattatatattttaattcttgagcactttatattgaccagacagtctaatggagtttatcctcatgagtgagcgatttgacttagaacaaaattaaagcgtccataagaaccttcaacagtaatttcttggactgaatttaatctaaattcagcattgtatgagaaatgcgacatttctgctaactcta

SEQ ID NO: 240577 - DNA, 469 bp, Homo sapiens
ggcaaccgtagtttgacagaagagcagcaccttgatttaatgcttcccagcatgtgtccttgagcaagtcacctaacctctctgggctgcttcctcattgggaaaatatggctgccagtaaaacctgccctgtccacctcctggggcacttggcaaacagcaaaagagtccaaatgtgcaggctgggccaggcgcagtggctcatgcctgtaatcccagcaatttaggaagccaaggtgggcggatcacctgaggtcaggagtttgagaccagcctggccaacatggtgaaaccttgtctctacaaaaatacaaaaattagccgggcatgatggcgggtgcctgtaatcccagttactcgggaggctgaggcaagagaatcgcttgaacccggaaggggaaggttgcagtgagccaagattgtgccactgcactccagcctgggcaacagagcgagactctgtctcaaa

SEQ ID NO: 240578 - DNA, 277 bp, Homo sapiens
gctcacctcccaaggctcagcttaagcctcactggatctatagcctttcctgaatccccaacttcaagaggaatgatccttgtctcccacggtatgctccccgtcccgcctctgcacttatttccccacacaactatgactcccggctagatggttcaccacctaaagacagcaactatgatgtggtcatcttaatacagataataccagttacaatgtacactttttaggcattcactaagtctcaccagcctgaccaacctggtgaaacccctct

SEQ ID NO: 240579 - DNA, 2546 bp, Homo sapiens
cccctcaaacttgaaaagaaggacagagccacacaagaggacagctccttctgcagtgcctcctctggcctgactgaaaggagacagcctcagagctatgcctccagacgcatcattcctcttgcaacactgactgttttcacagcaagatgggccctttagctctcctcatgaaatgtgaggctgtgtgccctctctgccttcctctgactacagaggaccactggaatgtatttatggagttggaagagtcagaatgcgtttgcctatgaaaattttttttggaactgaaacaaaacaaaacaaaaaagcccaaccaactttgaacttgttttcactagcccagccgatgtgccactataagccttcaagggccttaccccagcaaggcctctgctttggtgctctccatgacgcaatctgtctctctgcagacacaactctaaggtgtctccagagccaaagtcaggtgaagaaatggggttattgtgtggattattttaggtcagaatacaggccaaaaaaaacaaaactggttctgtttgaaattgcctggctgccctcattttgtcacttgactttacatggagagatactgctccaggaattacccaaatgacaaaataaacaaacaaacaaataaaaccgtacattctgcaccaagaataaataacgcaaagtggagactgagcttattaattttttcaaagccttccttacctgaatatgttaatgtgaattaatgtgctggactggcccagaggaaaataaagtccttctgtagtttatcttctatacctaaattggcagatctatggaattcatgtttgcattacatgtaaagtttttacagttcttacacctggataaggatcttttgactggaaaggtcaatatatttcaagggctttggctctgagaaagaacggcttggtggattccaggtaccaaatcatctgtaaaatcacatgccaaatcccaaaagcttactgtctccaggaccacaaaccaatcaatttgggaggaaattggctcaaataacatcaacacccgtaatgccaatggccaaactctagatggtgaatgtgaaatcttaagtggaatctgctcccaggccaagacaatacaaccaaatcatctggatgcaagtcaagctatgagatggagacattaaagcccagataagacgtgctgaataatagaaagaacatgaatttattggcagaaagacctgagttcaaatgtgggtgtcagtaactctgcggctttggacaaattattaaacctcattaaatctctgttttctcatctggagattgagaccagtagtaccaactttccagggctgatatagagccgaaattaaaatgtctgtgaagtgcctaacacaatggctggcatcttattagatttaataaatgtgagttccctcttcccttgcccactatatggcagagatgtaattcaaaagcagggaggtgggcctccaaacccaagttcttggcacatctgtaatgagaacttgtctgagctgctcctccaccactgtggtgatacaatcagattggctgaacttgaatgattctttcctttatactggcaaaccactctctattattttatgtatttagcccagatgtaaatcttgtacaagtcaaaatcaaaatatataaatcatgcatctcccagtgcattctaatgtgcctgcagtacagcctgatcataaaaatatcagtcatagacctactcagaaaaaaggtttaacattggcaaaagattatagagtaaatactgggcttcaggttctagggaatttgcgaaaagccaataagacatagggaacaccaatagcctttcttgtgctaaatctctctcacagtccccctgttttgaatcaggccatgtcttcccctgggaagaaaagaaatgcaagttcacaaaaaatgttcttgtgaaaagttgtaagctgcatttacaactggggaagatttcagtctcagttgttttcttgctggtcatagatatatttgtcctttgcttgctatggagaaagattctgaactttcagaaaaaacttccaagtctagactccaaagaatatagtttatcttactatggcatttattttgcagacagttccctctccaacacatgagtctatacaaatggtctcacctggcaacatatttcccagcccatgcacccctcccctatccctgatgccctaaggacactgcagagacagctgtgggtacaatgaaaaagtgcaaacttggagtaatgagatcagcatcgagttctaactctgcacttttctctctgactttgtacatgtcacctcaattctatgagttttgacttttgtcatctctataatggggacattagctgactaccaggtgttccacctgaaagctctgtaaaagaaagcacattgtgttatataaatttttaaaattagaatttagagagcagaaactgaagaactgtatgttcagctggtattttccatttttaaattaaaattcatacttgctactagtctg

SEQ ID NO: 240580 - DNA, 860 bp, Homo sapiens
agcggatagacaaactcaaaatgggagacattggacaagataactggccaaactcttccgaagtgtcaaagtcatgatgtcaaagagagaggggagacctgattcctgctccaggacacctcagagacaggacaactaaatgaaaacccagctacagcagatcagcaagagaatcaggctgtctggtttggaaaataaattttgacactgctctgtcctccctgtcctgtaacaggccaacctcccgaagatgcataaagacacctttgccgttgaccaggcagaccctgcatccacaggacatagagagaaaggtgctccctgaacactgatctggataagcattgctgggtcagtgcagaggcgtccatttccccagtctgccgagctggcctaaagctgaggacctcttagtgggagctgaggacatgtgcctgaagaggcaagcccttgactgatggaaattggagtctgagttccatgtgggggactgggaagcacagcaaggtctgaaatgggagacccagggaagggcagagaggaccaaaggaggaagggggtctacagtgtgggaaacagcctggacgcaacagccgggggagggggcctgctctggccccagtggccccttgtaagcaggaaaggcagctggctagacctcttctgtgttattcactctgattttatcctttatcttcccctcccaacctcacctcctttctaaccccaaagccatgcagctaatatgactaagattgctgggcgtttgcttggaaatgcaaatgagaatttctggtagtttcctagtttccttgatctcctttgtcaagtttattgaggggaaaggactctcggttaaa

SEQ ID NO: 240581 - DNA, 432 bp, Homo sapiens
aggatggtctcgatctcctgacctcctgatccgccctcctcggcctcccaaagtgctggaattacaggcgtgagccaccatgcccagccttagatgtaagtcttatgtaaatttagcttttccccctttcattgtaatttcttcagagtactttttctaatgttgttttctcttttctgctgttttaaacactatgaatatttttgtttgaagactcttctgtagtgggaatgtcctgaaacttcaggcccctaaaggattttagattataaaatgtaagtgacttagtcactgactatattatgcttataacagctaagacctcacagatctttcaggcacatgtgtatgcatagatttattaaaattcatctggagagaaactttcgcaaaaatgcatcattcattcctgctccttaaaaacaaacaaaa

SEQ ID NO: 240582 - DNA, 549 bp, Homo sapiens
ctctactgtgctagctaatgcaaagctacctttgcatatgtaaggtctagcaggggagaaccaggaggtaggcagcagaagatcctttataaaagaccaagcctgaaatctgaaaatccctgaaattccttagaaattgatcatcttaactctttctttgccaagcccgcatttcctgatttatatccttgttacagctgaaagaagctcatcatgtaaaggtttatagcaccaccattttcctcagaggattttacatatgcaacctatggatggatttttataagaactataccttggacttcttgcatgaagttaggaaggttatcttcagaggctccaagttttaatgcattccagtgttgtcaaatccaaaagcaattaaatactgttgtgtggttttgaattatagcctgcttgttaaaatagctactgtttcccctaaggacagcctgcatttttacctgatgtcatctgactctgggtctcaagagagtggggaacctaatagaacaactgaataaatgtagttctaagacagtgaaaaaa

SEQ ID NO: 240583 - DNA, 394 bp, Homo sapiens
  misc_feature (24)..(24): n is a, c, g, or t
gcaatagtgctcagactggtagcncaaacagctccccgttaactgaaagaagctcatcatgtaaaggtttatagcaccaccattttcctcagaggattttacatatgcaacctatggatggatttttataagaactataccttggacttcttgcatgaagttaggaaggttatcttcagaggctccaagttttaatgcattccagtgttgtcaaatccaaaagcaattaaatactgttgtgtggttttgaattatagcctgcttgttaaaatagctactgtttcccctaaggacagcctgcatttttacctgatgtcatctgactctgggtctcaagagagtggggaacctaatagaacaactgaataaatgtagttctaagacagtgaaaaaa

SEQ ID NO: 240584 - DNA, 473 bp, Homo sapiens
ttttacaattgttttttgttctaaaccagggttttttaaccttaacaccattgacattttgggctgggaaattctttgttgtgggggcctgtcctgtgcattttaggaggtttaagcagctctggcccctaccagtagtatatgccctttaccccctggggttgtgacaacgaaaaatgtctctagacattgccaaatgctctcttgggggacaaaatagccaccaatcaagaaccactgttctaaaccagcagtctcaaagcatggtctccatggaccactgaggtcctaagaccctttgagggaggagtgtagatgaagtcacaactgttttcataaaaatcaaagttaactgtccattttcaccgtgtcgacatttgtacttacggtgcataggcaaagtggataaaatttgctggggccctagcaggatgcaagggcaccacactgtattcttcactcacagttaaaaa

SEQ ID NO: 240585 - DNA, 696 bp, Homo sapiens
  misc_feature (596)..(596): n is a, c, g, or t
cgggggcggtggctcacgcctataatctcagcactttggaggccgaggcgggcagatcacgaggtcaggaaatcgagaccatcctggctaacacggtaaaactccgtctctactaaaaatacaaaaaaattagccgggcgtggtggggggcacctgttgtcccagctactcaagaggctgaggcaggagaatggcatgaacccggggggcggagcttgcagtgagccgagatcgtgccactgcactccagcctcagtgacagagtaagactctgtctcaaataaataaataaataaataaaaataaagttaaacaattacttaacccaagtcctggactgatgagaggcaaataaggtgctatactcagaaaaaaaataaggaaaggtttaatatgctatgcaagttcagctatgaataagacacaagtatctctcaacaaatatgaagaaagagagtttgttggctgggcgaggtggctcacatctgtaatcccaaaactttgggaggctgaggcaggaagactgcttgagctcaggtgttcaagaccagtctgaacaagatggcaagaccctgttgttacaaaaaaaaataatngcaagtttttattgtgggcgcaattaagatacttgggcaattgccccttaagagggggggttacaataatcggccggggttttaaaaaccgggaatggga

SEQ ID NO: 240586 - DNA, 403 bp, Homo sapiens
tcttggcattgattgtccctgggagagggatcttgcacctggcccagactatgcggccttggcaggagactagtattgcccacaattagtctattagggtttagtttattcagattttctttgtatctgagaccagctttcatcagaatgcatggcagagtcagggtacactgcagctctgaaggccattgccttatttttttcttttttaaaaattaacttactattttgattataaaagtaatataggccaggtgcggtggttcatgcctgtaatcccagcattttgggaggccgaggcaggagaatcgcttgaacctgggaggctttggttgcagtgagccgagattgcaccattgcactcaagcctgggcaacagaatgagactccatttaaaaaaaaa

SEQ ID NO: 240587 - DNA, 629 bp, Homo sapiens
tgtttgtttgtttgtttgttttgagacgaagtcttcctctgtcgcccaggctggagtattgtagtgcgatctcggctcactgcaacctccgcagcccaggttcaagagattctcctgcctcagcctccagaatagctggaattacaggcgtccgccaccacacccagctaatttttatatttttagtagaggcagggtttcaccatgttggtcaggctggtttcaaactcctgacctcaagtgatccatctgcctcagcctcctaaagtgctgggattataggcatgagccatcacaccaagcctcatttttcaataatgtaaaatggttataattactgcgaaagagtgctcattaatattatcatttgtttatatcaaacttagcataagctggaaaaatctcaagcaaatctgtatagcccttagcttatttaaatcccaaaacaaaatgagacaccaaatttacagggtttctttttaagtcaagacaatcttgtcatcaaaggatgaagccaaggaagctaaaagagtacatctctatacttgaaaacacaacagcatagatattatttatgagaaagtgtgttgagaaagggtgggaattaaacaaaatttacatttttccaa

SEQ ID NO: 240588 - DNA, 471 bp, Homo sapiens
tcatcagtaatgcgaggatgtaagttagttgatactcaaccttcctgtctgttctagaattctgtgagtctatgattaagtccttagcaaagaaatatttaggaacaactgcctgtgtgaggataaggagccagacacacctgtgatatgagggcagcccgggtctctaggatctgctctgggccaggtgtggtggctcacacctgtaatcctagcactttgggaggccaagctgggaggattgcttgagctcaggagtttgagaccagccttggcaatgtagtgagactctacctctcccaaaatatacatataaaaaaaattagccaggtgtggtggcatgcacctgtagtctcagctgcttgagaggctgaggcgggaggattgcttgagcccaggaggttgagactgcagtgagtttgtttgtaccactgcactctagcctgggcgacagagcaagactccgtctca

SEQ ID NO: 240589 - DNA, 423 bp, Homo sapiens
gctcactgcaatctccacctcaggggttcaagtgattctcctgcctcagcctcctgagtagctgggattacaggtgtgcatcaccaaacccagctaatttttttgtatttttagtacagatggggtttcaccatgttgaccaggatggtctcgatctcctgacctcatgatctgcccaccttggcctctcaaagtactgggattacaggcatgagccacagcacctggcctcttgagtagttacctttatagcagtgtgaaaacagactaatacacctactatgtagagatactgtgctaaatgcaaatacagtagctgtcttatttatatctatgtaaccagtgcttagtaatttgcacataacaggacttcagtaaacaactaattcagtttatctgtggtataaatccagattttcatat

SEQ ID NO: 240590 - DNA, 781 bp, Homo sapiens
cagccaaggaacaccgggagccatcagcagctgggaaggcaaggaaacattctcccctagagccttggagagggcatggttctgcgagagccttgatttcaggcttctggtctccagaactgtgagagaataaatttctgtcatgttaagctgccacatttatggtaatttgtgatagcaaccctaggaatctaatgcagcactgcttccagctgggtgcagaaacagccccagagttcctctgaacacaagcgtcccaagaaactgcttcccaatcaatcagttggagttgacgccagaaatggaaactgtttgctactcctggattgaatcatccccagcgttcctttcctttcaagaatccagactgcttgcctccccttttctcataaagggccgtctggctttgaggttccatcccttcctgttcctttcaaccttgtaagaacccattgccaccattctattgagatcacagggtgtgtctggaatagagggtggaaagtagctcagatagatgtagacctgaataaatttatacacattatatgtttttaaaagtcagcttttctcttcttggttcttggccaaagtatccaagttaacccatgaaggtctctttctgattcacattaatgataaaaggttaggaagaaagccaggcacagctgcagtggtgtgcacctgtagtcccagccacttgggaggctgaggtgggaggatcacttgagcttaagagttccagaccagcctgggtattatagaaagactttttcccttg

SEQ ID NO: 240591 - DNA, 631 bp, Homo sapiens
gtgagatgaggatttctgtggtagggctgggcaagtagcagccagactccttaccttggggagagccctggatctacagtccctgggcaaggctgctgcattgcgcctcagactagctgctccgaaaaccaaggcagggctttagcttctcaccccctcatgaaggcagcagaatacagcggttggagtgctcttctggaataccacagacctgagttgtcttggctccagtatttagcatctgcgaccttggcggggtgatatttactgcctagtcttcagttatttttcagatttaaaatggggataataataatgcctgtcttataaagaggttgtaagaatttaaaaagttatgtgtgaagtgtattgctgttgttactatgcagcagggccctagaaaacctttctttctccattcagccaactgattactcattttgttttcagatcataaatattcacatcataaatgttaatgtgttctataccatgattgaaaatgtgtgtgttagtattgtagtaatactgtcttttggacccctttcttcaaaatatttgcaaatgtgtggtattttattctggcctcatgtggtacatataatgcatataattggattttcctgttata

SEQ ID NO: 240592 - DNA, 132 bp, Homo sapiens
cccacaaggaaagctctgctccctcctcacagctgagcccaggtcccagctcccacggcgcccttccctctgaaccctgcacatcaccaccccatccccaaccttcctgcatttaccctgcagttcttgcta

SEQ ID NO: 240593 - DNA, 370 bp, Homo sapiens
agactgcttagcatggctagccaggatgggcccagcactaaaagcacaaagttgtagactttaacgtcaaagggccaattaaagtgaaacgaatgaggcctgttctcatatcagcactgaaaacgtgctgctggtctgttacctgaacaaatatcttctctgatccatattggaaaaaagtaagaaggcaatatacatttctctctgtctctgcaataactaaaaactcctgcctttgatgatgagaacagaaattagcaattaacatgaccatttacaaagcatctttatatatagtcatgcactgcataatgttttgatcaacgatgggcatatatgatggtagtcccataacataataaaactgaaa

SEQ ID NO: 240594 - DNA, 358 bp, Homo sapiens
gctgtttcccggctggcaggatgtttgtgcacccagtcctgatagacatgcttttctgcatgctttcatttggagttccagcatccttttgggccagtccattgctgtcttgagtcactagtgaactcacacccaggacccatttagtgagtccgtcaggcctcaacctgcccattggctcacagaatggcccgtggcagtgggccatgtctctgtcaaatgggactgatcttgcaatgctgcattagccttcgacaggctaatggcttcatgcaggtttctctttcatcctgtgttcactggaagcagcaaatgtcatgaaatgccaaagtaaagatcgttgtctccgtcaaaaaaa

SEQ ID NO: 240595 - DNA, 281 bp, Homo sapiens
gtagagatggggtctcagtatattacccaggctgatcttctgagctcaaatgatcctcccacctcagccccccaaagtgctgggattacaggtgtgagccaccgtgcccagcctaaaaaccaggacttttctaagagaaagtagatcaaattattctttgagatgcctgatgtaatccatacgtcttccatgcccatgtatttatataaaatgtgtgaccgctgtattctgttaagacatgaattaaaaaaaacgttcataggctggttttcataactact

SEQ ID NO: 240596 - DNA, 412 bp, Homo sapiens
cttgactagtcagtagttaagtatacagaatgttctagacctaatgaactgaatacagataaatacaattttgttgttcttcatggaagagtgacatttcagtagatccccactctgccaggggaaggaattgtcaaggtgacttattcttttgagcaagttctgatagtaattggaaactggtgaattagaatggtaattaaagcccagtgaaaaatgacctcctactggaaaaactggaggaatacagaaggctaaaaatagtgaacacttaataccaacagattttctgaaggaagacttcttagtttctctaaatgggaaatcttacattatcctctaaaggaaaaataagcaagtagttgaggaaactatgtttttttttttccccctttttcttgagacagtctca

SEQ ID NO: 240597 - DNA, 340 bp, Homo sapiens
cttgaatgtcgacctgaaggggaattgttggctggatgcagtggctcatgcctgtgatcccagcgctttgggaggctgaggtgagtaacttgaagtcaggggttcgagaccagcctgggcaacatggcaagatcccatctctgaaaaaaatagggtgtggtggcatgtgcctgtagtcccagatacttggagggcagaggcaggaggatttctttggcccagaagttgttcttttaatttctggccttactgaatcactgggcccgggaattgcaggctgcagcaaaccatgatagtgccactgcatttcagcttgggtgacagagcgagaacttgtctt

SEQ ID NO: 240598 - DNA, 2074 bp, Homo sapiens
  misc_feature (1)..(2): n is a, c, g, or t
  misc_feature (4)..(7): n is a, c, g, or t
  misc_feature (246)..(246): n is a, c, g, or t
  misc_feature (267)..(267): n is a, c, g, or t
  misc_feature (1944)..(1944): n is a, c, g, or t
nntnnnncaactttatctagaatgagtcttgagctttggagactcctgtacttgaatggagaatacagcaggccatctggaactgtctaggaaatcggatgtagttttagggagaaagataaagttttgaatgtaagattcattccttgagattttattgtttagttatgtttataatattttgtgctgaagtcaattaaacaattgaagaaaataagtatgagatctccagaaatgaaattgtgnggtgaacacattagaagagcngacctactatgtcttcctccaaaactatcttagtgaaaagtccttgggaaagggtttcgcctttcatccaggatacagcttcagtgaggcagttctacacatgtactggaatttgctgtcttttcatgtcttggttaatttggaatttcatttatttactattttgatgtgaagaattgcacttcagattttagtaaattattgccatgtcaatatagttgcattctaatgataatatgcatcttttttaaaaaaggcttttttcaaaataattttgcttcatgattaatttgtgattgcacataattttcataattttagttcagacaatctttagacatgaagatacttgttgacagcacagtacctttgttcctctctagtaactcaatataacaacatcagcaaatattggtatgagttactattattaatgatttattttcataatctgatttcttttatttcattagttgccttgggtttttgtctgatttcagaagctacatagctatgtgatttttaaaatggcataataaagcataaaatccacaagatctttagttttggagaattttgaatgggagaattttgaagattgacctgtgtacccttaaaaggggaaatcaggtagaaagacagctgtcaagaagatgcaatggaattattaccaacagaattgaataaaacacattttacaaaaaaaggttaatatctactctaaaacgcactagtgtatgaccgaaaagcaatatttggaaatggaactgttatcaacaggaaaaacagggaaggatttaaaaaatgactgcaataaatacttatgtctgtagttgcatttggacaccattttgaaggaaccccttccacagaaaccagatgtgatttctgtttttctgtctggagaaagcacacatataatgaaaaggttgtataattattgcacttgtacagaagaatcttctcatgtaaatttaaatttcaataagttgctggattaaactttagcaagggaaaggaaattgtaaaacgtggtcttgtctttcattcacatgtttgtgttagtatgttaattatcctttttgggggcaggagaagtacaatgaagcataggccagcataaatgctacttatacaggaaccaataccagagccagactaggcttaggaaaccttaatggtacatttagatagataattgccatagcagtgaaacagtagaaacttattttttgtcagtgcaaagcaggtttactaattaccagtcccaagagaggactcccattgcatggggaatagcaaagatcatccttaggccaaccaccaaaaactcaaccaagggttttccagggttgcagacaagtcaagagagtggatatgatgcctcagtccgcaccatcattagctccagagggaaataggacaatgcgtgtttttagttccctagatatgtatttctatactttaatatttctgtgaatgggtgttgccatttggtgtaatcttttaggaaaacagattgtgtggctgggcgtggtggctcacgcctgtaatcccagcactttgggaggccaaggtgtgcggatcacctgaggtcagaagtttgggaccagcttagccaacatggtaaaaccccatctctactagaaatgcaaaagttagtcaggcatggtggcntgggcctgtaatcccagctgctcaggagactgaagcaggagaattgcttgaacctggaaggtggagattacagtgagctgagatcatgccattgcacttcagcctgtgtgacagagcgagactccatctc

SEQ ID NO: 240599 - DNA, 402 bp, Homo sapiens
acggctttttgaaacagggtcttgctctgtcgccctggctagagtgcagtggagagatcgtggcttactgtagcctcgacctcctgggctcaagtggtcctcctgcctcagcctcccaagtagctgggactacaggggcaccaccacactcagggcaaggacacagcctttcctctacctgtggaggagctgtgtggtttccaggaaaccaggccttttccagcctcacctgtggggtgttgtaacacccaggaacttggagaggcgcccagaacctgggcagggtcagcacacaagcacccattctgcgtaagacccaggcctgaggacagccctgtagaccacagaaccccacgggtcccgtccccaacaactggctccttcccaccctagggccttcgc

SEQ ID NO: 240600 - DNA, 349 bp, Homo sapiens
aaagacatcattagtcactgtcacacaggaggtccaaagttagaccctttataaaagcagttagagcgaagctgagggtaggggccattcccatcggtgcctttgttggaggggaccccctgccaaaatatgtcctacttgcagcagttaattttttttttttggctaggacccccactccctgattttcttttctcatcagataagccaatgtagtgattcccatgtctggcagggtgttgcacagtagactttgaaaacctgtagagcttttaaaaatcatgaatgcctggaacccatcccagatcaatttaatcagaatcactgggggtggaccccaggcttgatt

SEQ ID NO: 240601 - DNA, 311 bp, Homo sapiens
agctgggattgggccaggctgtttagtgattctcaggagtaggcaatgatcagttttttgatttaggcagcattacctgagtgttctttttttcgggggacaaatcactgacctatatatttttatggtgcactaatctatatgtctattaaattttacaataaaaaatagcaactagcatagtttctggcccacactaaatgttccatatattaaaatggaaggtattataagctcggaaaatacatttctcctcctcatctaggaaaggaaggattaagtgaaatgtttcctaagtgctttcctttttt

SEQ ID NO: 240602 - DNA, 421 bp, Homo sapiens
gaagcctattgttctacattcaagaaagtgaaaaggcaaacaaataaggtagtaatttgtcttccttacctgtttgccttttcaactagaagcctattgttctacattcaagaaagtgaaagtggctacacctcttagagaacatttctttaatgatacatcagtgagtatcttttatgggtaataatctacctattttaactagatacaagtatgataagaaagagacctttcagttaactgaagctaagctcatcctgtcttccttacattgctaatatctgacttacaatttactaatatttgtaaggtgtcatttaagtaggtgtggaagcattagcctagattttgactagttctttggtgtcttctgcagctcatagaggcactataatcacaacccccacccgcgcccctcgca

SEQ ID NO: 240603 - DNA, 1684 bp, Homo sapiens
gacaggggaagggcaagtatggaggctcaccctggaagagtgagcaggactctgttacctgcaaccccaagctttaggcagcaggacaagaggccgaggttgtgaaacaaacggaaacctcaacctgcctgccatcatcacaccctcctgccctgaaaactcctggaggcctttagaaaggaactgttctaccctgttgttttactaatgaggaagtgatggtccaagcagtcaagtctgcataaccatctaagcttctgaatctgctgctgccgacaagggaccagactcaccaccacaaaccagggcactgagaggtagaaccaggcagcccacgccacagatggcacagcaggatgaacacggccccatgagacagcgctgctgctctccgcatcacagcaaagtcaaggcaaaggaggatgggtgccaggggtgcctctgcatgaagtgctggaagcttggacattcctaggccagttaggatcaaaggctgagcactggctgcgatattagggccagttctgggttggctctgtctagccatcacattgtggtttttgctgttatctgctgttagattcggccggaatctaagggatagagatgtatcatgaggtggaagctcaggctacctctatcttagttacaacagtcagagctcatgatgtcatggtggcctctggcagcttgggttagaccaggtggttatttgccacctgtaggctggcactttctacaacactgtcacgcatcagggacgagggtaccgagtgagagcaaaggataggctcctgcaaactcatctcctctcctggaggcttaactgagtgactgtgggtcgctgggtgtattttaatctgtgacattccacactttgtgtactcaccagcacatacacggtattattgtttcctcagaagagtgtgtatttaaatacctgccaggaaactgtgcaggtatttcacattaagtagcatatggggctcagtgtagtcaagaagtcacagggattaggaaagagaaaatgaattgctgtcattctatatatgttatatgcttagtaaatgtcagaacagtagtcacagaacctcaggatgtttctagcatattttggcttataaatgttttgtctacataatggatatctatcagtagctttcagaattcaagtaattttaatgaaataacactaaatgttcaagtattaaaagtagtggtaacagttaacagctattgagtgtttactatgtcctcagaactatgccaagaactttatatatacttgatctcacataaaaaacaaataaggtagtaatttgtcttccttacctgtttgccttttcaactagaagcctattgttctacattcaagaaagtgaaagtggctacacctcttagagaacatttctttaatgatacatcagtgagtatcttttatgggtaataatctacctattttaactagatacaagtatgataagaaagagacctttcagttaactgaagctaagctcatcctgtcttccttacattgctaatatctgacttacaatttactaatatttgtaaggtgtcatttaagtaggtgtggaagcattagcctagattttgactagttctttggtgtcttctgcagctcatagaggcactataatcacaacccccacccgcgcccctcgca

SEQ ID NO: 240604 - DNA, 498 bp, Homo sapiens
cagggaaggcataggtctctcccaggaggctgtcagcagctgggaggccggcagcaaccccactccaggcctgaagtatctgccacctttggcaggctctgggccccatggaaaggctgaggggcgctcatcccgggttgccatccccagaaccggtgtgacaggccccacaagcacgcatgtgagtcagctcatgcacaggagagcctcatggagcctgcccggccaaggtccccaaccccagacccagcagctgccactgcgaccaccctgagagctgtgactgcacccaggcctgaacacacatgcatggcctgagatctgggggtgtcctccagaatgaggtggacccagcaggggaaaaggctttgcagggagcggtcacagcaggagtgccccacgtgcactgaacctgccctgggccccacctctcttcacatgggtgatggggggggtgccccagttttatgggatctaaggtgagagcattaaagacga

SEQ ID NO: 240605 - DNA, 454 bp, Homo sapiens
cctgaatttctaacatagaattatgggggttttgtttcatatatgtatttttttgtttgttaatatggtggtttgtttctttcttatctatctctctcttcagtaaaatataagcggtgaactttgcttattttatttaatgatgtatcctaagcctattaatagactgcctggagcctgatagacatcaatacatatttgttaagtatattaacatagtcatatttctgcttctgtaacttaaattaagaaatatgaactttgtatatcacaaagtgcacaacaatcaggaactgaatggaaaataaaccatataataaatagtaataaattacaataaatataataaataataataaagagctcctcttaaaaacttaaagtctctcaaaacaagtagccttaggattggagagaatcgcagcaggtgcaagcccaggaggtggaagccaaa

SEQ ID NO: 240606 - DNA, 499 bp, Homo sapiens
tacattctactattaaggctatttatgtttttattttaagtgttttgttgtaattttgaaaggatagtaaaatattttattattaatgtggaattttaaatgtttctaagctttttgatgaattgttgcttcagttgagcttattatccgtaaaacaaagttgatgattatggtgaaagaaagagtaactcaacaataatcatgcttactcttactctgtcatcttaacctacacaaaatcccagagaagttatttgctgtaagacaggctttataagaaactcagatttgaaatgacctagttgtctgcaatttgttataaatagaggggaaaaaagatatgtgtttataaccatgtaactgcaatatttttgaaaaggtgcttaaacttttgtcattaatagatttagtagtttttaatatgtagctttaaattgtccattttcaaaatcatatttttgtataaaaaatattttaaataaaaatattcacaaatatt

SEQ ID NO: 240607 - DNA, 399 bp, Homo sapiens
caatgatgaaaaggttaataaagcaggttaatcttaaaagcatgagaagtctgcagccattacattgtaactagcacaaaaaactgaaatatcttcccgtctttgaaaattatctaattttgcagtgagccgagatcacaccactgccctgcagcctggacaacagagcaagttgactccattcccctctaccccaaaaaaaatgtatctcaaccagtattcatgctacaaccaaaatctcaaatctacagtatgtatttgtcagtgacatgagcaacacctttgctgaactggatagtaataaaccattatgtgctgtctgattttataacactatcgttggtaactgtcacactgaaatatgtatgaaatttacaataaagtgtatattatttataa

SEQ ID NO: 240608 - DNA, 465 bp, Homo sapiens
agtcagagacaagggacctcattactcacagacagcaagcaatttgaactttatgttctcatcagtttttcttacccccaggtcccacggaaacaacacagggtgggcccagatggatgttgcatgtgcagtgagtttacatcacagctgaggaaacccccacaatcttaggaaaccccaatctttaaaatgggctaaaaatagacctgttcaacctttgcctgggagatagacactatctttactatactggacagccaacataactgacctttgctctaaaggaagacatcatcaccattttccaagaccattccctatacaaacattctggaaaacctagtctagaacaaaagctgttagttcatctgctcacaagacatgcaaaaatgtcagaccttttgaggattatctcctggcactgacctcaacaaaaggaaactaagatcatcttagtagatgcag

SEQ ID NO: 240609 - DNA, 334 bp, Homo sapiens
tcaaaagggagagggaaagggttgaaaggtaaccttaaagttttgaaaagtaggaatacaggaaaaaaaaaacactgtaaaagataagattagggggtagggataggagagtagctggtttacggcagaagataatgatttccagcttagtgtgctacacaccatgtaagtgaatgtgtcaggcagtagaggactttgaaagtgtaagaaacaatctttctaagaaagagcaggccaggatttaacgtgacattcttgagagtctaatggtgaatgttagcaatgacataatgacattgaagcctatcaggattttttagaggggaggtgataa

SEQ ID NO: 240610 - DNA, 294 bp, Homo sapiens
tagaaaacctaagagaaatagaaggtaattaaaagcagagagacaaaaggcatattttcaataagaaaaagataacagttctgtcagcaaatgtctcaacagcaaaaatagaagccagaaaacaagttttaaaatacatcaaaaatactaagagaaattaactgtcaaactggtattatacacctatctaaaccatcaaagaataatgaaggtaaaataagtatattttcaaaagcaaaaccaacaaacttacaaacaaaacccagggtatctaccatcctggtacccttacta

SEQ ID NO: 240611 - DNA, 590 bp, Homo sapiens
cgtttgatttggcctgcagtgttttcaaagtaggggagatgtcacataaattctgagtttgggttctctttacaaaatataattttttttttctttttacatttctttgtggctctggttggcaggagttgagtagatattgcccattagactggcaggtatccttgagtttgccagtctaaactactgcctgttgtcctgagcctagcttactttactcacttacattacctgccttatcctttagacatttgagtttgtggtctgttaagtgactgagctctcatgggattcaccagctgttacctaggtgagtatttgaatggatttttggggtggtggcagtggttgcatgttataggcaccagaaattatgttcagtaagccactaccagtacctgctgtgcaaagaaacatcttccttggggagtgaagaactaaccaccagttttcttgtgacatttgttggtttttttatccttagtttagtggataaaaataagcgtttaattagtgaaaacccgactacctcccaaccccgtctgtccagctttatgttgacctggcttttaaaatcatttatgtattta

SEQ ID NO: 240612 - DNA, 451 bp, Homo sapiens
cacggtgagcgttatctagtgattgataatccaggtgatcttgattacgcttctctaggtaaattacagattatcagtgtcgtctccctctcatgccccagaccatacttcctatttcactctttctagctctgaatccgtccgcggaactcacactgttggctcattataagcttattgccaactaaaactcctagctccatgcctggctgtctgggcccagcaggccctccaaatctatacttcggcagctaatgtttttttggttgtttcttctaaaggtgagacttcacagatggccctgttaaatttgcttttctcggccttggtccagcattgtacctggtcaaggtgactgagataggcgaagaaaggaagatgacagtacaaactataaggatgactataagtccaaaatgaaataaattcaaaataaagaggtctcaacata

SEQ ID NO: 240613 - DNA, 1384 bp, Homo sapiens
  misc_feature (750)..(750): n is a, c, g, or t
  misc_feature (894)..(894): n is a, c, g, or t
tttagaaggcagctatgatcaccactctatcaccaatgtcactaaaatcagtattcttgattgcctgctggaaataaaaatgtaattgctaaaatactcagtataagttaagtgatacgttacaagtaaagatctctcatgtgttaagtttcaagtttcacttaatgttcttaataaaataatggtaatttgaattctctacaaatacgttcagcctgtagtattctaatttacagatgcttgagaacacctaatatttttgattaacttaatgtcaaactattatcctaccttgtaaatagcatagaaattttaactatagtctttaaaaaatcaaatttcattggtagggaagtgtaaatgtatggtttttttaaaacacaacattaaaaggttgaggttataactttcataaagatgaaatcactatttaaaagctgcacatagactgattattattgtttgtttgtcttagaagatgtatctttaaattgctggaagacatcatgaatattttcattgctaattattggtaaagtctttagtatatgtcagttctgtttgtgtgggtatggttgctgtagtgcggcttaaaaaaaaacagtgcttcatatcagtgaaagctcttctttggtttaatctgggttgtggttatattgttttttcatatcgtgtgagctgattgcaaggggttaacccaaaatgagccacttcacttaaaattattctatatgttagtttgtgaattcngttgttggtatttaaacgtacatcatagtttaatcatatcacataaagttgtgatttcaggaatactttatatttcttttgctgtttttgcttgtgacaattgactggtccaccacatagaatttcttagtctttctaacactnggtgaacatttgaactgaccagatgattttatggaaacagcatgagacagtggaagtcaaatctctattctgtaccttgctttgcccctttctggctacaggagcctcagaagtcattcagagatgcagcaaagtgcaggggatcaaaccattgatcgctgaatttgagtcttacttttgtcatttattattagctgtgtgacagctagtaaattaacttaatctctctgtctctgtgttttcatttgtaaatggtattaatattagtgcctctcccccagcgttcttaagaagattaaagcggttgatatttgtaaagtacttagaatattgcctgtacagctaattatttaataacattttaatgtgatgtgacctcattagatctgatgtctacaaacagtactttgagtttgagaattgttatcattttaagtgtttcttgcctttgttttcaatacatcttgaaattattaaacttaaactggtg

SEQ ID NO: 240614 - DNA, 452 bp, Homo sapiens
tcaggagagacctcaagaacctggatgaagatgctggcaaagcaataggagactagatttgcaagcatttaacttcttcacatgtacattcgtagtagaaaggaaagcagtaagaatgatctaaggtttctctaattgaatgaccttggtggacagtgactaatatctctcatgagcataggttagaggcaaaaatcctcaacagtgtattagcaaatcaaatccaacaatgtattaaaaataattatacaccatcactacgtgggatttactccaggtatgcaaagctggttcaatattaaaaaatcaaataatataatctattacgtcaacaggttaaagaaaaaatcatacaatcaataggtgcagaaaaagcatccaacaaaatctaacacccagtcatgataaagtctctcagcaaactaggaatagagaacttcctcaacctgcta

SEQ ID NO: 240615 - DNA, 1038 bp, Homo sapiens
tcacatctttcacccccaatgacgcagttaatgtcctcaggtttatgaccagtgtaatctccgggcaggactcatcccttgagagcttttagctcaaggcagactgcaatacagcactcaaccagctctctctcctcgccaaacccatcctacccaacgatcctaaaggctaaaggaggaagtaaatttaaaaccctgaaactacagcatatcctgctgcattcgaagcgagtgtcatccataaaaacaaaacgtgacaccccaaatccatcctcactccaagctaaagccaattcctgcctgacccgacagttgacaggtcccccagatggccgggctttaacactaaaagtcattggcaccccctcctctttcccaacgacctttaatttgtgaagagccagacatgggttcctgaagatccttcctacaccccttgccccgaatgcagcagaggtgctcccggcagttactccggcgccccctaataagccctcgcaagggggtgcggaaagacccccagagcccgtcagagggggcttcggcgaccgcgaccctgcggctgtgtggaggacgagggaacaagccccaagggatgggaagggaggatgacgggaggcgcagcagacgcgtgtaacgaggggtcatctcccctcgaggggggtggagttgttgaggagggctaatcccctgccaccgctcccctgctaccctcaagtcccgctctggcctcgcgccccattgctcggattcactcccactcctctggggccgcctggaccccagagtgcccgcgagcccggcgcccctgcctcaagcctgggctcccagaccggcactcacccggcccgccatcttcgcggacacgtccggctcggcggctgcagctctgcgctcggcaaagcccgcccccgccgcgcgcgcgcccccgccgcccgccctcgcgcaggcgtgcaaccgccgtgaggacgcgcgcgtccctggccgcgtccccggcgtcctcgctccacagggcgcgcgcgcgggctcggcggccgc

SEQ ID NO: 240616 - DNA, 858 bp, Homo sapiens
tgcaggggtcagtcctggggggcaggggctcaggagagaagggagcagctggcatgtgggggtggggccagcctgcgttggggcaggagatgaccccaggacctccagtgatggtgacccttctagtgagaatgtcaagaagaactgcagagaggggagggaagagggtcagtgctgggacaggggtgggggcaagtagagttggctccacagagggctttgggcttctcatcccagcctgggaactgcggcccgtccccagcttaccagcaagacaactcagatctcagttgcagccagggtcacacacacacacgtgcgcacacacacatgcacacacacacacacacccatgtacacacgcatgcacacacacacatgtaggagcccagacaaccccccagaggccaagctggggtcatggggtccacctgccacaggcctcactgcacctttccgtgtgagagcccacccttcttgctcctccacactgtcagaccccactgggacaaggcagggctggcccaggtgacccggggactagataggaggacccagaagaaggaaactgttctgccccaggttcccccagggagaggccacctatctggggagacagctctgatttgggagaaagggagaaaggccctgttgggtgaccagctgtgcctctcgggcagggtcctcgggcctctgtgaccccagcctccctgcccatccttccactgcaaagccgctgggaccattggcagggaagctgcagagggcaggctttgcagactgcgaagcttggcaaacaggaggccattctgtgattctgccatagctcgaggggccgggggtccatttgtttgtccc

SEQ ID NO: 240617 - DNA, 855 bp, Homo sapiens
ccaccccccccacctgtttaccaggacccagggccgctatctccactggcatgtgggggtggggccagcctgcgttggggcaggagatgaccccaggacctccagtgatggtgacccttctagtgagaatgtcaagaagaactgcagagaggggagggaagagggtcagtgctgggacaggggtgggggcaagtagagttggctccacagagggctttgggcttctcatcccagcctgggaactgcggcccgtccccagcttaccagcaagacaactcagatctcagttgcagccagggtcacacacacacacgtgcgcacacacacatgcacacacacacacacacccatgtacacacgcatgcacacacacacatgtaggagcccagacaaccccccagaggccaagctggggtcatggggtccacctgccacaggcctcactgcacctttccgtgtgagagcccacccttcttgctcctccacactgtcagaccccactgggacaaggcagggctggcccaggtgacccggggactagataggaggacccagaagaaggaaactgttctgccccaggttcccccagggagaggccacctatctggggagacagctctgatttgggagaaagggagaaaggccctgttgggtgaccagctgtgcctctcgggcagggtcctcgggcctctgtgaccccagcctccctgcccatccttccactgcaaagccgctgggaccattggcagggaagctgcagagggcaggctttgcagactgcgaagcttggcaaacaggaggccattctgtgattctgccatagctcgaggggccgggggtccatttgtttgtccc

SEQ ID NO: 240618 - DNA, 451 bp, Homo sapiens
aatgtgcccatgaggttgtagaatatgtggcctgcacacccatacatggcagtcctgcctaaagggacccttctgtcttcacgcatgctaaaagactaatagcctgaaatagcctgggcatttcgagggaggaaaaagcagctccgaggcccacctggcctagcaaagaccatcttcactgatggctgcctcaggcaagaaacaagcactgtgaaccatcaggagcttatcagtagcttggttcacagcgtgaagcagtggaaagccacagggtataggatgcaaagtattgagttcacgtcccagttctgctgctactagctgtgtaatgtccaggcagatccctcgtaacttccccaagccttcctgtggtccctagtggctcagtgctggccgaagtttctacatttagagagaaacagggatgaatcttaaattcagctgattgaaa

SEQ ID NO: 240619 - DNA, 1934 bp, Homo sapiens
ggctgactctcttttcggactcagcccgcctgcacccaggtgaaataaacagccatgttgctcacacaaagcctgtttggtggtctcttcacagggacacggatgaaatttggtgccgtgactcggatcgggggacctcccttaggagatcaatcccctgtactccttttctttgccctgtgagaaagatccacctatgacctcagtcaggtcctcagaccgaccagcccaaggaacatctcaccaattttaaatcagagaccttgaagatttgttgttcaaggagaaactgaagagcaagaaggaaagtgagagccagcaataccagcagagccagatctgagctgggagaaggggagaaagtttgtgaagaggagatcggtgacctgggctccttatgtgcctgaaagagtttgagtttcctgttaactccaaatcaacagtattttcaacaagaaatgtgcaattgaaatcaagtgctgtttaagtgcagctaggatttccacaggaagacacttgcagtgaacagagttatggagcagcaaaaacacagatctatttggaacaaagagaaaacatatgcgttgtattttgcttcaattataaaataccatcctctcaaaggtggttctaaattacaaaggactttgatttctaggtagattctgggtagagacttcctttcatattgaggcattaatgacaccttttaacctgggaagcaatatgactggagttgtactttgagaagattaatcaggtttggttgcagaatgaaagagaagatgaagtcaagagattggtttagaggctctagcagaagcttagtcatatttcaaaatgatcaaatatcaagaaaaattctgagctgcataacttgtataaagtaattttcagtgatttttttcatggttatgataaaagaactggattagcagaaacttttaccctgaatcaagatttaatttttctttgagctcatcttaaggatatcggaacatagggagcaaacgatggtgtggctgcctcagtgcttgatttttaacggttttgaagagaatagttacatttcttctcctagtaagaactaataaatacattaacagaaatgaattccctatccctttgtacactggtctatttcttcaaaacattaaatactattgataagatatcaccttttataatttgtgttcattacagttctcttgtcatgaaatgcaaatgaaatgtagtatatactaacagcttttacagaaagactaatcctaagagaatcatatttttaaatttgaatttataataattatgttgtacattatggtttcgatatatgtatatgttgtgggatgagacacgctcttattttttaatttcatttattcatttttcagtttacattattgtcccctttgaagtaaaatttaataggatgttctcaaattttattgagggttgacagacggccaaggaaaatgtttatttttattttttcatcaaaatacaacttgcattttgattaacctttatattctaaaaagaactctttcagaatgcagtcagaaagggcaaataagtctctttcatagaaatgataaaatttccttcaacagacaaagagatcgatgggaaagtcatgtttttgcatttgtcacagctgctgataaactaagaacaaatcaagtgagacaagggaggagccattttacatataattcctgataagattatctatttcagcctccctctcttcccttcctttatggaattttgcattctcttactgcctttaatgttaccgtcctgttgcatatgtatttttaccatgcaataactcatatttattttaaagaactctagacttgaagtcagtggatcacaaggaatgagggggtttggatatgagacctaaatataatgtaaagcttattatg

SEQ ID NO: 240620 - DNA, 2222 bp, Homo sapiens
ggctgactctcttttcggactcagcccgcctgcacccaggtgaaataaacagccatgttgctcacacaaagcctgtttggtggtctcttcacagggacacggatgaaatttggtgccgtgactcggatcgggggacctcccttaggagatcaatcccctgtactccttttctttgccctgtgagaaagatccacctatgacctcagtcaggtcctcagaccgaccagcccaaggaacatctcaccaattttaaatcaggagcttgctacacgtgccggaaatctggccactgggccaatgaatgcccgcagcccgggattcctcctaagccgcatcccatctgtgtgggaccccactgaaaatcggactgttcaactcacctggcagccactcccagagcccctggaactctggcccaaggctctctgactgactccttcccagatcttctcggcttagcggctgaagactgacactgcccgatcgcctcggaagccccctagaccatcacggacgccgagctttaggtaactctcacagtggaagagaccttgaagatttgttgttcaaggagaaactgaagagcaagaaggaaagtgagagccagcaataccagcagagccagatctgagctgggagaaggggagaaagtttgtgaagaggagatcggtgacctgggctccttatgtgcctgaaagagtttgagtttcctgttaactccaaatcaacagtattttcaacaagaaatgtgcaattgaaatcaagtgctgtttaagtgcagctaggatttccacaggaagacacttgcagtgaacagagttatggagcagcaaaaacacagatctatttggaacaaagagaaaacatatgcgttgtattttgcttcaattataaaataccatcctctcaaaggtggttctaaattacaaaggactttgatttctaggtagattctgggtagagacttcctttcatattgaggcattaatgacaccttttaacctgggaagcaatatgactggagttgtactttgagaagattaatcaggtttggttgcagaatgaaagagaagatgaagtcaagagattggtttagaggctctagcagaagcttagtcatatttcaaaatgatcaaatatcaagaaaaattctgagctgcataacttgtataaagtaattttcagtgatttttttcatggttatgataaaagaactggattagcagaaacttttaccctgaatcaagatttaatttttctttgagctcatcttaaggatatcggaacatagggagcaaacgatggtgtggctgcctcagtgcttgatttttaacggttttgaagagaatagttacatttcttctcctagtaagaactaataaatacattaacagaaatgaattccctatccctttgtacactggtctatttcttcaaaacattaaatactattgataagatatcaccttttataatttgtgttcattacagttctcttgtcatgaaatgcaaatgaaatgtagtatatactaacagcttttacagaaagactaatcctaagagaatcatatttttaaatttgaatttataataattatgttgtacattatggtttcgatatatgtatatgttgtgggatgagacacgctcttattttttaatttcatttattcatttttcagtttacattattgtcccctttgaagtaaaatttaataggatgttctcaaattttattgagggttgacagacggccaaggaaaatgtttatttttattttttcatcaaaatacaacttgcattttgattaacctttatattctaaaaagaactctttcagaatgcagtcagaaagggcaaataagtctctttcatagaaatgataaaatttccttcaacagacaaagagatcgatgggaaagtcatgtttttgcatttgtcacagctgctgataaactaagaacaaatcaagtgagacaagggaggagccattttacatataattcctgataagattatctatttcagcctccctctcttcccttcctttatggaattttgcattctcttactgcctttaatgttaccgtcctgttgcatatgtatttttaccatgcaataactcatatttattttaaagaactctagacttgaagtcagtggatcacaaggaatgagggggtttggatatgagacctaaatataatgtaaagcttattatg

SEQ ID NO: 240621 - DNA, 2203 bp, Homo sapiens
ggctgactctcttttcggactcagcccgcctgcacccaggtgaaataaacagccatgttgctcacacaaagcctgtttggtggtctcttcacagggacacggatgaaatttggtgccgtgactcggatcgggggacctcccttaggagatcaatcccctgtactccttttctttgccctgtgagaaagatccacctatgacctcagtcaggtcctcagaccgaccagcccaaggaacatctcaccaattttaaatcaggagcttgctacacgtgccggaaatctggccactgggccaatgaatgcccgcagcccgggattcctcctaagccgcatcccatctgtgtgggaccccactgaaaatcggactgttcaactcacctggcagccactcccagagcccctggaactctggcccaaggctctctgactgactccttcccagatcttctcggcttagcggctgaagactgacactgcccgatcgcctcggaagccccctagaccatcacggacgccgagctttagagaccttgaagatttgttgttcaaggagaaactgaagagcaagaaggaaagtgagagccagcaataccagcagagccagatctgagctgggagaaggggagaaagtttgtgaagaggagatcggtgacctgggctccttatgtgcctgaaagagtttgagtttcctgttaactccaaatcaacagtattttcaacaagaaatgtgcaattgaaatcaagtgctgtttaagtgcagctaggatttccacaggaagacacttgcagtgaacagagttatggagcagcaaaaacacagatctatttggaacaaagagaaaacatatgcgttgtattttgcttcaattataaaataccatcctctcaaaggtggttctaaattacaaaggactttgatttctaggtagattctgggtagagacttcctttcatattgaggcattaatgacaccttttaacctgggaagcaatatgactggagttgtactttgagaagattaatcaggtttggttgcagaatgaaagagaagatgaagtcaagagattggtttagaggctctagcagaagcttagtcatatttcaaaatgatcaaatatcaagaaaaattctgagctgcataacttgtataaagtaattttcagtgatttttttcatggttatgataaaagaactggattagcagaaacttttaccctgaatcaagatttaatttttctttgagctcatcttaaggatatcggaacatagggagcaaacgatggtgtggctgcctcagtgcttgatttttaacggttttgaagagaatagttacatttcttctcctagtaagaactaataaatacattaacagaaatgaattccctatccctttgtacactggtctatttcttcaaaacattaaatactattgataagatatcaccttttataatttgtgttcattacagttctcttgtcatgaaatgcaaatgaaatgtagtatatactaacagcttttacagaaagactaatcctaagagaatcatatttttaaatttgaatttataataattatgttgtacattatggtttcgatatatgtatatgttgtgggatgagacacgctcttattttttaatttcatttattcatttttcagtttacattattgtcccctttgaagtaaaatttaataggatgttctcaaattttattgagggttgacagacggccaaggaaaatgtttatttttattttttcatcaaaatacaacttgcattttgattaacctttatattctaaaaagaactctttcagaatgcagtcagaaagggcaaataagtctctttcatagaaatgataaaatttccttcaacagacaaagagatcgatgggaaagtcatgtttttgcatttgtcacagctgctgataaactaagaacaaatcaagtgagacaagggaggagccattttacatataattcctgataagattatctatttcagcctccctctcttcccttcctttatggaattttgcattctcttactgcctttaatgttaccgtcctgttgcatatgtatttttaccatgcaataactcatatttattttaaagaactctagacttgaagtcagtggatcacaaggaatgagggggtttggatatgagacctaaatataatgtaaagcttattatg

SEQ ID NO: 240622 - DNA, 2031 bp, Homo sapiens
aaccccagccacatctccagcacacaagaacttccaaacgcctgaaccgcagcggccaggtgttcctccagaacctcctcccacaggagcttgctacacgtgccggaaatctggccactgggccaatgaatgcccgcagcccgggattcctcctaagccgcatcccatctgtgtgggaccccactgaaaatcggactgttcaactcacctggcagccactcccagagcccctggaactctggcccaaggctctctgactgactccttcccagatcttctcggcttagcggctgaagactgacactgcccgatcgcctcggaagccccctagaccatcacggacgccgagctttagagaccttgaagatttgttgttcaaggagaaactgaagagcaagaaggaaagtgagagccagcaataccagcagagccagatctgagctgggagaaggggagaaagtttgtgaagaggagatcggtgacctgggctccttatgtgcctgaaagagtttgagtttcctgttaactccaaatcaacagtattttcaacaagaaatgtgcaattgaaatcaagtgctgtttaagtgcagctaggatttccacaggaagacacttgcagtgaacagagttatggagcagcaaaaacacagatctatttggaacaaagagaaaacatatgcgttgtattttgcttcaattataaaataccatcctctcaaaggtggttctaaattacaaaggactttgatttctaggtagattctgggtagagacttcctttcatattgaggcattaatgacaccttttaacctgggaagcaatatgactggagttgtactttgagaagattaatcaggtttggttgcagaatgaaagagaagatgaagtcaagagattggtttagaggctctagcagaagcttagtcatatttcaaaatgatcaaatatcaagaaaaattctgagctgcataacttgtataaagtaattttcagtgatttttttcatggttatgataaaagaactggattagcagaaacttttaccctgaatcaagatttaatttttctttgagctcatcttaaggatatcggaacatagggagcaaacgatggtgtggctgcctcagtgcttgatttttaacggttttgaagagaatagttacatttcttctcctagtaagaactaataaatacattaacagaaatgaattccctatccctttgtacactggtctatttcttcaaaacattaaatactattgataagatatcaccttttataatttgtgttcattacagttctcttgtcatgaaatgcaaatgaaatgtagtatatactaacagcttttacagaaagactaatcctaagagaatcatatttttaaatttgaatttataataattatgttgtacattatggtttcgatatatgtatatgttgtgggatgagacacgctcttattttttaatttcatttattcatttttcagtttacattattgtcccctttgaagtaaaatttaataggatgttctcaaattttattgagggttgacagacggccaaggaaaatgtttatttttattttttcatcaaaatacaacttgcattttgattaacctttatattctaaaaagaactctttcagaatgcagtcagaaagggcaaataagtctctttcatagaaatgataaaatttccttcaacagacaaagagatcgatgggaaagtcatgtttttgcatttgtcacagctgctgataaactaagaacaaatcaagtgagacaagggaggagccattttacatataattcctgataagattatctatttcagcctccctctcttcccttcctttatggaattttgcattctcttactgcctttaatgttaccgtcctgttgcatatgtatttttaccatgcaataactcatatttattttaaagaactctagacttgaagtcagtggatcacaaggaatgagggggtttggatatgagacctaaatataatgtaaagcttattatg

SEQ ID NO: 240623 - DNA, 1109 bp, Homo sapiens
ggctgactctcttttcggactcagcccgcctgcacccaggtgaaataaacagccatgttgctcacacaaagcctgtttggtggtctcttcacagggacacggatgaaatttggtgccgtgactcggatcgggggacctcccttaggagatcaatcccctgtactccttttctttgccctgtgagaaagatccacctatgacctcagtcaggtcctcagaccgaccagcccaaggaacatctcaccaattttaaatcagagaccttgaagatttgttgttcaaggagaaactgaagagcaagaaggaaagtgagagccagcaataccagcagagccagatctgagctgggagaaggggagaaagtttgtgaagaggagatcggtgacctgggctccttatgtgcctgaaagagtttgagtttcctgttaactccaaatcaacagtattttcaacaagaaatgtgcaattgaaatcaagtgctgtttaagtgcagctaggatttccacaggaagacacttgcagtgaacagagttatggagcagcaaaaacacagatctatttggaacaaagagaaaacatatgcgttgtattttgcttcaattataaaataccatcctctcaaaggtggttctaaattacaaaggactttgatttctaggtagattctgggtagagacttcctttcatattgaggcattaatgacaccttttaacctgggaagcaatatgactggagttgtactttgagaagattaatcaggtttggttgcagaatgaaagagaagatgaagtcaagagattggtttagaggctctagcagaagcttagtcatatttcaaaatgatcaaatatcaagaaaaattctgagctgcataacttgtataaagtaattttcagtgatttttttcatggttatgataaaagaactggattagcagaaacttttaccctgaatcaagatttaatttttctttgagctcatcttaaggatatcggaacatagggagcaaacgatggtgtggctgcctcagtgcttgatttttaacggttttgaagagaatagttacatttcttctcctagtaagaactaataaatacattaacagaaa

SEQ ID NO: 240624 - DNA, 1181 bp, Homo sapiens
ggctgactctcttttcggactcagcccgcctgcacccaggtgaaataaacagccatgttgctcacacaaagcctgtttggtggtctcttcacagggacacggatgaaatttggtgccgtgactcggatcgggggacctcccttaggagatcaatcccctgtactccttttctttgccctgtgagaaagatccacctatgacctcagtcaggtcctcagaccgaccagcccaaggaacatctcaccaattttaaatcaggagcttgctacacgtgccggaaatctggccactgggccaatgaatgcccgcagcccgggattcctcctaagccgcatcccatctgtgtgggaccccactgaaaatcggactgttcaactcacctggcagccactcccagagcccctggaactctggcccaaggctctctgactgactccttcccagatcttctcggcttagcggctgaagactgacactgcccgatcgcctcggaagccccctagaccatcacggacgccgagctttaggtaactctcacagtggaagagaccttgaagatttgttgttcaaggagaaactgaagagcaagaaggaaagtgagagccagcaataccagcagagccagatctgagctgggagaaggggagaaagtttgtgaagaggagagacagggtcctgctttgttgcccaggctaaaatgcaacggtgctatcataatcatggctcactgcagcctcaacctcgtgggtacaaagtatcctcctgcctcaggctcctaaagttttgggattacagatggtattgcctggaagacaggattctgaaaccagcaccaactttccttctgccttctccttggtcagtgtggacagacaatcgctggagagcttgaaaaatacatcaaaaatactggaatgaaaaagagcaccatcatcttgaacacagttggaaagaaaaagcacagatggaggaagacagcgtcacgccccaatcacctggtctttcctcaggagatggtgcccccctcttttatacctttcttgtactgaaccctagaaacaataccttttggccaactcacaatgtgacatttgttcttccagttcaattttacttccccaaccctttactttaatgtttgattcctcctgagtcaaatgaagtgttttcatgggcagaaa

SEQ ID NO: 240625 - DNA, 920 bp, Homo sapiens
  misc_feature (920)..(920): n is a, c, g, or t
catcttggctcctgtggaggcctgctgggaacgggacttctaaaaggaactatgtctggaaggctgtggtccaaggccattttgctggctataagcggggtctccggaaccaaagggagcacacagctcttcttaaaattgaaggtgtttacgcccgagatgaaacagaattctatttgggcaagagatgcgcttatgtatataaagcaaagaaagaccttgaagatttgttgttcaaggagaaactgaagagcaagaaggaaagtgagagccagcaataccagcagagccagatctgagctgggagaaggggagaaagtttgtgaagaggagatcggtgacctgggctccttatgtgcctgaaagagtttgagtttcctgttaactccaaatcaacagtattttcaacaagaaatgtgcaattgaaatcaagtgctgtttaagtgcagctaggatttccacaggaagacaccgaggaagaggaggaagatgaagaccaggactacagctttcctatatcttctattctagagtggtaaactctctataagtgttcagtgttgacatagcctttgtgcaaaaaaaaaaaaagaaaggaagaaatttttggtctcgggaataggtgttggtatatgggggggaacatatccttaagggaccctggcctaaagcccctcccaggccctggttactcatgggaaccggaaaggctcaatggaaggctaccggtgagcccatcttgaactgttaccctctttatcggtcggtcaactaccaaaggcgggaggaccccgttgaacatttcgaaagcggcatgcgacctcgcgaaactttgtaaaatgcctgagacagtgccaggaacataggaggcagatttggcgtaacctgtgccgacacctgcaccagatattgttctttcn

SEQ ID NO: 240626 - DNA, 392 bp, Homo sapiens
gctaaggccagagaaggggccagaggggtgaacagggagaagacagacagtccgggtccatggcccagctctgccactggccagctctacaatattggcaattcactgtacctctgtgagcctcagttgcctctgctgcaaaagaagaaatgcccatggtgaggatgaaatgaggtattttggtgtaaagctcctggcatgtagagggcaccaacaagtattggttttagaggcatctggagccccagttttctatgtgacctccactgaggtgggagaaagtttttaactccccccgatactccaccagactcaccacagtttccccagagtctctgatcagggcaaactatttgtgtctaattacattaaattgcataatattttcaccg

SEQ ID NO: 240627 - DNA, 346 bp, Homo sapiens
caactgttacatttcaaaaagctttccttttctcaactttataggtgcaatgttaccactgtgaagttctagatgaacatgaaataaaggaatttattaaacataattccttggtgctccaactcgtacgctacagaatagcaaagaaggcacacatattcatagtaactggatattttgccttttgggtgtgactatattgggttatatgctatctaacacagaagttttgaggtacagatctgttttggagctggtaagaccatctactcctctatacgcttcgttttacaaaaggggaaattgagataagctgacttgccagttactggaaagaaatctggca

SEQ ID NO: 240628 - DNA, 380 bp, Homo sapiens
tcagcactgtgcaaacccatctgggtactgttcagttctttgaatgctgcttgacacggacaaacaagagggcattaaaaggggaggtcacagctgggcgcggtggctcatgcctgtaatcccagcactttgggaggccaaggcgtgtggatcacatgaggtcaggagttcgagaccagcctgaccaacatggcaaaaccctgtctctactaaaaatacaaaaattagccgggcctggtggtgggtgcttttaatcccagctacttgggaggctgaggcaggagaatcacttgaacctgggaggtagaggttgcagtgagctgagatcacgccactgcattccagcctggtcgacaagagcaaaactcaatctcattaaa

SEQ ID NO: 240629 - DNA, 377 bp, Homo sapiens
cacccaggcaagcttgcgtgactaacggaggagcgtctccccttagattcttcccgcccggagccggggacagcagaaaaccacctgacctccagattctctctcgtccagtggagattctcctgcccgaaggcaggcgctctccaaggtccctctccccagaagagccacgatcccaggaagccggcttgtgcagaggaaagaaccgcacctcgttgtcagaacaaccccagctctgccacctacaccttgtgtgaccttgggcaagtcagagaaacttctcagatgcacaatctcgtcacgctcctagtttccaagcccacacacctgagggtcaatgtcccttattgcacccccaccccataccgactccatca

SEQ ID NO: 240630 - DNA, 393 bp, Homo sapiens
aggcaggaaagcttgaagcaaaggcaggaagactccaagcagggagggggcttgcaggtcacagataggtgagagacaaagggtcccattcttctgagtttctgatgagcctttccaaaggaggccatcagatctgcattgatctcagtgagcagagggatgactttgaagagaatgagaagcaggtttgccctaacgcagcttgcgttttccttgtagcttagtgatttggggttcaagatattttcctttcacccctcattcttctcctgaaccaacagaagaagagatgcagagtgccgttgatcatttaaaaggctggacttcaaaactgccctttggtagtgacatcctgatattccaattctgtcccatagctacttgcactttaac

SEQ ID NO: 240631 - DNA, 484 bp, Homo sapiens
tggtaagcgagcagcctagaaagtcaaacaccttgctgaacacctagaggaatttgcagccacctctgtgaggtggaaaacatacaagccagacccctgttcttttgactctgaaatactccatgggggctggccaggaaagaggtgtctagaactgtttaaaaagataaatgctaggtcgggcgcagtagctcatgcctgtaatcccagcactctgggaggccgaggcgagcggatcacctgaggtcaggagttcaagagcagcccgaccaacatggagaaaccccgtctctactagaaatacaaaatcagccgggcgtggtggcgcatgcctgtagttcagctactcaggaggctgaggcaggagaatcgcttgaacctgggaggtggatgtggaggttgcagtgagccgagattgcgccattgcactccagcctggggcaacaagagcgaaactctgtctccacacactaaataaataaat

SEQ ID NO: 240632 - DNA, 728 bp, Homo sapiens
atttcatagtagtcatgcccaagaattctttagacagtgtcaaatatgaatacaaattagtaacttatactttgtttccttccaaaacaatttttgtgattttaaaaattagacataagctgtttgcaacaaatttactaaatccatgtgttatctgtaggaggagcaaaatatcttaggaaaagaaaatatatcaacattattttatcagtgagatactttagtaggaaaaaaaaagtttctaaagatacctgagacttattatacagatgttatcatgtaactgagttcttctcaagttgacatttcttacatgtgattgttggtttttacttctcactttcaaagtaaactcattgtttgtcccaaaactcagaatgaattatagttacttgattaggaaaataagttaatagaagaaaccatatgatagaatgtcagcaatttttcagtcaaatagaaaataatcttcatttgtgaacgtaaaggttttcctataactaataactctctatttcctatttcagaggctggcataatcttgttctaaaatgcttatatttgcctagtttaacccctcagtaccacagcagtattctctatctgaattagaatttgtcaaactagacatttgagtgaatagagattctgtagcttgtttatctgaaaaaaaccaaaaaacaaaaacaagttcttctagttgcttgctggaagctcagttgactgtt

SEQ ID NO: 240633 - DNA, 501 bp, Homo sapiens
attgatctaagagaggttaaacatgaattggaaattccttctccgatatcaggtttgatttttcacaaatatcaatgtttatgaaagtattcctaaaatttcaggtaaaaccacccaataatatgactgtgaaaaattatgcttcttcctctatgagctactacattcttaaattatctgagcattctattaaaacttaaaaaaatgcttaacttgagtctgcatgaatctgaattccctgcatatttaattttaaagaaaatagtttatttttttgttagaccaatactttacaaacttccccaaccaataagaaagaacaaagaggagaacatgaatatccctgggtatttgtgagtaaatccccaagagactaaccataaatgtgaaatttctttataattgtatgtcttcttctaaaatattcatgtggattgtgcattctattctatcttcttattttaataaaatctgttttaaattatttacttcctggaaaca

SEQ ID NO: 240634 - DNA, 106 bp, Homo sapiens
gggagtatgcagtaagatgaaaaatagtcaaatgagaaggaaggtcagtaataagttatttagacctggttaggcagcagggtctccaaatgcagctgcaattggt

SEQ ID NO: 240635 - DNA, 647 bp, Homo sapiens
attgcttgaacccaggaggcagagactgcggtgagccgagattgcgccattgcactcagattgcgccattgcactcctgcctgggcaacaagaacgaaactttgtctcaaaaaaaaaaaaaaaagtgaactgtggtttatctgattgctttttaaatgtcattcttttaggttgcagacaaaaatgttacctaggtgcaatacatgatcacttatatactgaacgtataatttctatatttatcttttatgtaaattatgatgttataagatttatttaaacagttttcttcaagaagctggttagtggcgaacgcctggacttggaagccaggctacatgagtctgaattctggctttgctatttattagttggcctttggacaagtaactgaatctttctgtacagcagctttttcctctggaaaaaaaatgcttacctcaaaattaggtgtaaggattacatgagttatcacttgtaatttgtttagaaccatacgtaatatgcattatttaagggtttattactattatttgtaaatattactgcctatttgtaacattagttaaaacccgaataagaaatagactatggagagggaaataatagtgttcattatgacctttcacagcacggaaatgtaagct

SEQ ID NO: 240636 - DNA, 295 bp, Homo sapiens
gcgcacttaacattttaatttgtgtgcacgcactactttttaaaaaataatattttaaaaagtggaagcttacattatgagtttacattattgccagtttattatcaatgaaaagctacaatattatttcaactacagataattattaagaaataaaaggaccccagtgtgcctgctgaacaaagagagaaggacattttggagaccataaaacattctacattggcttttgatgtgtctgaagtgaaacatacatacttcccagagaaaggtagtaaaacaacctgtaaactta

SEQ ID NO: 240637 - DNA, 498 bp, Homo sapiens
tactcaaagcccactgatttcaatataaacctcatcccaaaacaccctcccagaaacatccagaataatgtttgaccaactatctgggtactaaagcccagccaagttggcacatcaaattaatcattgcagggtgtgagcaggagaaaaaagaagagatgagattgccctgagcccaaatccagaaagcagggcacaaccaagagagctaaagacccctgggtaaagccacctcctgcccccaagtccttccctgacgcagacttgctggacaaccaggtgcgtcaacatgcaggtacaggggcagacccttctcccttccctcctcctccatgcctttcacaactatttgctgagtgtcactgtgccaagccctggggctaaaactaatcaagatttggttcttctgtacacttaaaagtggttaaaatggtcaattttatgttacgtatattttaccacaatttaaaataaatttgaaaaaaaattaaaaaaaac

SEQ ID NO: 240638 - DNA, 483 bp, Homo sapiens
ccaaaaaaaaacccctttttgtttcccaacccccttcccgaaatccagaataatgtttgaccaactatctgggtactaaagcccagccaagttggcacatcaaattaatcattgcagggtgtgagcaggagaaaaaagaagagatgagattgccctgagcccaaatccagaaagcagggcacaaccaagagagctaaagacccctgggtaaagccacctcctgcccccaagtccttccctgacgcagacttgctggacaaccaggtgcgtcaacatgcaggtacaggggcagacccttctcccttccctcctcctccatgcctttcacaactatttgctgagtgtcactgtgccaagccctggggctaaaactaatcaagatttggttcttctgtacacttaaaagtggttaaaatggtcaattttatgttacgtatattttaccacaatttaaaataaatttgaaaaaaaattaaaaaaaac

SEQ ID NO: 240639 - DNA, 452 bp, Homo sapiens
ctcggcctcccaaagtgctagaattacaggtgtgagtccccaccaccacatctggcctaggactctgtttttttttttagacaaagggtgtgagcaggagaaaaaagaagagatgagattgccctgagcccaaatccagaaagcagggcacaaccaagagagctaaagacccctgggtaaagccacctcctgcccccaagtccttccctgacgcagacttgctggacaaccaggtgcgtcaacatgcaggtacaggggcagacccttctcccttccctcctcctccatgcctttcacaactatttgctgagtgtcactgtgccaagccctggggctaaaactaatcaagatttggttcttctgtacacttaaaagtggttaaaatggtcaattttatgttacgtatattttaccacaatttaaaataaatttgaaaaaaaattaaaaaaaac

SEQ ID NO: 240640 - DNA, 411 bp, Homo sapiens
tctctcccaccctatcctcatccttgctagccaactcttaccttaccttaatgacataattaaatgactataaagttccataactcttgctcctttaattaactggaggaaaacctcttatcttctcaatgttgaagattctgctgtttcactttgaatggtattgttccgtctcctttgtaaaactgtgaggagaacttattattttaaataaataaatgtgaattttagtggaaacataaactttccattagctatagaaatcatctctaaaattggttccatatatccacctgttaattttcactaaaggttgttgtagatagcaaatataaagttaataagcaccaaaatcactgagccatataattctcttgaaaatttttctggactcaggaggtgcagcagcac

SEQ ID NO: 240641 - DNA, 439 bp, Homo sapiens
caggtagactcttgacaaactcctggagtttagcagaaagggatgagaacccaggaagactaaagacaaataaatttgaaagatctagtaataaaggagagaatgctacacagagaaatactcccacagatctccaaaggagaatatttctgaatattcggcaaagtgttcaaaatgtgtaaagaaaacatgtgaggctggggaaagaatcacccaaaaggattacagagaatagtaccaggcattcacacagggatgggaatagtgtctatttccaccagtgagactgcaaaatctcatcaatttacatgatgttgcatagagcagtaagaagggttgtgtagtaggattagttagccccaaacattcgtgtttccacctagcaaatcttaaacgcaaggcccaaaaggattaagccatttcgtggtaatttaatttt

SEQ ID NO: 240642 - DNA, 510 bp, Homo sapiens
  misc_feature (505)..(505): n is a, c, g, or t
  misc_feature (507)..(507): n is a, c, g, or t
  misc_feature (509)..(510): n is a, c, g, or t
aagtaacttgtcaaaagtcacaatactgggtggagcttggattcgaactcaggcagtgggtcacccgcggcaggcgcgggctttgggtcgagccaggggcattaggtgaggagaggcactaggcgaggagaactcagcattcggacccggctcccactctcaccccggcatgcagaccgatggaagaggctagtggtctgctgggaagggaggtggcccgcgtagcgtcccctccctcgctgagcctcagccacccctcccagggatggtgcgcccccaacatggtccggagatacacccagctaccaattcgggaccaggaccaacaggaccggacccgcctccctggacctcggacctgatgaggccacgacccctgcgcttctctcctccccctgtccctcccacctgtgctcaaaataaacctctggactgaccggctaagttctggtgcagtcagtgagcgcgcaacgtgcggggtgggggataggtggggaggcttggngngnn

SEQ ID NO: 240643 - DNA, 1394 bp, Homo sapiens
  misc_feature (1034)..(1034): n is a, c, g, or t
  misc_feature (1047)..(1048): n is a, c, g, or t
  misc_feature (1062)..(1062): n is a, c, g, or t
cccgccagctcccccgttccccgcggcgcccggcccctggctgcgcagacccctcttcagcctgaagctgtccgacacagaggacgtctttcctcgccgcgcggggccgctcgaggtcccggccgacagccgcgtgttcgtgcaggcggccttggcccgtccctccccgcgctggggcctggccctgcaccgctgctcagtgacgccgtcctcacgcccggccccggggcccgccctggctctgctgcgtgagggctgccccgccgacacctctgtcgccttcccgccaccgccgccgccgagcccgggtgccgcccgccccgcgcgtttcagcttccgcctgcgcccggtcttcaacgcctcggtgcagttcctgcactgccagctgagccgctgccgccgcctccggggagtccgccgggcgcctgcgcctctgacgccgccgccgccgccgccgccatcgcggtgtctgcctcaggacgaggcgtgcgccgacactggcagtggcagcgccgagggcctggctgctgacggcccccacctgcacacgctgacgcagcctatcgtggtcaccgtgccgcggccgccccccaggccgcccaagagtgtccccggccgtgcagtgcgccctgagcctcccgcgccggcccccgcggccctggaacccgcgccggtggtggcgctggtgttggcagccttcgtgctgggcgccgcgctggccgccgggctgggtctcgtctgtgcgcactcagcgccccacgcccctggcccgcccgcgagagcctcgcccagcggtccccagcccaggaggtcccagtgaggaagggatggtgcgcccccaacatggtccggagatacacccagctaccaattcgggaccaggaccaacaggaccggacccgcctccctggacctcggacctgatgaggccacgacccctgcgcttctctcctccccctgtccctcccacctgtgctcaaaataaacctctggactgaccggctttaaaaaaaaaaaaaaaaaaaaaaaaaaanacactggcccccnntttacaaccgcccnactggaaaaaccctgtcattacccaacttaatcccctttcattccattcccctttccccacctttttttaaacattaagaggtcctaacaaaatcgccccttccccaatgtttcctcaccctttatgggaaatggcaatttttaaaccgttaaattttgtgttaaaaatcggggtaaaattttggggtagacagtttttttttttaaccacataggctcaaacttggacaaaatcctttttaacccaaaaaataaacccaaaattggtcgcgggttttttccttttgggacccgggttctttttttaaacgtgtttttttacgagggcgacc

SEQ ID NO: 240644 - DNA, 513 bp, Homo sapiens
aaaatgagtggaaatgattattttttggagatggtgtgttgaaactaagtaactcattcctcatcacacttttcatccactagctttagcatttgttgatttttcttggttgaattattacttaattatttctattgatgattgctgaatggtggtctttctaattttattacattcattagttgacattctactgtaagaaaaagctttctcttcctcccattgttgatttatttgtttatctttgtttttatggactcatggttttcttctttctttttttttttttttttgtttttgtttttgtttcaggagatgggatcttgccatgtcgccctggtgggatacaaacccctgggctgaagtgatcctcctgcctcagtctcctgagtagctgagattatagctattgggcctaacttcattgtttcattttttctattcagtgggcctgtaatccaacattatttttattttgatgctcaaattgtcccatatttgataagtggaatc

SEQ ID NO: 240645 - DNA, 253 bp, Homo sapiens
tcgatacggctttgtttgggtggggtgtgggttgtttttgtttttgtttcaggagatgggatcttgccatgtcgccctggtgggatacaaacccctgggctgaagtgatcctcctgcctcagtctcctgagtagctgagattatagctattgggcctaacttcattgtttcattttttctattcagtgggcctgtaatccaacattatttttattttgatgctcaaattgtcccatatttgataagtggaatc

SEQ ID NO: 240646 - DNA, 342 bp, Homo sapiens
gtttcactctgtcaccaggctggagtgcagtggcgctatctctgcttagtgcaacctctgcctcccaggttcaagcgattctcctgcctcagcctcctgagtagttgggattacaggcatgcgccaccatgcccagctattttttgtatttttagtagagacagggtttcaccatgttggccaggatggtctcgatctccttaccttgtgatccacctgcctcagcctcccgtagtgttgggattacaggcgtgagccaccgcacgaggcctgcccttgccatttttgtggccctgaactctgcttggcttctttccacttaaccccttctgtcgtcttctc

SEQ ID NO: 240647 - DNA, 1686 bp, Homo sapiens
tactatcaaggacacccagccaactaacatttagaaagcaaactctttattattaaacattaacatatttatcgacgtgtgaacattctgggacaaaatcatctgcccacttcttgaggggccattgttagaacgaatattccaaatgttctgcccatattgcatttgggggaagaaactgctctgctaaaccaaagaaacacaaaatgtaagaactagtgggcagaatcatcagcagagagccccctcactgtcacatcgcccttgtgaggcactcagaaaagctacagcagtcacttacatgacaacaccaactttcaatgtattggttcacatattttaattacatcttggtccctaaagaagcctgcagccagcaaacagacccaggcacgaaaagtaaatgagtctcaaactgattagcccaataggaattggacaaccccttaaggggctctagatggtgaaggacacgctgtttgccctgccattctgcagcacaaaaatccaggcaggtcgaagagggcggacaccctcgcgtggccaccagcccggagccgcagctcacacagcggcctccaaggcgtttcgcaggcagtccccacagtggttcttaaagcggccgctctcgccaataattgggagtctaattacgcaacgttcttcccgctcccattcccgcttcttctctctttccaacagtccgctaacgaaccaggtactgtagctgggtgtgtcgaaatcatttttcccctgctcccaagtttctcggtatatacggtacaaaactgcacaaaacccggcgctaaggagcgcaggaggagctgacacttcacacatttgtcaagattactgtcaggccccacctcggcgattgccacattcccgataggcatcgcagttgtaaaatacacaagttccctccccggctccggacccgaaagcgtctgcaggcgctgtctataactttgcttttcgatggttcagtcattattagcattatgattggtttttacaaaacgcactggaatcttaagagtcttttccttgctctgctgccttcaaaagacatggaaccccaggactgctccgagggcccctgggaatgtgccggctgcagtctcagggctccctcacttgtcttgggtctgagggcgcgacggtgacgagaaaggggggactacggccaggaaaggggagcagggcccaatcccctcccctagcgatcccgcagtgaagggcccgggcgccgagccaggacaggcgcgattcgctcccgtttatcaaatccttatcggtgccccgaggtgggaaccgctgctttcgaccggaggatacacggtttctggctccagtcccgtagtggaagttggaacaagagcaaatcaacctcggcagtgagccctcccggccagtcacctccctcccttagcgagtcggtcctcctcatcctcgcacctctataccgccgctccgccgctggtttcccgcggctcaggcggttcagccggccgcgcgttggattccagcttcccgcagcatagcctcgccaagccgcggccaagcgcggggctggaagctccaggccactggggccgcacgggtggagacaggaggagaaaggggacaggcggcgagccgcacacatttgcagaagttgaggccctgcctgcttctgcgcggccg

SEQ ID NO: 240648 - DNA, 1459 bp, Homo sapiens
tactatcaaggacacccagccaactaacatttagaaagcaaactctttattattaaacattaacatatttatcgacgtgtgaacattctgggacaaaatcatctgcccacttcttgaggggccattgttagaacgaatattccaaatgttctgcccatattgcatttgggggaagaaactgctctgctaaaccaaagaaacacaaaatgtaagaactagtgggcagaatcatcagcagagagccccctcactgtcacatcgcccttgtgaggcactcagaaaagctacagcagtcacttacatgacaacaccaactttcaatgtattggttcacatattttaattacatcttggtccctaaagaagcctgcagccagcaaacagacccaggcacgaaaagtaaatgagtctcaaactgattagcccaataggaattggacaaccccttaaggggctctagatggtgaaggacacgctgtttgccctgccattctgcagcacaaaaatccaggcaggtcgaagagggcggacaccctcgcgtggccaccagcccggagccgcagctcacacagcggcctccaaggcgtttcgcaggcagtccccacagtggttcttaaagcggccgctctcgccaataattgggagtctaattacgcaacgttcttcccgctcccattcccgcttcttctctctttccaacagtccgctaacgaaccaggtactgtagcgctgtctataactttgcttttcgatggttcagtcattattagcattatgattggtttttacaaaacgcactggaatcttaagagtcttttccttgctctgctgccttcaaaagacatggaaccccaggactgctccgagggcccctgggaatgtgccggctgcagtctcagggctccctcacttgtcttgggtctgagggcgcgacggtgacgagaaaggggggactacggccaggaaaggggagcagggcccaatcccctcccctagcgatcccgcagtgaagggcccgggcgccgagccaggacaggcgcgattcgctcccgtttatcaaatccttatcggtgccccgaggtgggaaccgctgctttcgaccggaggatacacggtttctggctccagtcccgtagtggaagttggaacaagagcaaatcaacctcggcagtgagccctcccggccagtcacctccctcccttagcgagtcggtcctcctcatcctcgcacctctataccgccgctccgccgctggtttcccgcggctcaggcggttcagccggccgcgcgttggattccagcttcccgcagcatagcctcgccaagccgcggccaagcgcggggctggaagctccaggccactggggccgcacgggtggagacaggaggagaaaggggacaggcggcgagccgcacacatttgcagaagttgaggccctgcctgcttctgcgcggccg

SEQ ID NO: 240649 - DNA, 1070 bp, Homo sapiens
tagggtcttagggagtagggtcttgggagtctaattacgcaacgttcttcccgctcccattcccgcttcttctctctttccaacagtccgctaacgaaccaggtactgtagctgggtgtgtcgaaatcatttttcccctgctcccaagtttctcggtatatacggtacaaaactgcacaaaacccggcgctaaggagcgcaggaggagctgacacttcacacatttgtcaagattactgtcaggccccacctcggcgattgccacattcccgataggcatcgcagttgtaaaatacacaagttccctccccggctccggacccgaaagcgtctgcaggcgctgtctataactttgcttttcgatggttcagtcattattagcattatgattggtttttacaaaacgcactggaatcttaagagtcttttccttgctctgctgccttcaaaagacatggaaccccaggactgctccgagggcccctgggaatgtgccggctgcagtctcagggctccctcacttgtcttgggtctgagggcgcgacggtgacgagaaaggggggactacggccaggaaaggggagcagggcccaatcccctcccctagcgatcccgcagtgaagggcccgggcgccgagccaggacaggcgcgattcgctcccgtttatcaaatccttatcggtgccccgaggtgggaaccgctgctttcgaccggaggatacacggtttctggctccagtcccgtagtggaagttggaacaagagcaaatcaacctcggcagtgagccctcccggccagtcacctccctcccttagcgagtcggtcctcctcatcctcgcacctctataccgccgctccgccgctggtttcccgcggctcaggcggttcagccggccgcgcgttggattccagcttcccgcagcatagcctcgccaagccgcggccaagcgcggggctggaagctccaggccactggggccgcacgggtggagacaggaggagaaaggggacaggcggcgagccgcacacatttgcagaagttgaggccctgcctgcttctgcgcggccg

SEQ ID NO: 240650 - DNA, 2133 bp, Homo sapiens
  misc_feature (1110)..(1110): n is a, c, g, or t
  misc_feature (1177)..(1177): n is a, c, g, or t
  misc_feature (1338)..(1338): n is a, c, g, or t
  misc_feature (1444)..(1444): n is a, c, g, or t
ctcacaactgccccatgcccctcaatccacgctcatgcacctgccctgtctctgtctcctgcctccagaccttccgtcataagctggtggagcctgtctgtgctttctggaactacagtatcagatgagtttccatttccaggttcttttttttttttttttgagatggagtcttgctctgttgcctaggctggagttcaatagcacaatcttggctcaatacaacctccatctcccgggttcaagcaattctcctgtctcagcctcccgagtagctgagattacaggcgcccgccatcacgcccaactaatttttgtatttttagtagagacagggttttgccatgatggccaggctggtctcgaactcctggcctcaggtgatccacccacctcagcctcccaaagtgctaggattacaggtgtgaaccaccaaacccagccgttaagatgatttttttaaaaatatgtccactctgcttggggatgaggcaagacttacacatggttttgacctctgttcaccatctgcctttcagggtgactccaggctcctcccagctctaagacaagctgcagcgggaggatgtgttacccagggggtagtgagctccttgtcataggagtatgtgaaggaggaagcactcactctgtgaggtgcctaggaagagaatcatctgtcaaatgggcgttgaacttgatctatctgaggccggggcccgtggactcttgaaggagcagagcaggctccagggattatcctggctccctgccctggatctttagctgaggtagggaaccttggtcccagtggctcagtaattaattaagttgataaatgacagtcactgggatcagccctgccctcctaccatcctaagaatgtcaagcacattttacaggtgaaaaactgagacccaggaaggggcggtgactcgccaaggtcacctagctggttagaggcagggcagtgacaggccccaggctctggggaaagcctttcccctgcttgcttctggcccctcacccccttgtccaccttatctcaagagccccctgttccctccccatcccccaagcccatatacagggggtgcctgggccaccacnggctgctccgtggctgccctgtacctggactccaccgcctgcttctgcaaccacagcaccagctttnccatcctgctgcaaatctatgaagtacaggtgagtgcacggtgggaggggggtgtcaggagggggcttcttagctggaggtgaagagaagagccaataggtagccagaagaagcatctgagggatgccagctttcatagattgtcggggacagggctgcangcagtagttcatgcctgttgtcccagcactttgggcggctgatcacttgagcccaggagttcaagaccagcctgggcaacatggcaaaaccccgtctctaccaaanatgcaaaaattagccaggtgtggtggctcgtgcctatagtcccaactattcaggaggctgaggcaggaggattgcttgagcccaggaagtcgaggctgcagtgagccaaggtcacaccactgcactccagcctgggtgacagagcaaaaacctgtctaaaaataaatgagtaaataataaattgtaaaaaaaattgttgggggaaaactctaagaggatgtcaggaggggtcggattcactggagctggaaagggccccggagtggttacttgctgagaagtcaggtgagatgggacgtgagcctcaggaacgctggggtcactacaaggaacaccttgtagtgttgaggggcacactacaaaaacatgttaccaaatgcatttttcctgtagagtcagggccaggcacggtggctcccacctgtaatccgaccactttgggaggccaaggcaggcggatcatttgaggtcaggacttggagaccatcctggccaacatggtgaaaccccatctctactaaaaatacaaacattagccgggcatggtggcccgtgcctgtggtcccagctactcgggaggctgaggcacaagaatcacttgaacccaggaggcggaggttgcagtgagctgtgagctgagattgcgccacttgcactccagcctgggtgacagactgtcttgaagcaac

SEQ ID NO: 240651 - DNA, 441 bp, Homo sapiens
actccccagctccttggtgcagaagttctattagggcagagcagcaggctgtaaggagagtaagctccactgctggagggagctgactttatttggagcagattaaggaaaatttcatgcctgggacattgtcaaaaacaatagtgatctcagtggcaagcaatcagacaagtgcaacatttcagtagcctgaaaccttgagtcttgtggggcaaacaacaatctggtagacaagccaggaatgtaacaggaggatccaggggatgagaaagccaaagagggccttgataagatcctttttatctcttgtggtctggaatactgtgtttatgtgaaggctgcacgtatggtcatgagagaccagagagaaccctaataactacttgtctctagctgaatgtgagacctcatgaatgcagaaagtaaaagctagggcagact

SEQ ID NO: 240652 - DNA, 459 bp, Homo sapiens
gagcgggcagggcggggtctctcggaactcccacagctggaggtgcggtccccggtgtccttccagcaggaggagagaccgggcttgcgctgtggccgccagggggcggtgtggtccttttccgcatttctgggcccgtcactcctctcccgctgattctccttgagctctaggaggaggtggttgcctgcaacggatagaagccagggtccggtgtggtcaggaatttagaactaaaggaaaaggttcacttcgtgagtccccgttgaaggaggaagggttgggtattaccacagagaaaatgtggagttgggctgggctcggtggctcacgcctgtaatcccagcactttgggaggccaaggcgggtggatcacctgaggtcaggagttcaagaccagcctggccaacatggtgaaaccacttctcaactaaaaataaaataaaataaaaaataaaa

SEQ ID NO: 240653 - DNA, 406 bp, Homo sapiens
ctggctgtatatgaacatcatatgtaagtgagagagacagccaaagggtagctgaaatgactgtgagtgattctcactgcaagctctactgtccaaacataattttttaaaaattcaaattctgttggcagtagttcagaagataagtaaattcagatttttctcaggacagtttgtgtctgtatcagcctctcttaaatatttaaactgagaattagttatcttgaataagcagataattgtaaaggatgattttcatcattatctgcttataaggcatgtaagaagtttatgtgttcaattggtggtaatggtttgatactacttggaaaacacttgtctgggaaggtaatgttcactcgacctgccactgcttggaattgggagatcgttttagtcaaattga

SEQ ID NO: 240654 - DNA, 289 bp, Homo sapiens
cttcaaccagcgccactctcagcctcccctctgccagcgcttctgtggctgcacctgcattcgtgggctgtggctgggaagcacaggaataattgatggctcgtggggcactttgctgggctgcttccagaaaagttgacccctccctgcaaaccagcactgcccagcattcttgtcccgccaagcctgactgcgagctgttgtggcattgccactttgcttggaaaggaccccttatctttcatttcccttgcatttctttcaattctaccattcaccatttctcata

SEQ ID NO: 240655 - DNA, 419 bp, Homo sapiens
cagtgagctgagatcgcaccactgcactccagcctgggtgacagagtgagactttgcctcaaaaataataataataataataatgatgacaacaaaacaaacctataaggattttgactgggattgcactgagtctaaagataagtttggaaaaagccttaatattgcaaatcaaactttatcatttttttagtattataaatagctttctacagtaagccttgtggatatacatttaaaatgctattgttctataggacagatttctagaaatgggatttctagataatagggtataagttaatttaaaatatatataagctatatatataatatataagctaatttatataatgtatattatatataatagctaataataatataataagctaatatatataatatataagctaatt

SEQ ID NO: 240656 - DNA, 533 bp, Homo sapiens
gcggccgcccgctcccaccccagaaccgacatgtgggaaaggctacccctgactggggaggggagataggcacggtgggagtggggtggcccaagcccaggcctgacacctcagctgtttaaccagtgctatgggtctcactcaggccaggcgcagtgctgagcacttcacaacgatccactcatctcttccgcccagcaacgtgcaggtgtgactgttatctccattttgcaggtggggagactgaggcgtggaggggttcgcagccccacatcagcagagccgggggtcacaggcactggcagctgtgttgcctcgccctgccccgatggctccccctcatctctcagggagacatggagactctggatggccctggagtgcaggggcctggtgtctgctgtccccctcatcttgacgtcacaatcagctaatgactgcagctgctctcggccagttcttccattgccagattccggggggtctcccagcccattgctgcagcatcctgtgcgtgacctggatctgttact

SEQ ID NO: 240657 - DNA, 517 bp, Homo sapiens
atctttcgtcactcctttgccttagagaggggataagggagaagaatcttgtctttgacttgggaatacttaagtgagttcagtctgaggcataccggaaagtagaggaagagaatgtgggtagggggctgattgtgaagaagtgaccacttgtggcttgtcaccgcattgcaaagtgcattgggagcttcttgcttcggggtgatgatctctgatcccagaagcaccaagaagggatcctacccagaggaaaatagaggtgaactggcctgccagagagtccatagttcataggtttagatcatagactttgcttctggccatgtcaaatatctgtcagaagccaaggctgggacttgcctgctgtgccttcctcatggcacagtttttgtcctggtcctcagtggaagctggcttttttcagcagttgagatgtttaatttgtgtgattctactcaggcctttccaagagtcctgttttccaaactggcttgtggagatttctggtgctcctttg

SEQ ID NO: 240658 - DNA, 405 bp, Homo sapiens
cagcaaagaagttgactcacttaagtcaaaccacaacaaaatggagctgggagagtataaaagaaggcccttcatgcatggatgtctctaaaagaattattgcaaggactctctgaaaactacaaaaattttagatacaacgcttctatgaagacatcttcccagcaatagccagtatcaccagtgagtatttgtccataccagcaataagcttctggggccaaagaggtttattttaaaataacttacatgaacttcacctttttttttctttatttcttcttcttcaaaaaaaacaaacaaaagggatatatgtgcagaatgtgcaggtttgtatgtgcagtttattttaaaataacttacatgaacttcaccttttttttctttatttcttcttcttcttca

SEQ ID NO: 240659 - DNA, 397 bp, Homo sapiens
aaagagatagccagccctatttataggctgtgcctggcggagatgaaaccctctatgtttatggcttgggcatcaagcagacacctgaatggcaccaattcttcacctgatttgccgcatgccagtttcagccctctgagctacatgaggcctatgctattttgatgaagtgagatgtcctaaagcatactgagataggaaaggacacactggcactctcttgtctgctacttctggaacaagactgaacagtaaggaaaaaggattgggaactgctcaagagaatcagcttaaattcagttttcggaatcagtggcagctcttcggtggcaggggcttgtcctctcaagcttctccattctggtggatctcctggttctcctttaccctgggcctc

SEQ ID NO: 240660 - DNA, 371 bp, Homo sapiens
gcaattctaaaatggtattttaaccatgttattataagcaactattattgcttattgtaacaatgatccctgattgataaatagcatctgtctggtttgagagaactataaatacctgatagggacaccattgctttcgattacctgaatgcaatcattgatataactggacttataacgtgtggcaattctagaagctatgcctgttgactgttccaagacatattaggtggtgggggcttgaagcttctaagccagggtaatgcctgtatctatgttatgtggatcttacctccttatacttgagccttcatctggtgggtgaaagaagagcctcctgactgctgggtgaaccgtgacgtgggactacc

SEQ ID NO: 240661 - DNA, 496 bp, Homo sapiens
gctgcggatgctggagttggtagtcacaaggtgctaatagtaatttgctctttgcttgtgcctccatcccagatctcgaggcagatattaccaccttggttttgcacaggctcattgaggttaaagggctggttggaagttacttggcaaggggttgagtgcggaggccctaaaattctctggcccgttagaccttgagctagtcagtaaactagaaatggaccgagacccgggagacctgaattccagtcctcactctgtcactgactcagtgtgtgggcaaaaaatgatcagtttcctcacctataatggaagggccagtggtactcttccacttatttggatctgagttaatatttgaacttagacctcacaaaaggcacacaatgctaatgtaagcatcatttatggccaactttctctgagctttactttccccccctttttcttgcgacctgagtttgccctttgggaattaaaatattaaataagagtc

SEQ ID NO: 240662 - DNA, 361 bp, Homo sapiens
tacacaaaatactttatcagcagctgttttcatcaaaaaatcagtagtcagtttcacagttgaaaaagttacacattaaaatattttacaattcattatatattcaccaggttcccattttctaaggggcttttaatataaagcagaatagaagggaaaccctcaaagttgattactttgacactaagttttacataggacactaagaaccacaaaaagcttaggttctattgtaaaatagcaaccaaattccattcttcttttaaaaatccaattagaaacatcttttttaaaaaaacaaattccacaataagagtaacagatttcaaattaacagtagtctaaaaatcttcaaaataaa

SEQ ID NO: 240663 - DNA, 470 bp, Homo sapiens
agggtgaggtatgggctatagagttagacaggctgggctctaattccagctcctccatatcttggcaaacagacagaggaaaaacaacataaacatgtaaaacaaatagaatgttccaaagaatcatccagattatttgctaactacaaaaggaaaaatgtcttttacaataaaaactctaccagtcaccacattaaccagtcaaatgtagcctcactaaaaatcaatctgaaagttactcatctcttcatgtgacacaatgtgaaattcatagcatcacccaggaaatatttccaccaaacatgtttaacctaaatttaaccaaagaactttagatctttaacttctggtttataagaaatacaaggggtcaaggaacaagttaaatgatatcacaaggaaacactctagaatgcaggacagttttcaagaaaactagcttagtctcttaacttaaaagataacaacca

SEQ ID NO: 240664 - DNA, 270 bp, Homo sapiens
cccccaagttgtagcaccttatttctgttttcttctcattcccatttattttgctctgttatatatcatttttaaatggcttaaaacccatcttaaaatttttattttctgtgtggatattattttacacctaattatctctttatttctttttttctttctttctttctttctttctttttttttttttttcttttttttttttttttgagacagagtctcactctgttgcccaggctagagtgcagtggtgtgatctccactcactgc

SEQ ID NO: 240665 - DNA, 217 bp, Homo sapiens
tagggcttattttgctcctgtcctttgcctgtgcatttcatttttgcatcgtggtaatcatactgggtgaattttgtattctgtaatttcaactgaatattatatcataagtgttatctacaagttccatgaggaccaaatcttctccacctttttcaccattttacttagcatggtatagtaaagctggctcaataaatatttgctgattgaataa

SEQ ID NO: 240666 - DNA, 424 bp, Homo sapiens
ccccgcctgcagcaagcccagcaacatcatccccgccgctgccgccatttcacttcattggagacactgaaggccgaggtcgccaccactcctcctaatcgacggagcgagagaagctggcggatggttgtccacaggcggctccggcccccaggtctcctactaaacgacaacagtcattatggaagccttttttttttttcaagtaatattaagtgcttgagtatgtatcaaagaagccttgactgttaattgtcactctattgggcactgtggagtaaaagcaattctaaaaccaactacatggaaaccatcaagacctgtcactcccgtttctccacagctattgttgctcctcacaggttcccactccagccttcttccttcaaagaccctgagagaagaaataaaaaataaaagcaag

SEQ ID NO: 240667 - DNA, 860 bp, Homo sapiens
ggaagcccaagcatggagcataaaaaacagctggggggccaggcgcggtgactcacgcctgtaatcccgacactatgggaggccgaggtggatcacctgaggtcaggagttcgaaaccagcctggccaacatggtgaaaccttgtctctactaaaaatacaaaaattagccgggcgtggtgatgggcgcctgtaatcccagctactcaggaggctgaggcaggagaatcgcttgaacctgggaggcggaggttgcagagagtcgagatctcaccactgcactccagcctgggtgacagagcaagactccatctcaaaaaaaaaacttggggtgtcaggggtatcccacgacccagccttccccacccccagctcagggctgcctcttgcaggaagccttggctcacctttccctcccagtgcaccagtcccagggctcattgctcactgccctcagggcaacctcagaaggccaaggcctgagctctgccagggctgcaggctgtgctggggctgggcctggacaaggggccgccagtctggggaggggctaggagagcaggatgaagggaaagcaaggtgtgatggggacggggcacagagggacacagtcccccagaagcggagccagtgagcaactggttccggcccctggctgtgcccggtgccctgtcgggctgcccagccctgaaagcgtcccccacttccactggtcaccgcaggcctggtctgctcgctgagaagccctgtgtttccgttctctctgggctatgtggtggtggcaccaattcccagcagggcccggcaaggttatttatagaactggccagggcctgtgtccacagcctggcaggcacccag

SEQ ID NO: 240668 - DNA, 386 bp, Homo sapiens
taaataactatcattgcatattaaatttctcgatatttgagactgaagagtttatattggttactaatttgtagaaggcgttgataaaaagatttctagtaacacctccagaaactgttttttacattcattgtaaccttacttgatctttccaataaattagagacatttctgtgagaatttcatgtagaaatgatcttgacttaggaatgacaaaatatttttttggagatcacggaatacttatttagtaagttagtgcaaagtttatttatcttgaagttttacatatcataactcaaggtcactaagtgatataaagaacattcaaagtgaggtatacacagaaataagatacatcaatttggcattttgaaaagaaccta

SEQ ID NO: 240669 - DNA, 506 bp, Homo sapiens
tttagacggagtttcactcttgtcacctaggctggagtgcagtggcgtgatctcagctcactgcaacctccgcctcccgggttcaagcaattctcctgcttcagcctctcaagtggctgggattacaggtgcctgccaccacgcccggctaatttttgtatttttagtagagacggggtttcattttgttatataattaggactttacattattttataatgcttgctaattgctgtaggtctccatattgtcatttccccaaccagactatatccttaaaggggatagatgttgtctattacaatactattgctattgctgtgttttgttttttgtatttctgttaatgactagcaaggcttggcaaataggagttcaataactacttcttgtgtaagtgattgacaaatgactttttagacaacagctttcttcaaatatgtcagagcttctatatttacttgaagttgtcaggtacagcacatcttactgcttgcaattgcca

SEQ ID NO: 240670 - DNA, 298 bp, Homo sapiens
aaatctaggttgcacaatccaacaaacatttctatagaaatgttctatatttgcactaatacaataattctaaatgaaagcagttttaaacagcagtgtaaagtaagtgactgcaacagaaatgacaggatttgacaagctgtcccttcattcattgttcattcaaaatacatgaatgcttactatgttccaggcactgttctacatacagcaataaacagacaataatccctacctcacagagctaatttgtattctagcaggaggaggctgacaataaattggtaaaacatatgat

SEQ ID NO: 240671 - DNA, 425 bp, Homo sapiens
attacagattatctaatcccagaaaaccccataccctatgggctttagtgttcacgagtatgtgacgatttccaaagtacattaaaaaaaaaattataccaggtgcaatttaagatttaggagttaaaatgtgctcagattttgtacagtaactaaaacatcctattcatgatgagaagaattacagactacgattgtgggttccactgtctctccctaatcatggtaagtctgaaatggaaaatgcaaacatagctgcaaaattaacattgaatcaattttttttaacaattggaagctggccaggaacaatggctcacacctgtaccccctgcactttgggaggccaaggcagcagattgcttgagccaagagttcaagaccagcctgggcaacacggcaaaaccccatctctataaaattca

SEQ ID NO: 240672 - DNA, 366 bp, Homo sapiens
gcaaacgatgaacagatttttgttttgtggagaatgaagaggaaatgcagaactctatggaaattctcccctactcagctcccctccttctcagaaatagtcaggtattctcctctgggtgatatagaagttcagcctttccttgactttcagatctgtggggtatcactgtctctttctctccctttcagcagctgggatctggcctgcagccttaaagaaaggtgaccggttacattaatcagaaatataacctatcaatggcgtttcaaaactggctggatcacattcatagctgtcctcaaatgcttagcacccctagaaaactaggactagtcaacaaatcccagagaccttcccctaaat

SEQ ID NO: 240673 - DNA, 584 bp, Homo sapiens
actctcagttcgattttcaatttattatctatatccagctcctttccaaagatacttgaggggtctttcaaaaacacacacaaaggagtgaaaaaggaaggcaagacaattaagaagaggaaatagataaataattctagcacaaatggagctgctatgactgggcaccatcgcaacaaacaagacaaaatgggaaggccagctgttgctgcataacaaatctccccaacatctagaagctgaaaacaccatttgtcactcctcacaaatctcaggctgggctgcacagttctgctggtctgaggcaggattggctgatcttggttgggctcatgcgtgcatctggagaccaatggcaggctgctgggtgctgggtgctggctgctctgagatggccttaactgggacaccttggctgggttctacatggcctctcatccagcagcaggccaacccaggcttgttcacatggtgatagcaggggcccgagaaagcagaagctgtcaggccccttggaaagcctcttcctctaggcttagaactggtataccagcactcctgctatgttccattggctgaagcaa

SEQ ID NO: 240674 - DNA, 1098 bp, Homo sapiens
  misc_feature (426)..(426): n is a, c, g, or t
  misc_feature (469)..(469): n is a, c, g, or t
  misc_feature (482)..(483): n is a, c, g, or t
  misc_feature (538)..(538): n is a, c, g, or t
  misc_feature (542)..(542): n is a, c, g, or t
  misc_feature (564)..(564): n is a, c, g, or t
  misc_feature (589)..(589): n is a, c, g, or t
  misc_feature (603)..(603): n is a, c, g, or t
  misc_feature (607)..(607): n is a, c, g, or t
  misc_feature (676)..(676): n is a, c, g, or t
  misc_feature (745)..(745): n is a, c, g, or t
  misc_feature (796)..(796): n is a, c, g, or t
  misc_feature (826)..(826): n is a, c, g, or t
  misc_feature (934)..(934): n is a, c, g, or t
aaaatgaaaagtgaaaccaaagacaaggttagactacggcactatgaaaaatcataggccaacaaaccagataacctagcagaaaccaaagacaaggttagactacggcactatgaaaaatcataggtcaacaaactggataacctagcagaaaccaaagacaaggttagactacggcactatgaaaaatcataggccaacaaactggataacctagcagaaaccaaagacaaggttagactacggcactatgaaaaatcacaggccaacaaactggataacctagcagaaaccaaagacaaggttagactacggcactatgaaaaatcacaggccaacaaactggataacctagcagaaaccaaagacaaggttagactacggcactatgaaaaatcacaggccaacaaactggataacctagcngaaaccaaagacaaggttagactacggcactatgaaaaatcanaggccaacaaacnngataacctagcagaaaccaaagacaaggttagactacggcactatgaaaaatcanaggncaacaaactggataacctagcngaaaccaaagacaaggttagactanggcactatgaaaantcanaggccaacaaactggataacctagcagaaaccaaagacaaggttagactacggcactatgaaaaatcanaggccaacaaactggataacctagcagaaaccaaagacaaggttagactacggcactatgaaaaatcanaggccaacaaactggataacctagcagaaaccaaagacaaggttagactanggcactatgaaaaatcataggccaacaaantggataacctagcagaaaccaaagacaaggttagactacggcactatgaaaaatcataggccaacaaactggataacctagcagaaaccaaagacaaggttagactanggcactatgaaaaatcataggccaacaaactggataacctagcagaaaccaaagacaaggttagactacggcactatgaaaaattacaggccaacaaattggataacctagcagaaatggatacattcctagaaacatacaacctataaaaactgaatcagaat

SEQ ID NO: 240675 - DNA, 224 bp, Homo sapiens
caaagaagactttagtggtataggagctaaggtaaagaagagaaaatttgagatcaagcacctttatcaagagatttaagtgacagaaaagtgatgatctggccgagcatggtgagtcacacctgtaatcccagcacttggagaagccaaggtgggaggatcatttgagggctggaattcatgaccagcctgagcaacatagagagaccccatctcttaaagaa

SEQ ID NO: 240676 - DNA, 404 bp, Homo sapiens
ttctctgacatttttaaatatcctgaaaagttgaaagaattgtttagtgaacgcccacattatctttcacctagattctacgattaacattttcatatttgctttatttacatatttatctgccagcacattttttttaaagatgcattttaaagtcagatgtggaagtcagttgctacagactgaattgtgtcccttccccccagattcatgttgacgccctgaccctcaatgtgataatatttggagatgggcctttgggaggcagctgagtttacaggaagtcatgagggcaagtgctctcacgatgggattagtgcctttataagaagcagcaccagagacctttctccccacccttcccatgtgagatcacagtgacaaggtggcagcctggaggctag

SEQ ID NO: 240677 - DNA, 514 bp, Homo sapiens
atagtaatttataagtaagataaaatgatcattgaaaactcctggaattgcatcccaatggcttttataaatgtatttttgataacggagtgaattgtgctacccctcccccacaaaaatatggtcacccctaatctctagagcctatgaatgtgactctatttgaaaaaagagtctttgtggatgtaattaagtatcacaagatgagatcattctggattacctaggtcattacctaaatccaatggcgtatccttatgagagcagaagaggagaaggtcatgtgaagacaaagatagagagtggcagccacataccaaaagatgtctgcagccaccaaataagtaaaactgtttcaaaatcaaggcagttcgcttaataaaatcatgatgtttcagtcaggcatactgactcacacctgtaatcccagcactttgggaagccaaggcaggcagatcccaggccaggagttcaagaccagcctggccaacatggtgaaaccccatctctgttt

SEQ ID NO: 240678 - DNA, 553 bp, Homo sapiens
ctcactgtagcctcgaccacccagactcaagggatcacgtgaggcaggaggatcctcctgccacagcctcccaaaatgctgggattacagacatgagccactgtgcccgacttgggattggaaagagttttaaaaaccctcttcttttccattttcctgcctcctcacattctctggggagttgggcagtacatcctgtggcctaacttcagtctttcctcctgcttctcagaggaagcctaaccttgttgctcaaggctgtgtgactctccagagcctgggcacccaatgaactctcagaggtggccagaaagaaccagccacatgtacacccccagcccaccctgaaggcagagaagggtcttgggctcagggagagatgtgctggtggggggaggtgtggagtgaagcgtaagaggggctgccgaggctctgggtttcttttttcttttcttttttgagacagactctcactctgtcgcccaggctggagtgcagtgagccgagatcgcaccactgtacttcagcctgtgcaacagagcaagactatctc

SEQ ID NO: 240679 - DNA, 460 bp, Homo sapiens
ctccttctctttcctgtctcttagtatcattcttttctttcactgtaggctatcttttccataagtgggatacatagccactagcagttcctgaggtttgtcttataatttcagctactagaaggaaattgacctgactctttcagtcctaaatccaaaatctctggcaagtgtcttcctggttcagcttgaattagatgatcacttctagactaatctaagtgcttagagggctgggcccctttaatggtatcaagggaatgtggatggagtagaggagtggttatcaaaaagggatgctgaaaagatagtatcactggtgtctacaacaattctcatttgacagatgaagaaagtggaactttagatgttaaataacccctccaggtttactcagctagtgaatggcagatccacaagctatatagttaaacatgatataaaagtgaacagctaaaaa

SEQ ID NO: 240680 - DNA, 406 bp, Homo sapiens
ggggtgaggggaacactacatttttgggtcaaaaatattataaagatttattttacctgggcctttgattggatctgagctccgaaggatcaaccatttaaaaattaagccaagaaaagggtaccaaaaatattgtcacaaatttgggaggtacccaagccagaccaacagatggaacttggcacgaaatagctctttacagactaagtagctgactcaagaaattttaactcagatgaatttattaaaatgttgaatgtcatcttgaataagaggctggatgatagatttaggtcagtatatacaatttaatttgtttaacttcctgttggtcttggatagtataaaagctgctcacatttctatagttaaagagaaagagcgagagactcttagcataaaaaaa

SEQ ID NO: 240681 - DNA, 730 bp, Homo sapiens
ggccttatgccatttgaaacgtttttgcactttttatatattagttcatttagtccttataccaccatgcagtggctgtgatggttatggtagttaagagccaacttgagccagatgcctagcttcaaatcttggcttctctctcctcttactctgtgaccttgtgcaagtcattaaacttctctatgtccctgtttccttctttgtataatggaataatgaaaatacctatcttctgggattttcataaggattaaaggggtataaatagatgtaaagtgcttagaacatttcctggcacatgttaaatgctctacaggttttagctattttcacaggggaatgttcttagcaacagataggagttcaagatcttgctttgtcctgtggtgaataaagggagtggcaaaaatactgtgcccagtagaacctagtagctgtggaacaaagaagcggagccctgtccatcattatgtgcaaagagataatcagtagtgtcaaggaggtcagagaattctgaggtcaaaaggtgaaatgaatcatcattatgaatatttatgtcattgaatatgattatagacaatgagaaggcaaaaaaaaaaaaaggttgattgggagaagaaagcaatagtgatgatttgaagagaaatgatgaagtaaagaactaaatgggattgaaggttacaaagaggttgttagagaattgagcccagagtaatatatatggcta

SEQ ID NO: 240682 - DNA, 400 bp, Homo sapiens
tcccttataaattacctagaaaatgagcgtaagtctacagcaccataaagagttgagcctcttccacagtgatctgaagcttaagaattccaaattggtcaggatgtgcctgagtttaatacacctccttggcttgttcaggttgagcaaatccaagatcagacaatagaggactttacttagattcttgaacttgtccatggcagggcaagaggttgtgagtctgcccccctaatttgttacttcaagcttagtgataatcatggtaataacaagccttcagtaaggaaaccatttacctccaggaggctcaaaagcctgaacagaaatgacgtgatacatcatcctcagaacttccttgtgactaaaccatagggaatttgtaaacatcacttgaaag

SEQ ID NO: 240683 - DNA, 509 bp, Homo sapiens
agtggcaggcaggccacgcccctccgtgtgtaagacctgccgaaaacactcctcgtggggttggggtgggagtgcaggggccttggtggtttctacacccatgggcctgcccggcacgtgccccagactgtgcagacagggcctggtcagtggctggatgttgaccaaacgtggaatatgtctgtgtgtcaggtaaagctgtggtgcattctggttggttgtttgcttttgttttaatcaaggttctctttctgctgtagggctgcatgatttagcagccacaacaggccaggcgcggtggctcacgcctgtaatcccagcactttgggaggccgaggcgggtggatcacgaggtcaggagtttgagaccagcctgaccaacatggtgaaaccctgtctctactaaaaatacaaaaattagctgggcgtggtggcgtgtgcctgtaatcccagctactcgggaggctgaggcagtagaatcacttgaacccagaagttggaggttgtgg

SEQ ID NO: 240684 - DNA, 599 bp, Homo sapiens
acagttgattagatgggggatgaacgcctaatctagttcctgatttctgacaaatccacccagatattgtacacagtgcgtaggagacatatataatgagcacatataaaggtgcagaggaaaggaaggggatggagatagaagaaacaaaaagtgacagatcagatataaaagactttctaaccaccaaataaagaaagattttacttctactcctgatattttccagttccgctttcatttcctacataatccatcacataaacagaaccaatgacaaaaagccacatgattatctcaatagatgcagaaagggctttcgataaaattcaacaccacttcatgctaaaaactctcaataacctaggtattgatggaacgtatctcaaaataataagagcagtttatgataaacctacagtcaatatcacactgaatgggcaaaagctggaaccattccctttgaaaaccagtagaagacaaggatgccctctctcaccactcctattcaacacagtattggaagttctggccagggcaatcaggcaagagaaagaaataaagggtattcaattaggaaaagaggaagtcaaattgtc

SEQ ID NO: 240685 - DNA, 425 bp, Homo sapiens
ataaaccagactatggtctacccaaagtctctctatcaaggggactgaggaaaagactgataagactggggggatagttagtacaagtgagtgctgagagaacacgaggaggttctgattaatacttgcatatcaacccagaggaaaaaggttctgccacagaacattagctagaatatttaccaacaatctggttaagatgctatgagtatggaactgttagaagccagttggtccatcattagcaacatggactctggagttggaatgcctgggtttgaactgcagcctcattacttactagatatgtaacctgtgccaactcttaaacctgagtctgtttcctcatctacaaaatggagataattgtaatatgtagggttgttgtgaggattaaatgagactatatctacacatgcttagaa

SEQ ID NO: 240686 - DNA, 459 bp, Homo sapiens
ggaggcaccatctgagtacttctccctccgtggggtcctccgggaaaagagcgcgctggctcgggatcccgggcggactcccggcgagacaccgcagcgccacctagtgccgggatgagcaggtgcttttcggccgagccagtttccgtgcagaacgcctgagtcccctggagcaggtgaggcccctcccgagagggcagaggctgcttcctgtcttgtcaaggacataaaaagatgatcgtctaattattaaagtaatctgtatatatttagataatagagcatgaagtacaaaataaaacctttgaatgctttcatcccatgggggtgtgatggcccctgtctccctaccgggtggcgccaactctgtccatggtctccccgcggggcggcaccaactctgtccatggctcagttgctgcactccagtctgagtgacagcaagactgtctaaaaaaa

SEQ ID NO: 240687 - DNA, 473 bp, Homo sapiens
ccgctgcactccagcctggacgacagagcgagactctgtctcaaaaaaataaaataaaaagaagcactccgtggtgttgcatagagtgttggtatatattacatatatgaatgagttaactggcccttatcaggaagatggatgggaagtgggttctggaaaccttattctataccacatccttatatatagtcctcagttattgtccctctgtgttctagggcactgtgaggtgaatgctattgtacacgttttatagatgaggaaactaaggctcaggaaatgtaagtatctctcagaaggtcacacaggtaatcactgaaggagctgtgctcaaacctaagtcctacaactggcagagtgtggttgctcccacctgtaatcccagtgctttgggaggctgaggcgagaggattccttgaggccaggagttcacaaccagcctaagcaacatagggagaccttgtctttaa

SEQ ID NO: 240688 - DNA, 411 bp, Homo sapiens
tggggaaaaacacagatgacaacaatgtgtcatagctttgataccggatagactctggcatgttgagggtgcgtttctactactaagaatgtcaccactaagaatggtgacattcttaactttttgagggatggattcagaggaaaatttagagaaacttgaaggtgacatgttgaattgaatgagaagtctatcaaaactctgcaaagaactatcattgatgcttcaacagtttcctgaaataggattgtcaaatctgtaagtctgtgagatttccggaatcagaggtctaatcaaaaacatttagcgttccccacccccaaaacaacggaaattttaaaagtaaaaatttctctcttgggtgaaaaaaataaacaccccaactgataaacgatatactcaatgcttacc

SEQ ID NO: 240689 - DNA, 371 bp, Homo sapiens
tatattcactattgtcaaaataaacacgtaatagcaatctaagggaagcgtctgcaatttcctcatgaaacaaaagaagccttgggaagctttcttctcctgccacattaaggaatgcccattagtaggtcaggctcctgtaagtggacaaatgcagacccaaatgtaggcttccagtctggggctaaaatgtccatgcatgttccacaacttctcatctttcacttcttctctttgacaatgataacaggaaaacctggagaaagttttgtgcctgcctttagatctctgtaaattaggaagtatttatttttataggtatgtaatgctttcttttataataaattatttatagttattgtgtaaagcag

SEQ ID NO: 240690 - DNA, 463 bp, Homo sapiens
ccaggattatgtcactgaaaattcagaaatctgtgcacctacagctcacctgttttattacttttgtggtttgcatatcttccctttattttctcctggtttcttataatggtttgttttgtttgtttgtttatttgtttgtttcacaaaaatcccataggattctgatctcacaaagggaaaagctggatccccagggcaaggagccaggggtcagcggaatggacggtgccctgcagccgatgctgtcaatgcagcagggctaaggctgggaaaggcacctagtgaagggagaccagggagggtacacacaggtacatgcgtgggcagctgctgtctcctggggctggtctcccacaaggtggtttcctcgtgcagcagtgacttggtgcagcccctctcacctggcaccaatgcatttgtttcctcaaaagaccatagggtggcgtttacctcaccactt

SEQ ID NO: 240691 - DNA, 165 bp, Homo sapiens
ccgactgtaggaagcggaatgttgaaagccgcttggggggatttgccccctctggtagataccagaactatggatatgcctttatatattggggggcgggggggggcgggggcgagcccgtggagccgcccaacttcgcagagattaaagcttgagcctgagact

SEQ ID NO: 240692 - DNA, 285 bp, Homo sapiens
aagggggcagggggcaggggtgtgtggggtgtgtgtgtgtgtatagacctgcatggtcaaggccaagaggagcctttgtgttttgtcgcctgcttgaaccatggtgggatagaaggatttcagggtggaccagttgactgaatgcccttcaatcccatagtcttttgtggtgcatcaacctcatagaggaccttgtggtatatgttcaagataacagagaccgggagtttgagaccatgcccaacatgaggcaacatagctacatcctgtctctacaaaaaacta

SEQ ID NO: 240693 - DNA, 1082 bp, Homo sapiens
ctgggtgacagtgagaccccatctccaaaacaagaacaaaaacaataaaaaatccaacaatttaaggcattcattctttatctactcacatattgatatataacatgtatgtaagctctgtattcatagcttgtcataatgaagttggttatatttaagaagaattttcagtggaatttctaattgattcttttttaattaatttatttagacatgtgctgattgatcacctacaatgtggctagtgttgtgtcaggtgctatttcctctaagaaggcagaaaatatttcatggataagaattaggaacatcatctgtccagtacactttatacaattttcagtttagcaattattttgtagtttacttagtagctgtctcccctttgctttgaatcctaaacccctctcttttcatttttatatcccaagcatctgctcttagcacagttaaatccctgcaaaatagccgtaacttgagttaaaaggagggagatgtggagggaagagcatatgcaaagattcgatgctatgagaaagctcagcatgtttggaagcctataagcagttcattcctggtggagcttggttgggaggatgggcagtgaagttggagagatggtcaggggaatgaataagaggtgccttgcatgctgtgcaaatgcatttagacttgatctgcacgtgataagaagccattatggccagcctactaatatctgtctcatgggagctgcatcaccataataagaataaaacctgatttttggatccttgcaggcattggggcaggcagttagtaacaggattggaagtgtggaatataaagtgtaagaaaagagacttctccccatttctgagcacatagccaactccaggaaacatttaaaataggcatagtttgcctcagcctcttgtcccctcttgctctcccttcctctctctgctggtgttccccacccttagcccttccctcctgccctgacatctgcctgctgcacaggtaggtaccaccttactcttttttctgccacaattcaggcaatgcgacgtcagtttaagggcatctcttctagattccag

SEQ ID NO: 240694 - DNA, 427 bp, Homo sapiens
gggcaggggcccccgagcaggcaggcaccccaacgtggctccctcccaactcacgacccctctcgctaggtgcccagcaggcgtacaccaccacatgcctactaggaagccacggggaggaggacctagtgccgaacccacagccctggcctccgtggacatgcctcccccctaccccagcagggaacagatgacccctagagagcgccccactgtctaccccgaggtccaagcttgcagaggccactctgaagttggctgtccatcggcctcttaactgggctgtttttcgtccaacttctctactgcacttaagatgatttgccaaaaacccctccaccaccatattagctggaacatttggggttgaagtgacagaactcccaaacaaataggtttgagctgtaccccgtctctaccaaaaaaa

SEQ ID NO: 240695 - DNA, 578 bp, Homo sapiens
gctatctctatcgcggtttccttatgtataaatgggaagaatagtacctttcattggatcgttgtaaatattaaatatggtaacacctgttgttatggactgaatatgttccctcaaaattcatatattgaagcactaacccccaatgtgatggtatttggaggtggggcctttgggagataattagatttacatgatgtcataagggcgggcaggacttcatggtgggattggtgccattataagaagaaaagataccagagtcctccttctccgccatgtgagaatgaagagagaaggagtctatctacaagccaggaagccagccctcacaaggaaccaaatctatcagcaccttgatcttggactttccagcttccagaactgtgagaaataaatccctattgcttatgtcacccagtctatggtattgttgtggagcagccctagctaggacatctgtaaatgacaagttctatactactatataggactgctggataaatgctagctattcccatttccctctgagaactgaaatacctgaaacttctattaaaagtctttgtattcctcaa

SEQ ID NO: 240696 - DNA, 969 bp, Homo sapiens
ggagcttttttctatcaccatgaagtggaaaagtataatgatatcccacagcctaaaaactggaaagttggggtggagtgagatctggatttggaaacagttgcagaaataagttccagtgccataccagtgcctttcccaggtagccaaagtagtgcccacaaaccttgcctgcattttggatgtgatggagagtcagtcaaggccatagtgtgttgtgcctgaggggcccaattgttaagaaaccacagagaatacactgtaccgttcttgattgtacttttgcctgtgttacagttggtctttcttggaggaactagtgaaaactagttattaccccttgtccctgcactgttatctcttcccgtaagtcagctcagaatgggagtggaatctgtccaggtttttttcggtcactttcctgtcagtctcttgcatcatgaaaggaagacatcattcacatctgctcattgctcatttcagtttgacctgtgttctgttagaaattcctctaagattttaagatgcagcattgagcagattttctgtcactgaagcagattttactcaacatttattcattcattcattcatttattcatccactcagcaaatatctaattagagcctgttaggcgctaggcactgttaagcattggggagcttactgtgaagcacaacatttttatactgagacatgtccacgttgtaatgagccatatacatgggatcattttacaggaaatagaactttgctgtcatgatttgccttgggaaaaattagggaacaaatgggggtaccaaagacactgtctttcttagcagtgatctttgtgactttatcgtaatattattgtagcttaagagttgtgggaattaatttagctgtcattgttactattgttatttcctgattgctgacattttgcttaataaagatccaagctgaaaggtgggtagagtcaagat

SEQ ID NO: 240697 - DNA, 998 bp, Homo sapiens
ggcggtgcggcggtagcgcagggccctcctgcggggccaggcaggggcgggtgggcgctccttgccacctttctgctctccctgctgtccgagaagttcgtgcggtgccagcccagctcccagctggggacagaacaggaaacgtccccggcgagcctggcgggggtggcggcaggggtgtctgtcgcctgcgctgggcaggacgcgcgtcctaccggcctcccactccgcgggcctcaccagccacctcattcccggagcccgggccgccgagagcgccgcggatggacctcagggaaggcctggcgcgccgcctccgggaagccttccggccttctccctccaccgagtactggggagtctcaggccacggtgaatgaagagcaacgggccggagagacctcggcctctgcccaggagcagcgcccagcaaccccgcccacaggggacccggtggacgccctggtggccactttgccaggctccccatctcccagcgaaccagagaggatttccgttcccctcctgcttggtgcctagcgccagggcggggcgtgggctgagcagcccctcccatggagggagcggccagtctacatattggaggtggggctctggggaaagggtgttgttaggaaggcggtttgaggcagcgggaggtggggatgcgcccggcggggaggggcaggtgtgtggggagggcctggggagcgcctccccagccgggcagcgcttccccagccaggccccgcagctggaccccggctccgtccagcctgggaaaggactccacggtttatgctgaagtggtggtggggtgggtgaacgctgcgcaatggaagggcatggccctgtgctaattgccccggggtgtggggctgtggaggcactgcgggggggatgtgctgtgtcagttgggcaatggcggccaactgtggcgtgcaggccttggagctgcccctccatggagctttaataaaggcactagccctgcaaaa

SEQ ID NO: 240698 - DNA, 193 bp, Homo sapiens
ttttttttttttgcctccttggtgtctgctcatttttctaagatccagatcagctatgggcaaattcactgggaataggataaagtgaaggtcttctttttcttttctcagtggactaaaaaactcttaagtgtttcttttgtattcaaacccaaaactggtacaaagtccattaagagaagccacagctgca

SEQ ID NO: 240699 - DNA, 453 bp, Homo sapiens
tgttcagagaaaacagaaattattaacttgatgaagtatttctgtgtgtttggatttacgtaagtaattttgaaatttgcatcattggttgggcgtggtggctcacacatgtaatcccagcactttgggaggccgaggtgggagaatcactttagcccaggagttcgagaccagcctgggcaacatagtgggaacccatctctaaaaaaaaaattaaaaaaataaagaataaattagcagcattaacaaatgaggtagtaagaaactgtactaaaggaaaacaaacaaaaaaaggactgcgcatgttcatttttgtattcacctaaacacaactctaaagtttgtaggtttctagatcacctttgttgaactcagtatattatccataacccacctaaagcaaatagtttaattctatctttctggatataattaccttttagttggggttca

SEQ ID NO: 240700 - DNA, 1284 bp, Homo sapiens
  misc_feature (1279)..(1279): n is a, c, g, or t
cataaaattagatattaaaattgtaagtgaagataaacacactatagtattcccttattgtagccatggtcctctagatgcagttaaccaaatagggtcatttttattaaaagtagtgtttcctggcaaacactgacattacatcattatcatgatttaaaggaaatagtactagagaaggtgaattattatcattttcctgtgaaaaaagaaaagaggttttgctaaccctttcagagcattgggaacacagccagaagtgcattaaatgtatatattaacttgggcaatgttgacactttaggatgctgaagccaggtgcagtggcacacgcctgtaatcctagcactttgagaggccaagctggcaatcatcagaggtcaaaagttcaagaccagcctgttcaacacggtgaaaccctgtctctactaaaaatagaaaaactagctcggcatgatggcgtgcacctgtagtcccagctactcaggaggctgaggtgggagaatcactttaaccagtggggcagaggttgaactgagccaagatagtgccactgcactccagcctgggcaatagagtgagactctgtcttaaaaataaataaataggatgctgaaaattcctatttaaggaaataattctttttctgatttatttaaggctacatttgtattttcttaatacaaatattttgaaagtttcttcatatatggttttttgcatttcttattaagttttgcttcagatttttttttgtcttttctcctgttaattgccttcactctctttctgttctgtacttttctttgtatataaggattttttgaaaagattgtatatccctgttaacaaattgaaatctctattcactttaatagatttttacccccagttagcatatggttagtgagaagttgcagggtaagaagaaaacaatgttccctttcccaacacttttcctgattatagagaaaaaagcatgaacttgtataatgatctagtcctgtacagaatgagaaatattaattgctagactgagaatgttttggtggctaaagctaggaataactttttaagactgaagaatgatataagctatcaaatctaactcagttttcaaataacaggtttgcagagactggagaataaaaagtaaaaaattgttttattaattccagtgactaattctacttcatcaacatacatcataaataaaatttcataatatattcaccatgcattcaaagtaagggcaggtggagattatggaatcattggnacagt

SEQ ID NO: 240701 - DNA, 1230 bp, Homo sapiens
  misc_feature (1225)..(1225): n is a, c, g, or t
cataaaattagatattaaaattgtaagtgaagataaacacactatagtattcccttattgtagccatggtcctctagatgcagttaaccaaatagggtcatttttattaaaagtagtgtttcctggcaaacactgacattacatcattatcatgatttaaaggaaatagtactagagaaggtgaattattatcattttcctgtgaaaaaagaaaagaggttttgctaaccctttcagagcattgggaacacagccagaagtgcattaaatgtatatattaacttgggcaatgttgacactttaggatgctgaagccaggtgcagtggcacacgcctgtaatcctagcactttgagaggccaagctggcaatcatcagaggtcaaaagttcaagaccagcctgttcaacacggtgaaaccctgtctctactaaaaatagaaaaactagctcggcatgatggcgtgcacctgtagtcccagctactcaggaggctgaggtgggagaatcactttaaccagtggggcagaggttgaactgagccaagatagtgccactgcactccagcctgggcaatagagtgagactctgtcttaaaaataaataaataggatgctgaaaattcctatttaaggaaataattctttttctgatttatttaaggctacatttgtattttcttaatacaaatattttgaaagtttcttcatatatggttttttgcatttcttattaagttttgcttcagatttttttttgtcttttctcctgttaattgccttcactctctttctgttctgtacttttctttgtatataaggattttttgttttacccccagttagcatatggttagtgagaagttgcagggtaagaagaaaacaatgttccctttcccaacacttttcctgattatagagaaaaaagcatgaacttgtataatgatctagtcctgtacagaatgagaaatattaattgctagactgagaatgttttggtggctaaagctaggaataactttttaagactgaagaatgatataagctatcaaatctaactcagttttcaaataacaggtttgcagagactggagaataaaaagtaaaaaattgttttattaattccagtgactaattctacttcatcaacatacatcataaataaaatttcataatatattcaccatgcattcaaagtaagggcaggtggagattatggaatcattggnacagt

SEQ ID NO: 240702 - DNA, 469 bp, Homo sapiens
taaagctaggaataactttttaagactgaagaatgatataagctatcaaatctaactcagttttcaaataacaggtttgcagagactggagaataaaaagtaaaaaattgttttattaattccagtgactaattctacttcatcaacatacatcataaataaaatttcaaaaataattgctgatatggtttggctgtgtcccacccaattttcaccttgaattatataatcaccatgcatcaaaggtagggccaggtggagataatggaatcatgggagcagtttccccataccccactcatggtagtaaatacatctcatgagatctaatggttttataaatgaaagttcccctggacaagttctcttgcctgccaccatgtaagatgtacctttgctactcattcaccttctgtcatgatggtgaggccttcccagcaatgtggaactgtgagtccattaaacctct

SEQ ID NO: 240703 - DNA, 476 bp, Homo sapiens
ctggcttcgagtcctcactctctcccgggctggctttgagtcctcactctgctcttgcgagctcacatctgaagtgccttctgttctgtcatgaagtcccaagagttttttcgtctttgaatgttctttttatgtttcaggtggttttggggatttactatgtcttgaggacatccatgagcgtttctgtcggtgtggttttgtattttatttccctttgtggcctctgtcttgtgttgtctgagagcacggtggggttgcgagggccgtgccctcgggaggagacctgcgtgtgccttgactgccctgggcagccggcactggggcagaaggagtggactcccagggatccccgccgtttgtgtcccagacacagccccagccctccgcctgctggctcggtgggcggcctgaaaccatcctgccttctaggaagacagcaattctggaagagcaaagccgatacaactgaagga

SEQ ID NO: 240704 - DNA, 150 bp, Homo sapiens
ctagaaataaattgtgagttttgtaatttcacactatgcactataacactataatgttaatatacagaattattttttatatataattgttgcaggaaaaacccagacctgtgtagaagaacatccctctgccaaagagatagtgctgaa

SEQ ID NO: 240705 - DNA, 581 bp, Homo sapiens
attatatctttactatcagacaagattgaatttagtggaaaagttttaaataagcggcaatgaggaataattcaaagcaacagtatagcattaaacatccataaagcagaaactacagaaaatataaagaataatagttacatagtagtgataagaatgtttattcacttctcttagttcataagagatcaagtggacaacaactgagagaaagaaaacccaaataaaataatgaagtcaatatttgagattgtcaagctttgtatcctgaaaactaagaatgtcaaataaaacattcacaaaaatagaccataaagaaaatttcaaagaatttcaaaaggcaaagtaaatatatacagcattctgtgatctcattgcaataaaagtagaacttaggaaaaagaatatcatcacctggacattttaaatttcctactaaaataattcttagatcagaagaaaccaaacaagttatagaaaatctaaaacaaaagcataatgaaaacaatacatatcagaacttgtgagatggaactaaaatagagttcagaggcacttatcttaatgaagaaagaaaataa

SEQ ID NO: 240706 - DNA, 272 bp, Homo sapiens
agcacagagctgcaattctgtgcatgaattctggaggcagattccctggaattgaatccttgttctgccactttctatcggtgtgaccttgggcaagtaacctccctgtgcctgctttcttcatttgagaatgggataattgtagaacctatctcaacggatcttacggtgtttaaatttttgtaaatatttgtaagtccttaaaacagtaccagacacatagtgaatgctttgtgaacatttgttaaataaaaagtagacagatgtagcta

SEQ ID NO: 240707 - DNA, 721 bp, Homo sapiens
tgaaccattagcaaacaattgaatgttattgtctttttgtgtttttttttgttgttgtttgtttgtttttctcttttagagacagagtattgctctgttgcccaggccagaggcagtgctatgatcagagctcaatgctgccgtgacctcctgggttcaagtgatcctcctgcctcagcctcccaagtagctgggactacaggtatgcatcaccatgcctagttaattttttaaattttttgtagagacagggtttcgctatgtcgcccaggctggtctcaaactcctggccacaagcgatcctcccacctcagcctcccaaagtgctgggattacaggcatgagccaccgtgcttggcctcattgtttaatatttaatgaaagtatacatggtgctaaatttatttagcctcagtcagtgacccctaacaaaccactaaggcattccatgccaggctgaccaggtacagtggcacacaagccaaatgctactgccacacagcctcctttttaaatgtcccagagtagagaggaatagggacagctgcatttttgcagccagcaaggagctccagagagatcctttcccagcagcccctgccttccagacaggcgttcttatgctccagttatgttctgcaaatctcagcttttttcatgtcctcatcagtcaacatcatcagcaagctttgcggggagaaagccaaaaaagttcttatct

SEQ ID NO: 240708 - DNA, 1855 bp, Homo sapiens
agtaactgcatttatgaaattctttgtcagagcaatttagttaatagatatgtaaatgactacttatttcattgtgtaggtggaccgctccatgtacactttctgaggaagaacataagtgctaaaaactattaacattgcaaatggaaagaagcaaaagttaaggctagaatgccattcccttgctgtattagatattaggagtgggacagaaagtccatcttgtcatcaagatttgttcggtttatggggtgggatttcttatttacatcccactcttggacggtctttttttttttttttttttgatgcatggaaactaatataaattggggtgcaagggtgtttcttgctgattttcaagcacaaaaggtcattacaaacccagctgggaagggactgggggaggtgctgaaagttaaaaccacggcagtaaattttcaacacaagggaatacctcctaaaaatcacctaggggctcttttaaacctttattgtttttttcagcataaaaacaacttcagaggagactggggatttcaaagctctctggctctaactgcctcctgggaacagcatggaagcttccctaatcatggaggagttaatgcaggcctctgggggaagaagtctctaatgggaggaaataaatgggcccttgccttgcagatggtcccaagccctcccctcactggaattcttcttgctctgtgagctagcctcatcttcagttgtgcttttttttttttttttgagacagtctcactctgtcacccaggctggggtgcagtggcgctatctcggctcactgcaaactccgcctcccgggttcaagcgactctcctgcctcagcctcctgagtaactgggattacaggcatacgccaccacacttggctaattttctgtattttttgtggaaacagggtgttaccatgttggccaggctggtctcgaactcctgacctcaggtgatccgaccgcctcggcctcccaaggtgctgggattacaggtgtgagccatcatgcctggctgagttaaggatcttgcaacagagagattatcctggattgtctgggtgggcccagtccattgggtgagtccttcaaaggtggagacctttccctgctggccagagagaggctgccttgctggttttggagatggaaggaggtaccactagtcaaggattgcaagcagtctctagaacagggattccaacactccggacacagaccagtagtggtccatggcctattaggaagtggggtgcacagcaggttaggggccggcaagccagcgaagcttcatctgtatttatagccactccccgtcgctggcgttaccacccgagctccgcctcctgtcacatcagcggtgggcattagattctcatagcagcacgagccctattgtgaactgcacacacgagggatgtaggttgcacgctccttatgagaatctgatgcctgatgatctgtcactgtctcccgtcacccccagatggggctgtctagttgcaggaaaacaagctcagggctcccactgagtctctgtgatggtgagttgtagaattatttaattatatgttacaatgtaataatagtagaaataaagtgcacaataaatgcaatgcacttgaatcgtcctgaaaccatccctccccgaccccaatccatggaaaaattgtgttccgcgaaaccggtctctggtgccaaaaaggttggggaccgcttctggaaaagctggaaaaggcaagaaaacgcattctctccctcagcctctggaaggaaccagcactgtgggactaatttacatactgtagggtaataaatttgtgttgcttcgaaccact

SEQ ID NO: 240709 - DNA, 3552 bp, Homo sapiens
  misc_feature (3393)..(3393): n is a, c, g, or t
  misc_feature (3395)..(3395): n is a, c, g, or t
  misc_feature (3397)..(3397): n is a, c, g, or t
gtctgtgtggagacgaaagctgcccacaagggagcgagggagctgggagggggtggtaagagatgaggtgggaaggatgggttgggtgaaccttgaaataattgtagttgtactttgtgaaaaaaaactttatcatcaaggctttgtcctgatccaacctgaccttcccctcagttaatccgaattactgaggtttgactccatgttcagtttctctgagatttgctttgatttctcttagaagtggagctgctgtttattctcccggtggctctgtgtacacgctctgcccgtggagctgcctgggatgagccgtgagtcctctgagaactgcttcctgtttcgtctggtaactcctaagcctgcctttctttcctacagtctgcatttgtggaaatctgcagtatttgaagtttggaggagatcaatttttcatcctttccttcgtgggataaagaatatttcaaccacctctggagaccaaagagttctgagaagttttgaaatagcttgggaaatacaccacgtgcttcacacttcatttttctcctctctctttcattgtttgacttaattaaaatattgtaatgcaagaaggagagatgaggcaaacgtttagagaaggaaaaggaaatgggttcatgtttaaactgactctgagcaagcatggcgatggtagtttgaaagaattctgagcatgtaggaaggtaaactcaaaatgttcttcctgcctgagaagtgattaaaatacctgtgagcaccaacactattgtcgttaatgaaaactgtggccagctttccccacccccaagtgctccccacaacccaaagaaaaaattggaacatttttgggtccaagtttcacagatgttaagcattttgtgatattacttagggggtttcctgagctgcattaaagttgaaccactagggtgttgaaacagttgggccccataataaaatatacatgaaaaggaattgtgaaacattggctgttgtgtgttggtgacaattaggttactgttttaaaaaatacataccctggacacatctatgggagctttttagagaattttgagtagcactagagtaaaggcggttggtaatttctctggttgcctctggcaggtggacataatttaacaatacccgtcagatatgacaaattgtttttgagttacattagggccttaataagatcacatctgttcatatatcctccttaaccacagagcctgatttagagaggtttcatactggtatgatattgttgtttaaatatttagaggggtctagacatgtatcataaaagaatagactcttgtgtataaaaacacagtccttttattctcagtgtttttgctttcatggaccttgcatcattctgtctacttgagtgaaccacatgttgcttctaggagccagaaaatatatttcattcctcgtcagagttagtgttttagagctggaagaggccttggagaccaacttatccagctcccctcctctttagggtagaaacctgagatggagacagaaggaggggacttatttagggtttctcaccccattagtggcagaaacagaatcaggacttagatctgccaatttgtagttcggtcgtctttctgttatgctagatgttcacctgggacctgaaaatgtggccattgaggcactttgatgtgtcactgtcccttagaggctgcagtcctttccaggggacattcctggccactgagagggccaggctctttgctatgtattcagattcagagcccagatcctctagtttaggaatacctaaactatctccctgcctgaagaccttcctgtgccagcgtactttctgtcacttccctgctgacatgcacaggcacaggcaagtctctctcccatctctgaccacactgtgcacgtccccaactctgctcacactgttcccttctcctggaatgtgtcctctttgctatgtcagttactgtcatgtccagcataagctccatcttatcatgacgtctcccaagcccacagaggtgtgttaggtcgaatcatgtgaaaatgctgttttataggtgaaaaaggtcaaatattgtcagttttaacatgtctcaatgtattaaataccatgggggtaaataaagctcttttaaataagcagagattgtaatcaacacatacctcatggtaaatcatttaagaggctctataaaaacgtttatgcacagccatacataatgcatacatttctgaaataaaataaaataaatgcgtgcttttagaataggctgtagttacattcctctcccatgccatcgacatcaatttcccctgtagatgatggaggtgcgatgttcagacaaatgctgacgcagaccgacgggagctggaggctgaggggcggcggcctggcaggtgatgtctctccagtcttggggaatggctcctgggaacacgggtgtctgcttgcggcatcactggtcatcacaggctggtggggctgggtggttgtggctgtcagtctcaggcagttgaggctgactttttgtgcagccctgtgtgatgtctggatttagggagacgccaggaaagtggatgtagataatgctttacccagggcccctctgtgaccacctgtctcttccccatctccaggcaacagcagccactaagaagtgctagagtcattggcttcctaagaaattggcatgagcactcaggcccccttatccctacacagagaggcggaaactgtaccatgtgcctggctgtgtattcttcaaatatcaggctcatggcatttcagctaagaatcccaacatctgttgatcagcaacagacttggcaaatagtggtgcttagtaagtagcccttgagacagaggacctgatttgtgattcaatttctaataattcataaatgactcatgaatagcactcaatttgagggccattatgacactttgagaggcatagtaagagtatattgcattgatatagtatggtgtactcttttagaagcctgtcattcatatatatatatatatggaatttatgttaatcaggataagcatatattaaggtatgtttattaagtcacaagaagatctcttacttggccagtttgtggggtggggatggtttgggattgctctgtaatagactaccactagcttagcagcatgaaacaacactgtttactagctgtaggttgagaaacccagcaagcctgcctggtaaagagtatcagataggaaacagatagcaaacagcacaaggctggaatcagggtgtcagcccctgtgtatttctttctggaggctctggcaaaaacccacttccaggctctgtcatgtcgttagcagaatgcacttccttttggctgtaggactgngntncctgttttcttgctggctgttggccagggcacattctcagaccacatgcccgcctccatctcaagtgagcaactctctctcatgttgactcctccttacctttctgatctctctgacatacgcttctgccaccagccagagaataccactgcttt

SEQ ID NO: 240710 - DNA, 892 bp, Homo sapiens
actagtttgagcattttttcatgtaacttgcattagggttctcctgagggacagaaccaataagattcacgcatctatttcatatatgtatatatacatgtgtgggttcaatgcaggctgacagagtggagatttggacacaggctgcatgaacgagcagactgccactaaggtggcctaaatttatgtccacttttgtcccatagcccaagtttgggcatcttgcccctgctttgccctctagtatctgaccttggtttgctcctcttttttactgtacagagctcaaaatgttgaaaatatagatctgaatctcaagcgagagataagagctaaagttgtggatctggtaatcattggtgctgcctcctccttcccttcctaatccccattgtaatctgtaaaatttacagttccatttagctgtggctattcctttcttgtagtttacaatctagaggaaataaaactatttactggttacaaaaaaaaaaaaaaaaaaaaaaaaaaaaaaaaaaaaaaaaaaataaaagcagaaaaacaacacagcgacacaacgcgagcgagacgagcggcagaagcgcgaaggaagaaacgcaccaggaacaaataccacgacggcgcggaagaacgacgccgggatacacagagaaaaaagcaacgaaacagcgcagcgcatcacgacacgacgcgagaaagcacacggatagggctaatatgtgagttagtgataacaatggaggaataaaagcaagaagtaaaatcgttggtgaaggcgtgaaaataagctgtgattcatgcgagtttctgtgctgcggagtatatagagtatacgggtggaatgctggtggcgcgccgagcaagaaccacacacagaagcaacgagaggccc

SEQ ID NO: 240711 - DNA, 440 bp, Homo sapiens
tgcagatgggtgaagagtctggcctccccactgtacagaggtcagatgtctctcccatcctccaccaggctgctctggcaaaggactttgctatggtttgaatgtccctgccaatactcagttaaaatgtgattgccattgcgatgatactatgaagtagaactggttaagaggtgattaggccatgagggctctgccattatgaatggattaatgttgtcaactcaggagcgggtttgttatgacaagaataggttgttataacaacctactcctgtttggccccctcttgctctcttgctcttgccccctcttgcccttctgccttccaccacagagtgatgtagcgcgaaggcccttgccagatgctgaagtcatgctcttggacttcccagcctccagaaccatgaaataaataaacctctgttgtttataaatta

SEQ ID NO: 240712 - DNA, 842 bp, Homo sapiens
tatcaagagagatgtattgatcatatgcattgtcctttatatgtattatttctaacaactgaacatttaatgatatttggtctgcagatactttgaggttctaatctctggcaagaaccatgaatgtagctcttctatgttgccaaattcagatcctctgccttaacagccaggtgggttaaaatgataacctcttaggaaaaattaaggaactttttgcaaggttgtagatattcctccattcaaggtacagtactttttttgagaaaacagcccagggttcactactgcaagatgtaaattgctgtccttaagttctgtgccataaaatctatgagcgataattttagcttggcagtctaaaaaaagatttaaactgattgtttactgtagccattaaaaaaaaaatctcagtagacatagaatgtctacttttgattactgtgacattcagatgagccctccaaaatttaactggaaaaagcatgtaagactgcaaaattatataagatatatagaattattggttctaagtcatttaaatacttggaagctgtcttccaaagaatagttgatcttaaggcaatatttctgacaaaaattatcaagtccgactgcctgatgaggctgctcctcaaaagcagcgggaaagccaagttggaaaggggaaaagagcagctctaagacaacgtctaaacccactgtcttcagagtcagacacgttcatcatccttactctcccccttcataagatgtacaactctggaaaattgacttaaccactctcagttttacttttctctggagattcctattttctctggggattatgtgattatttt

SEQ ID NO: 240713 - DNA, 915 bp, Homo sapiens
aaaattccgaaagataccatctatcagggacggacagacacttctgcattgaggcttaaatcagctatctgagtggaggtcaggggaggggcagggttcaattagtcttcactgggaacatttgcaagatgttcaacctaagggcgcaacagtcccgatgttctgtgtgatattccagacatggggagcgctttattcagtttctagagcccagttggaaaagaatcctgataagtgggggtcctagaaggttgctcagaattccaagggcatggaacgatgtcattaaaagaaagtatgtgttcccggggtcagttctgcctgttcatgagacgtctgtgggagatgtggccgcctctctcagggtgtgtggttatgaggaagtcaactgtgtggctcaggaacagcccggtgagaactccctgggaggcaggctgtattccagggaggaactttctagcaacaagagggttccaatgtgccacaggttctaggtgacaagtgggactccagcagaggctgcaggaacctgcccaggaccctgtggaaggatgtttcatctcgggtggaaagttgtccacaatggcttccatggtttcattagacaaacactattgaagatgtgtgcggcctggcacagtggctcacgcctgtcatcccagcactttggcaggctgaggcgggcagatcacctaatgtcaggagtttgagaccagcctggccaacatggtgaaatccccgtctctactgaaaatacaaaaatcagccaggtgtggtggcacatgcctgtaatcccagctactcaggaggctgaggcaggagagtcgcttgaacccagaaggcggaggttgcagtgagctgagattgtgccactgcactccagcctgggtgacagagcgagattccatttcatta

SEQ ID NO: 240714 - DNA, 1460 bp, Homo sapiens
ggcacgaggagcaactgctaacagcgaggaggggttttgaaaggtaaaggccattagcttggaggcagaagacagacctccctgactgctgaattcctgccggcctgaaattggagcattccaagctcctcagatgagtcataagccaccaagattgtgagcctctgggcttctcccagcttgtaggagaaatgccttgcaggtgaagatggtgaggaagttggccctgaaatagcccagcccctcgaagagacaaacagggaggagcatcattcaggtgcttcactgggaaatgaaccaggataatgttcatcttaaaataacctacttcaatgaacattctgccaaaagacaaaaggaaggtattgctaggtaatgtgcagccactctgtcacagtctttttttttaaatgaacacaaattccttgactgtcttcttgctgagaggtgaggtctctgtccccctcctctccctacttgaatctggatgagcttgtgactcacttataaccaagaatatggaagaagtgatgctgtgtgatctcctcatgcctggagcctgtgagcctctctctgagaagtccagtgcccctgagcccaccatgctgaagaagccacctggagaagcccctgttgacagagagccagcatcacctgccagtcaccagaagggagccatctcagacatccagcccagctgagccttcaactgactgctgccccaaccaacatgtgaactgcaaccgcatgagagaccctcaagtgagaaccgcccagctgagcctttcccaagttcctggcccacaaaacccagaacaaattaaaatgagtgttttaagccattaaggagcagggtaatttgttacacagcaacagtaaccaggacacattcccaaacctaactaggaggaaatttcctcttgataaaaatgctgatttttttattcatcctagaccttcataagtcagaatcatctgtggataaggtataagaatctgcattttttttaagacaagctctcccaccccaggtgattcagatgcacagccaggtttggaaatttaagaccttggaagagagtcacattgcctctctctgagtctcagcttccttgtctgtgaattggggaggagtgagagttggtgtgagtatcaaagaagacgctgcaggtaaagtctttagggccagccaggcgtagtggctcatgcctgtaatcccagcactttgggaggccaaggcgggtggatcatgaggtcaggagttcagcctggccaatatgatgaaacactgtctctattaaaaatacaaaaaattagccaggcatggtgccaggtgcctgtagtcccagctactcaggaggctgagacaggagaatcgcttgagcccaggaagcggaggttgcagtgagccgagatcacaccactgcactccagcctgggcgacagagcaagactctgag

SEQ ID NO: 240715 - DNA, 1009 bp, Homo sapiens
ggagcggctgggaaagaggagtctctcgaaattcagcaactgctaacagcgaggaggggttttgaaaggtaaaggccattagcttggaggcagaagacagacctccctgactgctgaattcctgccggcctgaaattggagcattccaagctcctcagatgagtcataagccaccaagattgtgagcctctgggtgctagccaggatcactccctccgaagtcacaccagagggagggctggagggagaatcaaatgaaagagagagggagagaaaggaaggaagagaaggagggagaatggaaggatgtatggatttggatgtatgggttccattccttctaccctggcaaaagcttactcatccttcagtgtccatccaaaatggcatctcttcttgggcaccatctccagagtctccttcaagcaggtagctacatcccacaaaacaaccacccatctgaccatgcaagtgtgtgggggaatgaagaccagcccaggaatctgagatgaatgttttgcttcttgctctgccactgactcacagggtaccccaagcaagtcccttcacctcctcggtctcagtttctccatttatactactaaggcagtggacatgatggcctcaagtctcaacatttttattccctgaaaagaaactcttggtgctgagtggtcttcttctgccctgacatctcacctttcaaacgcttgtctcttctcaccccacccaccacttagcatgtgctcttggagaacacccaggactcagggtctctgcacacatcatgagtccagctcagcatttgaggtggaatcagaggaaaggaaggagagtggggagaatagtcagtattttggcaagctcatcataccttccccctttgtatagaaacttcaaaccatttcctttgaaggcactacctccttcccccagttataaatgagtgaaggtctcaagcctggacaaccaaatgcacagtgattggttcaactctggacctgtgact

SEQ ID NO: 240716 - DNA, 555 bp, Homo sapiens
ggcacgaggagcaactgctaacagcgaggaggggttttgaaaggtaaaggccattagcttggaggcagaagacagacctccctgactgctgaattcctgccggcctgaaattggagcattccaagctcctcagatgagtcataagccaccaagattgtgagcctctgggtctaaagtccaccaggtcagggagcaggcctgtctcgtcttctagtcttctactgtatctcaatacaatgcctgggacaggagaaacacccaatacgtatgggcagaataaataaatgacacagttctggggtggcagcagatcaatttcctggtctgtgtctcttcaatggacaagtcgatacatctctgctgctccacgtgtagtccatggaccaggccccttctcatcacctgggagctcatgagcaacgcagcatctcagtatcccaccccagacatctgcatggactgaatccagttcaccacttgcttgagggtaattgcacataagtctccaagtctcagtttcctcagctgaaaaataaaaggtaataaagcccatta

SEQ ID NO: 240717 - DNA, 428 bp, Homo sapiens
tcctggtttcaagcgattctagtgcctcagcctcctgagtagctggaattacaggcgtgcaccaccacacccggctaatttttgtatttttagtagagacggggtttcaccatgttggccaggctggtctcaaactcctgacctcagatgatccatctgcgttggcctcccaaagtgtgcccaagtaattctataatgtagccaggatgagaaccactggtatcaggtctagacccagggactcattattataaaacattcccctttgacataccttttcatccttgagtcaggacaattttacctttcagaaagtagctacagtccttttataatttactcctcaccaaaggtaaaatacatccattttctctgtgtgtgacttctgactattctgcactgattcaataccccttcgttttttgctt

SEQ ID NO: 240718 - DNA, 889 bp, Homo sapiens
aaatttaataactggtagggctggtctcattcttctgtctcaggtttttccaaagtactctcatcccttggtctgtggggaaccggtcctaggacctctctcatataccaaaatccacagacgctcaagtccctggtataaaatggtatagaattcacatataacctatgcacatcctcctgtatgttttaaatcatctctagattacttagatgagactatctaatactatgtaaatagttatactgtattgtttaggaaataatgacatttttaaaagtctgtacatgttcagtacagacacagtctttttgaagtattttttatccctcctttgttgaatccatggatgcagaacccatggatatgaagggctgactatattctcacagttatattcaagttgtattttgaatgattttatgacaatcttttaccaaagggccaactgtattctcatgtttattattcaagttgtatgacaatttcatatcagccccccagagagttggcatttggattgaaatcatactgagtctctagattaatttagggagaagtgacatctttataattttgaatcttcctatccatgtatatgcgagtgttttgtatttcagtggcattttcaaattttcttcaggtaggtctcttagtgtttattccaaagcatgtcatctgttaatgcttttgtgaatgaaatgtttacctccattatgttttctgattgtacataggaaacatcctgatttgaattacaaatattgtaaccagtgccttatctaattattttatgaattttaatagttttctggttgttctttggagttttcaagtgcacaattatataaattgcaaataaagatcattttacctcttctcattttca

SEQ ID NO: 240719 - DNA, 420 bp, Homo sapiens
aatttatataattgtgcacttgaaaactccaaagaacaaccagaaaactattaaaattcataaaataattagataaggcactggttacaatatttgtaattcaaatcaggatgtttcctatccatgtatatgcgagtgttttgtatttcagtggcattttcaaattttcttcaggtaggtctcttagtgtttattccaaagcatgtcatctgttaatgcttttgtgaatgaaatgtttacctccattatgttttctgattgtacataggaaacatcctgatttgaattacaaatattgtaaccagtgccttatctaattattttatgaattttaatagttttctggttgttctttggagttttcaagtgcacaattatataaattgcaaataaagatcattttacctcttctcattttca

SEQ ID NO: 240720 - DNA, 334 bp, Homo sapiens
gtcctgggcccatctctctggcagcttctccggcgccgcacggggcctcggcggcgggagagacgtgggggcgcgacgccccgacgcgaatgcgcggggaccgcgggcccttcgcgcacgcgccgggcgacggaggcgcgctcgccgcttcagggcgcaggcgcagagccccggccgccctcgcgccgccgaagtgtgcactgctctttccggtgcttgccgggtgctgggcgtcgtgaggcgcgggccgcggagaccccggctgggcgggaaggaaggggcgtgaacggctctcagcttcgggctcctgaggacaacgatcactcgccctcag

SEQ ID NO: 240721 - DNA, 439 bp, Homo sapiens
gcagaataatggccaccccaccaaagctttctacagcctaatccctggatcctgttacactacctggcaaaaggctttgtggatggacttaaggttatccaggtaggcccaggacaatcacgtgggcccttaaaagtggacaaggagggccaggcatagtggctcacgcctgtaatcccagaactttgggaggctgaggtgggcagatcacttgaggtcaggagttcaagaccagcctggccatcatggcgaaacccggtctctactgaaaatacaaaaattagctgggtgtggtggcacacacctgtaatcccagctactcaggaggctgaggcacaagaattgcttgaacctgggaggtggaggttgcagtgagctgagatcacatcactgcactccagcctgggcaatagagcaagactgtctctctctcaaaaaa

SEQ ID NO: 240722 - DNA, 425 bp, Homo sapiens
ctagaggatcccaagcactgtaggctcatcttagagtcggctatgacagctgttaatacagccagctatcattgcccatttgtaggcctaactttattttcattcttatattatgtagaagatgcagaattgcctcctggactgaattctggggatgagggctgacaacatcccagattgtaataagtggctgctccagggatgacaggggttcaaagagacagggtggtatgaaaacagtctgtgaactgcaagtctcatggacccgattctagtgtcagctctgtcagtggtcacttttgctcagtgactctcagtcccctcatctgtaacatgccttgcttatctttcccttggatttgttgtgaggctccaaaaatgagaaaatgttaaataaaaatgtgttttgctatataaatgtcaga

SEQ ID NO: 240723 - DNA, 151 bp, Homo sapiens
ctagaggatcccaagcactgtaggctcatcttagagtcggctatgacagctgttaatacagccagctatcattgcccatttgtaggcctaactttattttcattcttatattatgtagaagatgggtaccgcagctcgcaattcagtaatc

SEQ ID NO: 240724 - DNA, 385 bp, Homo sapiens
gtttaatatccatctacctggaaacttcaacattccaggcctgccttccgggaacaccaggcattacaatgagagttagaagtatatttgttaacttgaaaaagtgtttaccataaattatgggtttttttggttttgtttttttgttttctttgtagagatgaggtctcaccgtgttgcccaagctggtctcgaactcctaggttcaagcgatcctcctgcctcagcctcccaaagtgctgggattacgggcgtgagccaccatgcccggtccataaattatgtttttaaagtagataatcagcaaatgatcctattttggttaacacaaacacacacacacagactcccccagcctgagcaacatggtgaaaccccatctcta

SEQ ID NO: 240725 - DNA, 2074 bp, Homo sapiens
  misc_feature (1)..(1): n is a, c, g, or t
ntttaaaataaaaatcaaatttcagcagaaagattggagaagagaaagatattacttgattgagcaacagagaaacaatgcatgaatccacacataaaactctttaagttgagtaaaggaggctttcaaaccctaattcatgcatttaacaactaaaatcccagcttttcccatgttgagtttacacagagaagttaaaagataaatagactttatcagactttgacagtaaattaaagaccctttatcttcctgcctggaagttctataaaataatgggtaataaaggcaagctattagtcaaaatggtctgaattaagcctggaaagaaaatcttgcctctaagagcagaagggtgcaaaacactggcccctcctgggcttgggcccagagacaaaggaatagtggttactatgacccaacatcagtctgcagccagagttccaagcatcttctctgctatccctaatgatttaaaaatatataaaaatatttcacattctttaccctccatcagaatgcagtgagcagtaagtcagctcaagaaaatatgacccagtgcctaacccgttgatactttattagatgccattaaaactttagagagctgggagattattaaggcctacatttggaacctggaatcttttcctttgggaacctggaatctcaactcaaggattctgtagcttgcttttttgcctgtatctaagattgctctattttgtgataatgtaaacttaatggaagaaaattacttcatagatgctagacattcaagaattaaatccccttttcatgttagctagtgtcaaaacatttgtttaaacatggtttctaaattttgatggggtagcatacatggttttattttattctgtagatgtagtgaaaaaatattttattttgatacattaacaaggaagataagacagcattcattttgagtatttgctatagaatataccctgcattggactgtgcgtggagtctggtatttgtatgtttcaaggaaataaaggtacagagaagcacttgttcgttgcctatataaagactaactgtacagctgacagcttaaaagtactgtatgacactgcatttcttgtccaacagtagcgtctgtttccttcattccaaaaccaaaaaaaaacattaaagatgaatgctgaaaatgtgatagaaaaagaccttcctttttggcatgtccattaactgccctcaccgttcttttccaagcataactgctagactggatggcataaattaaacaattaacaggatactagttcaaggggaaactctccagttagggtagatttaattttcagatttggaaaatgaatcaaattacacattcaaaagacttgaattcatttttttctctaagcatgtactttttataatatacattgtctaacatcggagagataaattcagtattattttcctaagatactttctgccttttgtagcagtgagaatactagaaatcagcgaggcgtggtggctcatgcctgtaatcctggcactttgggaggccaaggtggacagaggtggtccaagagttcgagaccagccggggcaacatggcaaaaccccatctcggccgggcgtggtggctcacacctgtaatcccatcactttgggaggccgaagcgggcagatcacaaagtcaggagatctagaccatcctggataacacagtgaaaccccgtctctgctaaaaatacaaaaaattagccgggcgtggtggcgggcacctacagtcccagctactcaagaggctgaggcaggagaatggcgtgaacccgggaggcggagcttgcagtgagccgagatcgcgccatggcactccagcctgggcgacagagcaagactccatctcaaaaaaaaaaaaaacccatctccacaaaaaaaattatttttaaattagccaactgtggtggcacacctgtagtactagctactcagaaggctgaggtggatcacctaagcctggaaggtggaggttgtggtgagcagagatcgtgccacttcactccagcttagcaacagagtgagaccctgtctc

SEQ ID NO: 240726 - DNA, 654 bp, Homo sapiens
agctgaagacaaattgctgggccacctgggcacagcagcgaagtgtggcaggagccaggggcactacgcaaacatgaggaacaccttcttcagcctggacaatcagccagggagagtcaagaactacagagacaaacgaagtcagtgctacccgacggcaaaatctgaaatcacaggatgtttggagggccttgagtggttaaaaaaactaaatatctatatggatatacatgtgcgtatatgtatgtgtgtatatgtgtatatatgtaacattttatatatatatatgcatatatttaaaaggtctccaaagatgtgctagcattctttcagtaaactcgaacctgccttgtgaagattccttcattcgaatggtggaatccacccctccagccacacacctaatagtacatcaacgtggggcttgggatgcagaactaatgtcatttctatcaatcagggacgccaccacaccttgctggcttctgccacggataacgatgaaactacatttaacactgcctggcactaaggtttagagttatgagtcggtgcttccctgtcacttcacttaaccctctgagtgtgtagtttgtagatttgttaactgcactgagaggtcccctggtgtgacctcaaaataacggcctctcc

SEQ ID NO: 240727 - DNA, 355 bp, Homo sapiens
tttccttgataacataccagcaaacacactcatcccatgcatgttgttaaaaatccatcaatagactgggcgcggtggctcacgcctataatcccagcactttgggaggccgaggcaggcggatcacctgaggtcaggagttcaagaccagcctgaccaacatggagaaaccccgtgtctactaaaaatacaaaattagccagccgtggtggcgcatacctataatcccagctactcaggaggctgaggcaggagaattgcttgaacctgggaggcaaggttgcagtgagccaagattgtgccattgcactccagcctgggcaacaagagtgaaactctgtgtgtcccccccccc

SEQ ID NO: 240728 - DNA, 1048 bp, Homo sapiens
taaagccaggaagccaaaagacaatacaaatctgtgcttcctatttcaacacatcaatttcagcaacgactgcttcttttcagaaaccgcataagcatcgtcaaattatttgaattaatagaaggatttttctaaggggtgtggtttcaacttaataccatgatttcttgtaccacttctgccatgcttaaaatgtccggccaaatcaaacaagcagactcactaggctgaagtttgatgacctttagaatactgcagaaaggactgtgctgagttttgcctctttgggtcatatcagacaaataacctcaataatgatatacaaaggaaaatgtaatatgccagagacgtacatcatcattatgcaagacgctaaactttgaggaggccaattttaaaatcatgcttctgaaacatgtttactacataatactgaaaacaatcaaatcttgctgtcatatttggagaagacaagtgggagattaccagtttgtgctactaaagaatgttcccaaaaggaatgatgatagaagctacataaaatgtttatgcagcagagagggcgctttcatttttcatctggtttttggtttaacataagtaggcctgcttgttctctgagccagtaacaggctacctacaattccacgggcgctgccctttctgataggagctgtagcggttgggtctgtctgcctcttctctctcatttcagttcttaaacagcttcccatcaaccaaggaaactcctgggtagacagaaaaggcagtagagacagcctctccagctgttttattgggagttataggattttcacctggaaggagcctcagaaaacaagctataaaggcctttggtttcatatcgtggaggagaagaacaacacacatcaagatacccattctgcagaccagaaaactgaggaccagagcgagtaagcaaatagtctatagtcacatggccaataaattaagaagctagggctacaaccagttttctgggacccaggccttttttttctttcctcctagagatcgagttttccaa

SEQ ID NO: 240729 - DNA, 87 bp, Homo sapiens
ttttctttcccttccttccttcctgcctttctttctcttcctttcctttccttccttttttctctctctccctttctttctttctct

SEQ ID NO: 240730 - DNA, 457 bp, Homo sapiens
atgtccctcagtaggtgaatggatgaataacctgtggtgcatccagacaatggaatattattcaatgccaaaaagaaatgagctatcaagttataaaatgacatgaaggaaacttaaatgtgtattactaagtgaaagaagtcaatctaaaaaggttacgtactttatgattccaagtatatgacattctgggaaaggcaaaactatgaaaacaataaaaggatcagtggttgccaggagttaggtgagaaagacggataaataggagaagcgcagaggatttttagggaagtaaaactactctgtgtgatacaataatgatggatacatgtcattatacacttggctgggcatggtggcttatgcctgtactttgagaggtcaaggtgggaggatcccttgaggccaggagttcaagaccagcttcagcaacatggtgacacgaccccatctctac

SEQ ID NO: 240731 - DNA, 331 bp, Homo sapiens
agattaaaggtgaagtcatgagggtaggtaagttctctaagtgtaataaaggagctggacacagtgtctcacgcctataatcctagtactttgggagtccgaggcacatggatggcttgagcccaggagttcaagatcagcctgggcaagatggtgaaaccccatctttaccaacacaaaaaatagcctagtatggtggtgcatgcctgtagtcccagctacttggaaggctgaggtgcgagaattgattgagccggggagattgaagttgcagtgagccaagatcacgccaccacactacagcctgggtggcagagcaagaccctttctc

SEQ ID NO: 240732 - DNA, 2050 bp, Homo sapiens
  misc_feature (610)..(610): n is a, c, g, or t
agttgggcatggtggcgggtgcctgtagtcccagctgcttgggaggctgaggcaggagaatggcgggaacccgggaggcagagcttgcagtaagccgagatcacgccactgcactccagcctgggcgacagaccgagactccatctcaaaaaaaaaaaaaaaaaaaaaaaaaaaaaaaaaaaatatatatatatatatatatatatatatgtataggctgggtgcagtggctattcagaggctcactcattgtgcgcatggtgcttatggtgcctggaatagctggcactacaggcatgtgttctgtgccagctcaagtcttcaattttgcttcagatctttaactttttaattgtgaaatataactgtatgcagaaaactgcataaaacacaaaggtactgaataacaaataattataaagtgacatctgggtcaataactagaccacagtcagacccctgaagctccctctgtgtcttgtctagtcacatccccctccccttgctcaagaggttttcagtaatcacatcctttttttctctatggttttacctcctagttttggaatccataagcagtatatttcagctttgcatgtttttgaactcngttcaaatggaatttgtacaaaataatatgctgtgcatattatttcttgcttcttttactttatatcattatgtaagattcatccatgttattgcagcttatttcttttttgcttgtttatttgtttgtttttgtttttttgagacagtctcactctgtcacctaggctagagtgcagtggcgcgatctcggctcactacacctccacctcctgggttcaaacgattctcctgcctccgcctcccaggtagctgggaccataggtgcacgccaccaggcctggctaatttttgtattttttagtagagacagggttttgccatgttggtcaggctggcctcaaactcctgacttcaggtgagccacccgcctcatactgcagcttatttcttcattgctgaataatattccattatatgagtatacccccagttgtttacccattttattgtcatctcaagtttttgcccattgcaaataacattgctgtgagtagtcttttatgtatatcctagtacaactggcacaagttccttcaggtatatgctgaagaagtagaattgctagataataaggcacgcatactttaggcttttgccaaaccatttttcaaagtggttgtactaacttatactcccactagctagtagaaagtcaacactggttcacatgattcccaacatttggtattatcagccttttacatttttgccaatctagtggctatattgtggcatatatttgtggttttaatttgcacttccctgattactagtaaagttaaatgcctttttaaatgcttactggcctttagggtttctgcttttgggaagtgtctgttcaaatctttgacatatttttccataggggctatctgtcatttttgtaagatttgtaggagttctttatatatgctagatatgagtttataggattacaaaggaaatcaattatattgacataatagttatcaaatataaaaatgcaagtatgtgggcttatttatttatacaataaataagatctggtgcaggcgtaataacaactataatatcaaagtgattataagcattgacattatttcaagatatctgcaacaaaaatatctggtttccacttgtgacaacgccacaggtactattaacattatgtactgtgggccaggcgtggtggctcacacctgtaatcccagcactttgggaggtcaaggtgggcagatcacgaggtcaggaagtcgagaccatcctggctaacacggtgaaaccccatctctactaaaaatacaaaaaattagccgggcgcggtggtgggcgcctgtagtcccagctactcgggaggctgaggcaggagaatggtgtgaacccaggaggcggagcttgcagtgagccgagatcgtgccactgcactccagcctgggtgacagagtgagactccctctca

SEQ ID NO: 240733 - DNA, 349 bp, Homo sapiens
tcattctgaataaagcaaggcatttcaaatcaaattacatggagattaaggtttctaaacctttagtaccttagcagattctagccaggcacagtggctcatgcctgtaatcccagtattttgggaggccaaagtgggtggatcacttgaggtcaggagtttgagaccagcctggccaacgtggcaaaaccccatctctactaaaaatacaaaaattagtggggcatcacggcatgtactttggaagcctgaggcaggagaatcacttgaacctggaagtggaggttgcagtaagccaagatcacaccaccgtactccagcctgggtgacagcgtgagactccatctca

SEQ ID NO: 240734 - DNA, 873 bp, Homo sapiens
  misc_feature (46)..(46): n is a, c, g, or t
cgaggtgggtggaccacctgaagtcaggagttcgagacccacctgncccaccggaggaaaccccatctctgctaaaataccaaaattaggcgcgcatggtgaccggcccctgtagtgccagctactcaggaggctgaggcaggagaattgcttgaacatgggaggcggaggttgcagtgagccaagatcgtgccactgcactccagcctgggcgacagaatgaggctccgtatcaaaaaaaaaaaagcaaggataagagaatggcatccattttcttgatattttaagaaatgaagcttccggttctaggcacttggagagccgcggcttaaggtacagacatggccaagtccacgaaccacaccacacacaaccagtcctgaaaatggcacagaaatggtgggctccaggttcctgaggaacatgcactttgccaagaagcacaagaagggcctaaagaagatgcaggccaacaatgccaaggcaatgagtgcacttgctgaggctagcagggccctcgtaaagcccaaggaggttaagcccaagatcccaaagggtgtcagctgcgaactcgattgacttgcctacattgtccaccccaagcttgggaagtgtgcttgtgtccgcattgccaaggggctcagactgtgtgggccaaaggccaaggatcaaccaaggcccaggctgcagctccagcttcagttccagctcaggctcctcccaaaggctctcaggcccctacaaaggcttcggagtaggtatctctgtctgccaacgtgaggacagaaggactgatgcaacccccctgggctgccgtctttatggggctggggtcctcctgtgctattagtacaaataaacctgaggcagggg

SEQ ID NO: 240735 - DNA, 946 bp, Homo sapiens
cagggagcccaggtggcgttagcattgccgctcttttgcacctccccagggcaggtcttctgtcccatgtgctgaaccccagaggagtcaccactgggaactggggcagggctgctctgtgccactgcaccaggctcagctgaggtttccagaaatctgtgactccccgtgcagagggggcctgctctgtatggactccgaccaagcctggcccactctgtctatttcttcctgacctctccagccccgagagcacatagaagctgccagatgagggcagtgaggccgagggccggcagtagggctgcagatgccctgagccctaaggtcaaggtggatggaactgctgtgtaagtctgatgccgaggagaccaggtcgttgggctttcaggtgagtggacgctttctccccactcacaacccccaccatgcagtctctgctcctccatggtcactgtggaatggctcctgatggcgctcaaccccttgccctgttttctcccctgcggtccactgagccagccctgcggccgccaagtctcaggttagagctccctctcgcggccgatgctgggcactacattgcccaagacccaggtgggccgaagtcttgagaaagggctcgcagtcatcgtcgccagcaggcagacaccaggcacctacctccccgacatacccagcctggtacctcgaagaccagtagccttgagctacacttgggattcccaatacagtttcaaaaccgtctagctcatctttcaggaaccttccagggttcacattctgatttttcagtaaggttctcacctctgtgaccaattaccttgagactgatgtcctgcaccatcctggagtgttgggatctgcaggtcgtgaaaagggaaaccaagcaatcactttggaatgacttcctggaacttccctggcccctccttcgtgttctctg

SEQ ID NO: 240736 - DNA, 843 bp, Homo sapiens
gggacggccagcccttcctccccacctgtgcctgcttctgagccaaagccatgacacctgcccttcccttgcagggaggctgcctcaccaagctacctgctactcatgggggcgatgggcatcagggtggcctgcctggagccccgagagcacatagaagctgccagatgagggcagtgaggccgagggccggcagtagggctgcagatgccctgagccctaaggtcaaggtggatggaactgctgtgtaagtctgatgccgaggagaccaggtcgttgggctttcaggtgagtggacgctttctccccactcacaacccccaccatgcagtctctgctcctccatggtcactgtggaatggctcctgatggcgctcaaccccttgccctgttttctcccctgcggtccactgagccagccctgcggccgccaagtctcaggttagagctccctctcgcggccgatgctgggcactacattgcccaagacccaggtgggccgaagtcttgagaaagggctcgcagtcatcgtcgccagcaggcagacaccaggcacctacctccccgacatacccagcctggtacctcgaagaccagtagccttgagctacacttgggattcccaatacagtttcaaaaccgtctagctcatctttcaggaaccttccagggttcacattctgatttttcagtaaggttctcacctctgtgaccaattaccttgagactgatgtcctgcaccatcctggagtgttgggatctgcaggtcgtgaaaagggaaaccaagcaatcactttggaatgacttcctggaacttccctggcccctccttcgtgttctctg

SEQ ID NO: 240737 - DNA, 533 bp, Homo sapiens
gcactgcccaactcccaggggcatccatagagactctgaagggaatggtaccgtctggagtcacgtagtgcaggtgccctagtcatcgaagagagcgaagggctgcgtatggaagttctgatgcatttttctgtctaccaagcgtccagcatgtcccttttctgtggtaaccacccaagtgtggattgcattatgtggtccctccactacatgctcagagaagaacccaacctagagggggcactgagccatcccccggtcaacccagctccctgggatcctggggcgtgtgaagcttccatgcacttcctgagcaggcagccactgaggcagggtttgaaaagggccagttgtgacaggaggatggcgggcgtggaggcaggctctgctccacggattcctcctggcagtggattcagattggaaatccaagcagaagcaaatttacagccccccgagctgtcccagacccccaggcagcacggagccccagctgcctggagtcggacttgggaagggggcctcctggcttc

SEQ ID NO: 240738 - DNA, 468 bp, Homo sapiens
tttttttgagatggagtctcgtctgtcgcccgggctgattagaagtggtttatacttctactttcagagaaactctctagcaaactaaaaatgttatcctcccttcctaatttcacataacagtgagtgaaatgaatcccccaaataaagagggaaatgaagaggaagaaatgattgtggaaatgatagctgctatacaaaaataaatgcaaaatataactgcaaaagactaattcttcagtacaaaaatatgaaggcttaggaatatttttatttattttgtttattttataaagtcatgaagggcagtgttatgccagtcttttcaaaaaaaaaatacaaacacctaagttataagtattaagacatacggccgggcacggtggctcatgcctataaatctcagcactttgggagggtgaggcaggcggatcacctgaaatcagaatttggggtcgacgcggccaa

SEQ ID NO: 240739 - DNA, 84 bp, Homo sapiens
cacaaagtttctcatactctacaatgagcaaatgagaggggcctagaaaacatttctgtcaggtttgagatggtttaaatgctg

SEQ ID NO: 240740 - DNA, 355 bp, Homo sapiens
tgtgtgtcaagttgacaaggggtcagctgtattggctagttttgtgtcaacttgacacagctggagttatcacagagaaaggagcttcagttgaggaaatgcctccatgagatccaactgtaaggcattttctcaattagtgatcaagggggcaaggccccttgtgggtgggaccatctctgggctggttgtcttgggttctataagagagcaggctgagcaagccagaaaagaacatccctccatggcctatgcatcagctcctgctttctgacctgcttgagttccagtcctgcatcctttggtgatcaacagcagtatggaaatgtaagccgaataaaccctttcctcccca

SEQ ID NO: 240741 - DNA, 459 bp, Homo sapiens
ttatagctcattatcacatttttaaaaattgttggtttgttcaattagaacacaggctccatgaggacagggattttgttcagtttttgggaagataatcaggctactgtgtggaatacggactagaggagaagcaacctcttagaaggaagaccagttaaagttgttcaaagggtccatagagaagccttaaaagtatgaatttagggccgggtgtgatggctcacgcctttgatcccagcactttgggaagtcaaagcgggcagatcacctgaggtcaggagttcaagaccagcctgaccaacatggtgaaatctcacactactaaaaatacaaaaattagttgggcacagtggcgcatgtctgtaatcccagctactcaggaggctgaggcaggagaatcacttgaacctggaaggcaggggttgcagtgagctgagattgtgccattgcactcca

SEQ ID NO: 240742 - DNA, 429 bp, Homo sapiens
agttgtggtgatgaaaatgcctgttgcctgcccaggcacttctgggacaataaacatgcttatctagacaagggcctcggccagaggaaacaaggctcagagacagaagcaaaaaggcaggaagaccttcctgacagtaaaggtaattaagaccagaaaccatttaccaaggaatgtatgggtctccttttcctggagattatagaaacctggaagctaatgggcccccagagagcagctggtccagccccttcattgtatagataagaaaactgagtcccacaaaagaaggtccctgcccagggtcacagagctgcataatgtaagagcagagaccaagacctgatgctgggactctctggccagatcagtttccattactccaagctgagaggcctccttcaaccacaggacagcctggctgatttt

SEQ ID NO: 240743 - DNA, 2008 bp, Homo sapiens
  misc_feature (772)..(772): n is a, c, g, or t
  misc_feature (937)..(937): n is a, c, g, or t
  misc_feature (1173)..(1173): n is a, c, g, or t
  misc_feature (1973)..(1973): n is a, c, g, or t
  misc_feature (1976)..(1976): n is a, c, g, or t
  misc_feature (1978)..(1981): n is a, c, g, or t
  misc_feature (1984)..(1999): n is a, c, g, or t
  misc_feature (2001)..(2001): n is a, c, g, or t
  misc_feature (2003)..(2004): n is a, c, g, or t
  misc_feature (2006)..(2006): n is a, c, g, or t
aaaagttgggaaattccttgaagcaatgttgggcctattggtgcagtttctctgcagtcagctcactttatagaggaagaactcggctgcttcagctcaatgtgagttaaacgttgcagtgtccagtcttgcttcctggcagttggggcccggagcagccccgaggcggggaggggggacattgtcccctttgactatgtgattgttggaagcagggtcctgagagggagtccaggaggcagcctaaatggaatttccagtctaaacgggcaaggcacagttgcgggagtcctggtgtaaagtccagtgagacagagactggggcttggggtgggatggggattgctgacaagagagaaggatctctgggccagggaagaggcagctgcattcgctggctgcgaggctgtggctctaggtgtggatatgctagggtgctccccgcagcccccagacctttcatatgtcagcattcccgtaggtggggcatgtgggacccctgcccggggccctttttccagtgtgactgtccctatagggtgaggaatctgaggtatcaagaagtggtatctccctaaaacttgtgcctctccctttaggccatgcacagggacagagaccctggaattccctgccccagtaacccccagaccccttacatggcctgcatgggccgcctccctggcgtgtcctgctgagggtaggctgtgcactgtgtgcacgtgcctccagccaaaggtggctgaatggtggccatgggcagggtatgtgnggacagagcttgggtgtgcaggctggggtgtccccataagcacgcccgagggtctttgtggcgcaggacacggctctggattcatgtgtgtgcctggtttcttgaatggtaaagttcatgcttattttctgggtgtgtttggggttgtccctccctatctgacanatggggcttgggaccatgcctggagccccagttgcatggggaggtggggttaagagcaggcctgtccccctgctcagcccttcttaccaccaaaccagccacacttgagcaggagcgcactgcactgtcattttacccaaagtttccctctagggctttgctgatgacatctcttggcttttgttagcattctggcgcaatatcagaaggattccagtctacatcgtggtcttctngagagctcatatttgatttcggctttagctcactggactttagcctggaggaatcccactgaagagtttttaatgttgacttatggaacttgtcccagcagcaaaccacagatactgtggcttgggggtgagcagctcttgtggaaacaaggcacttcccttcttcagctgcataggagtgcttcaggaaccttttgggccacattcttcttgtgatttcttgacttgtgggagggcagggaagtgatgtctgggtcccacagcgcacatggctgtccctggtgccgcccttccaggaggaactgccaggtcggatgtggagatgaacccggagagtgtccttcggctctggtcggccttcaggggcattcctgccagtctcagaagatgacagtctgcaatcgtgttatcatcaacgtggaaaaaataagggcaatgcagttttcatgtgtgtaaggttagcagctgccctttcttgggaagggctctttctgtataaaattttgaccattatatcttttacattttaaaatgtcctatctttccatgttgatgaaaagagctggtagtttctaaaggatattcttacttggcaaaataagaagtaagcagtcttatgttattctgccttcaaatttgaaacagttttattgagttataatgaacaggcgataagttttggcatatgaatacactgttaagccatcattgcaaagaagatagtgagaagtccaccctctgagggttcctcttgccacttggggtccctctgcccccacttcttccaggccaccactgcnctncnnnntgnnnnnnnnnnnnnnnntncnntntc

SEQ ID NO: 240744 - DNA, 472 bp, Homo sapiens
gtgagcttgaactaagtgatccatgtggcccccggtcacaaggcctagtgctaggcagcttacctatattataagtgcatgctgcctaaaaggagtaaatcctttttttgaaaactattaccatatttaatgttcttttttgagtcctgggaattactataaaatatttattatttcaaaaacaaaaataaagattttttaaaaaaagttttctagagcaaagccaccgtaagaaagtttgtaaccagaggtttttgaattctaatttgatgctgaaagagtagaagtattatgaatgtataagcaactccccattcccccattaatagtttttcccaatcaaataatgttgccataaatagttgttgttttatatattaatgggtttacagtgaactgccacttgtttgtttggtctaccttaatgtgttttactctttattttcttaatgattttggccgctaaaatgga

SEQ ID NO: 240745 - DNA, 463 bp, Homo sapiens
ccagctaatttttgtatttttggtacagacgggggtttcaccatattggccaggctggtattgaactcctgaccttgtgatccacttgtctcggcctcccaaagtgctgggattacaagcgtgagccaccgcacccagcctatttaacttcttatctgtaaaatgtgtatactcttagtaccttcctcataggaaggtactccatgaaagtacctctatgaaggtactccactttggatggatcatgagcatccatggtgacacactgctccaccttcacattttgtcctagtaagggaggttttgctaaccagggaaaaggctctgatccccaggtccgacaggctatgaaataacactttgaagatgtaaaaagcagggatttctgctgccctgtcctcaggcccccattccttaggatgacacatgtttacctctccagcctctcccttttgccaggcca

SEQ ID NO: 240746 - DNA, 264 bp, Homo sapiens
  misc_feature (17)..(17): n is a, c, g, or t
gggctgcagggaattcnggcacgagagagaaaaggaaggggaggctgaacaactttcaaattccgttatatatcaaaggctgttattattttactcaacatattttatgcattttcagagaaaaatatacttttgagagtgacttgctatttgaaattgacctagtcatagactcatcttaatatggaaaattaagaggtggttgtgattacgtgtgctttcatcagtgattcttttgagcagcatataaatggggttagtaca

SEQ ID NO: 240747 - DNA, 2794 bp, Homo sapiens
  misc_feature (109)..(109): n is a, c, g, or t
  misc_feature (1113)..(1113): n is a, c, g, or t
tatgcatttggttattcataatcagattttgttctgtgggttaaagttgaataatattttttgaggctcaaattgttctagctttgaccattttgggagctccttccgnttgtctcctgtgttcttctggtaagcccctgccatttttttttttaagtgtttccttaatttcctttactacaaaatattccaggctcatcttgtaacttcgctgccccagccctagagtcaggcacttctccacggagtcctgctttcctttattggagaatgctgtttagaaaccaaggtctggttgctaggtatgttcattgctacagcagttatcattgcttctgggtcctctcagcagacaaagctaggaaacagataattcagcacctatctgtatatatgtatgctaaagaatatgagtttgtactgataacgcttattctgatctaacctcaaaaagttcgttttattttagtctttcccttttcatgatgacttctttctccaacagtgaaaaaccctctcagtcattttcttagttggggtgaaggttattttccactggttttgctcctattatcgtggccctgattaacacacatttccacatgtggactatagattatttgactcaactcgcctttgagatgataacatctggaggcagaggcaagtgtttctgattttacatactctgtgattctgcacccagagctgcactaggatgtactgaatgcttgatcagcatcttacctgctgaataccccatttggatctgtgcccgctcggctatgctctccctctctgcagttcacaactctcctgccaattgtatttgtcttaaacaatactcctttcccgttcctagctttagaattctttgtgagatgagaactgtagcctaatgttagaagctctaaagcctgcccggtccaagatcagaaaccactaccactcatttccataccacctgctcttggtaggcatgtgtcagtagaatggattaattggaagtaaactggaataggacagagtgcagagacccatactgcctggccctgccacctgtgaccagaacttgtcacttcactgctctggggagtggaggtctatcagagnaggcaagtgtgttagtatgacacacttagtggcttgaaacaacacccgtttatcatttctcaattctgtaggccagaaggctgagcattgcatgactggcttcattgctgggggtcctagaagactaaacttagggtgtcagttgggttttcagggcctctgccaggctcagatggttgtggaaaattcagctccttgtggctataggactgaggtcccctgccccctcacccctattttccattgctggctaccaggcaggggccactctcagttcctagaggcccccatatttcctttccatgtggtctcctccatcccctgtgacacagcctgtctcccacattgagtcctgctcatgcttcagctctttttgccaagaggagccatccttgtaagggctcaccagctttgttctggcccactcaacgtaatttcccttctcaggtcaactgatgtggtcagcaaatacctgcaggctcacttttgccacataatgtgccatgatcccaggagtgacgtctcatattcatgggtcccgcccatacacagcaatgagggtcactggagtcactcttagtgttctgccagctgcagctgaacatgatcaggtcttaattctggcaccaaagtatttacctgtggatctgtgtcccatggttcccctgacaagataccagaaacttggtggcttaaaaacgacagaaatgtattcttataggtctggaggccagcagtgtgaaatgcaggtgtcaccaggaccatactccttctgacagctctaggggagaatgcttccttcttttcccagcttttggtggctcctggcattccttggcttctggctgcaccactcccatctctgcctctgtcttcacgtggccttcccctgttggtgtgtgtctgcatgtccaaatctccctctcctttctcttataaagacataggtcattggatttagggcccatcgtaaatccaggacaatttcatcttgacatccgtaactgattttatctgcaaagtctctatttccaaataaagtcactttctgagatttcaggtggacagttatttgcggggatagtattcaccccactagattcagggttgtgggaagtgttgcttactaaactctggttcacggagctgccaaagaaaagagatttatttttaaacctaggagagaaggcaagcttggctgctgtggaggctggggcccatcctcagaccatctgctcccctcatggtgacacagatctgaaaaccaggtgggttgaaggctggcctagaggccctgtgtccttaagatccagacactttgcagtacagtcagctcgcagtctctgtctttgtggattcaatcaaccacggatggaaaatatttgagaaaagaaacaaaactggccgggcgtaatggcttacccctgtaatcccagcactttgggaggccgaggcgggtggatcacgaggtcaagagatcgagaccatcccggccaacatggtgaaaccccgtctgtactaaaaatacaaaaattagctgggggtggtggggtgtgcctgtaatcccagctactcaggaggccgaggcaggagaatcccttgaacccgggaggcagaggttgcagtgagccaaggttgtgccactgcactccagcctggcgacagagtgagactccatctc

SEQ ID NO: 240748 - DNA, 376 bp, Homo sapiens
aaactctgcctcgaatctcgcttttgacttggtcctatgagctgagccaacatggcgtctcccactgcaccgcgagcgccgggctgccaggctcggcagggccgggtaatagaaaacacattggttaccaaaaagaaaaaaaggagggcggggggcgctaaaggccattccgtctgcaggcagaaaacccttttttaaactcttgctggcaagtgagtccggtcctcggttctttaattaaagcaacagaattcgtaaggaaaatattggtaacgctgtaccttctccccctccccctcccatattcaggagagttgatttcctgtcccctctccttccaagaaccaaattagaaaaataaaaagtctgtatccgc

SEQ ID NO: 240749 - DNA, 493 bp, Homo sapiens
ttcatgtgctgtagaccatgtctcttcctgcttcgtacccctgccaacgagctattgcagatgtgagatgtatgtgctggccgtggtttggtctgggttggttcttggttaagtaacagagttcttataactccccaagttgcatctgggcagttcctaccttgtctccaaccctttttcaggttgtcgttctgcccattggcctgagctttaactctctcactcactcactatagactgagcttgtggtctcagagacctttggttttccatcataagtgtttgatcatttgtgactgagggcagaccaggaggaccagggcgagagctgggctgggcagttagacaagtggagacttagtgggcctgcactccacctctgggaccctccttctcattgaaccagggcagtttctggtattttttgttttgtaatttgttctttagcataaacatccatttgaagaaacagtttcatagctaaaaaaaaaaa

SEQ ID NO: 240750 - DNA, 525 bp, Homo sapiens
ccttatttaaaatagtaaaaaagtggaaacaatccaaatgtccatcagctgacgaatggaaaaataaaatgtggtatatccatacagtgggatattgttcagcaataaaaagaaacgaagtactgattcatgttgtaacatggatgaatcttgaaaagttaagtgaaaaaagccagtcacagaagaccacatattgtattatatcatttacataaaatgtctagaataagcagatctatagagaaagagagttgattcgtgtttgctttgggctggggaaatgaggggaaggacagctaatgagtacagggtttctttgaaggggatgaaaatgatctataatttgattgtggtgatgtttttccaaacctatgagtatattttttaaaacattgaactgggccaggtgcagaggctcatgcctgtaatcccagcacttggggaggctgaggtgggagaattgcttgagcccaggagtttgagaccagcctgggcaacacagtaagatctcatctctgcaaaaaa

SEQ ID NO: 240751 - DNA, 435 bp, Homo sapiens
tgcattgcttaataatccttttaaaagtgttattgtagatgcccttgattagggaaatgcatttccattttctgagctgtagggtctaaaactgtgtttgctttcttgctttgttcttgcttgggtccttcatttatcagaacaatactaacaaatggctcttttctcaggtatgtgagccgcaggggtaactcagacctaaattgccttttcactttttttcttgctatgcatgcacatgcaaaaacgtccaccttcagactttttactggtacatcgcggaggaaacttgagtgtcggtttaagtctgcgtaactgagaccatagctctgtggctttcactgcacttcccagtgctgagtagactgctgggattccacaaataaataataaaaataataatgatttttcaagcatttggaaatgctgagttga

SEQ ID NO: 240752 - DNA, 914 bp, Homo sapiens
ggctgatcttgaactcctgacctcaagtcatccacccgcctcagcctcccaaagtgctgggattacaggcatgaggcacagtgcccggcctcagtttctgcagttcttgctttttaacagttgtttaccctacaaaaatggaaaatatacttggaaatatttgtggacatagggcttttaagtatatgcacttagagatagatacagacaacctatggattaggaaataggacactatccatgtctgaaatttaaataaggtccaaattagcttagatccaatatgattccccaatgcatatatgaacaatacgtgaacattgttgtgtgcacaactatggaaaggtcttaatccgcacagtgactctgagataagactcactgaaggaaatacagcagcaaacccaggagatgtgagttccaatcttcatttgtaactcactccaaatgagatcctagcaatgaagtaatttttttttgtttcccactaaaaacaaataaacaaaaaccttagtttttctatgctacagaattaggatgacaaatgaacttatcttgcagtcactataagaacactgacagtttcagagatagtattaaaaatcaactaaacacttataattattgtgaaagcatttatctatcaaagaaggttagcctgcagccagttggaaagttttttttgttgtttttttggtttgtttgtttgtttgtttgtttgtttgtttgatagagacagggtctcactatgttgccaggctctcctgggctcaagcaatcctcccgcctcagcctcccaaaatgctgggattacaggcatgagccaccgtgtccggctgccaggtggaaagaacaatttaaggagatggttaaaagtggaaaagccaataacatggtaataattgaaataaaag

SEQ ID NO: 240753 - DNA, 562 bp, Homo sapiens
gagcaacttcagtttcctttggtcttgctttgtttctgaaggctgtccttcaaaacaattatttctctgactttctcacccttgctgcagacccttgctaatccttgaaacaaatgagtcagaagcaacatgtggtgaaaatcagtatgcaaatatttcactgagggttactgctgtttaaaagaattcaatttttgctatgacatttaacagtgcagaatttaagcgtgtgcgtcaacattggggaaataatacatggtgaaggttgtatttcatcttctcagggagctaacactgtcctgttattgtttcagtagattttagttcctgattagtacagttagctttttcagtcatctagattcacacttcctcattgttagggagtgctcaaaagcagagagtcaaatggctgaatgttttttggtatccctcaattttggatccttttgcacctagaaacattaactttccctggcatcctgttacctgttacctgtgagctgccaaaatagtaagcggtgtatgattacattagtgtctgtaaaattgtaatttgaat

SEQ ID NO: 240754 - DNA, 616 bp, Homo sapiens
gagcaacttcagtttcctttggtcttgctttgtttctgaaggctgtccttcaaaacaattatttctctgactttctcacccttgctgcagacccttgctaatccttgaaacaaatgagtcagaagcaacatgtggtgaaaatcagtatgcaaatatttcactgagggttactgctgtttaaaagaattcaatttttgctatgacatttaacagtgcagaatttaagcgtgtgcgtcaacattggggaaataatacatggtgaaggttgtatttcatcttctcagggagctaacactgtcctgttattgtttcagtagattttagttcctgattcaaaacagcatggctgcttctcatttctctttcagcaatttgagggtaggagttagtacagttagctttttcagtcatctagattcacacttcctcattgttagggagtgctcaaaagcagagagtcaaatggctgaatgttttttggtatccctcaattttggatccttttgcacctagaaacattaactttccctggcatcctgttacctgttacctgtgagctgccaaaatagtaagcggtgtatgattacattagtgtctgtaaaattgtaatttgaat

SEQ ID NO: 240755 - DNA, 414 bp, Homo sapiens
cagttccttgtagccacgtgatcccttaccgttcttacacctgctgcccccccaccacccagaggccctcaactgtggctgaccggggcgtcgacctcacgacctcttccaggacctccccagctctgtccccgccaaaaccccccacaacccatctgggtgtttgtgtgatggccccctcttaggaaagagtgggggaccctgcctgaggctcccccagctgtgacccccatgccttctgtctgctctgcggtgaggaagaagctctggggtctcccatgcacccctccctctggtctgggtcccagctcccccaaccagcgtccagacctggctctgggcccaaagagcccacttttcggaattctaagaaagctgttctttccagcagccaacctggctctggcaaatcca

SEQ ID NO: 240756 - DNA, 748 bp, Homo sapiens
atacatgcttagatattgtattatgcatatccttgaatatatttagaagcatcacaattgaatatgtatggatttacctcaaagaagactgggaaatagttacaactggcatattgtcataaaaactagaagtattatgggttttaaaaaataggtctatgggccgggcgtggtggctcacgcctgtaatcttagcactttcggaggctgagggaggtagattgcctgagctcaggagtttgagaccagcctgggcaacacggtgaaaccccatctgtactaaaatacaaaaattagctggatgtggcagcgtgcgcctgtagtcccagctactcaggaggctgaggcaggagaatcgcttgaacctggaaggccgaggttgcagtgagccgagatggcgccactgcacttcagcctgggcagcagagtgagactccgtctcttaaaaaaaaaaaaatgtctaggaagtgttatgtttttctcagtgtgtgtgtggtccttgcactttcatatggctgcaaacactttaaattttgtgccctcccaacatagatatgagttatgttggaatgagtttattttaaaccagagtatgttctcattatagaaatgttacataggatgagaagacctatggaatactgctgaagcctaatttaacccaaagtttaggtggagcactttgtgctttcatgtataaaagaaaactgtttctgcgtgaataaagttttaatggtaaaaagctaac

SEQ ID NO: 240757 - DNA, 706 bp, Homo sapiens
atacatgcttagatattgtattatgcatatccttgaatatatttagaagcatcacaattgaatatgtatggatttacctcaaagaagactgggaaatagttacaactggcatattgtcataaaaactagaagtattatgggttttaaaaaataggtctatgggccgggcgtggtggctcacgcctgtaatcttagcactttcggaggctgagggaggtagattgcgctggtctcaaacttctgaccttgtgattcacccgcctcagcctcccaaagtgctgggattacacgcatgagccaccgtgcccggccgtaactttcctttataagcttaaaaatcattaaggctctgggtcaagaaagcagactagttactgagcattgtcatctgccttctcattttaaggcttcaccaaaatgaaaacataaactataaaagagaaaaaaaaaggtataattacaaacatgaataccaaagaaaacgggaaaggaggcatcaacaaatgagatatataactctttaggaagaggggattgattttacagatgagacgggttgaaaagccctagcctaaatgtactgcaaagaggtttctgaagatatgcaagttttcagaaaaactgacttctttagacatgagacgaaattcagaaaactaagactcctgatgatatggattttgatgttgcacaataaaatccttct

SEQ ID NO: 240758 - DNA, 626 bp, Homo sapiens
aacaaaatgaaaattatggaactgaaagtacagtagctaaaatgaaatattaattgggtaggcttaacagcagattgagttatggcattagaagtcagtaaacttaaagataaatcaatagaaattatttaatttacttccacagcttcactgcctgtggaggaacaggaacgatgtcaatcattggcaaaataaactaaactagatcttctcatatgtctccattcctatagaatttccctgtatccctgtaaaggactacctcaatagatctgtagtttccaaagatggggatttttttttagttcatatttaaagttgtggttaatttacaatagccttaagtattagaacaattagtgtatgtgttaagaatcttaagaacctagaggacagcctaacataagtcagtaaatctgataccaaataactatttatatacagttaaccctttggtataaaagagaatattttcatatttggtaaataacatttttatgccaagtgtataccttctctttgtaattcaggcacttatgtaagtatgcaagctttgataaattgggctaaagtttattttgattctcctgctctgtagattttttatttccttaaaaatagttcca

SEQ ID NO: 240759 - DNA, 391 bp, Homo sapiens
ggggctggtggtaatgttgagtgtcagtttcaaacaatagcagctggcagtgcctggtgggaagagactagaagaagtagaggaattccatgcagaccaacctactgtgtagctcttctcttcaaacttctgcttgtagaaagcaaaggtatgctctaaagtagaggttgaaactcatgagaatttaccttggtgaaagaaagggttagaagctatttttaaaaagcagttgcaggaagcatttctgaagtcagaacttctcaacccaggctgtacaccagactcttgtggaccttttaaaacatctaatttctatttttatcaaaggagacatgaatatggtgttttttaaaaaggtggagatggttttaagtttgtaaatgtatgtttt

SEQ ID NO: 240760 - DNA, 149 bp, Homo sapiens
tctgttgatttttttcccaccaaaactgccatgtcttctgcaatgacagctttatttattatttccaattctcttgccttttcttctcccttcttcttcttccttctcctcctcttcccctttttctccttctccttcttcttcttctc

SEQ ID NO: 240761 - DNA, 2547 bp, Homo sapiens
gagggtggtgagggtgctggtatctctgcctgggggtgggtagtgccaggaaggtgcctaagtgtccctgtcgggggctgggaatgctgagggagagtggtggtcacagatgtgtgaaattccccacactgcctgctgagctgtgtgcattttactccatggctgttacccctcagtttaaaagagactgagtccctgaaactcacagggcaagccccatcaccagccccgacaggacaggaagcagcagcactggggtctccatggcctgtttagggcactgtcagccgagggctcagtctagccactggtctctctgcgtgtctctgcctgagtggcccagcctggggcatgtgactctgtgctgctggtgggtgtacagaggagacggtgatgggactggtgagtggccactgagcagagtgacatgcgtggggagtggtggcactgctgtgggattttctgagcactccacgtgaaggtggcttgatattctcattcctgacaacagaccattttctcattgtgagaaagaggtagcaaccaagtgtcccatgagaaacaccacccagccggccagggagccatcgatggcgtcgggggaaggctttcagggtttggggacttggtttgggggctgtcccgtttggacagaagtggctgctcctcactgcttggaacagttctaccagtgccttgatgttctgaccaagcctctgcacggccagtgacaggcacacctatttgcaaagggtaagggttaacacacaggacaggacgggtgattcctggggaatagaattcttacttccgccactgcatgaagctaagagccagaaagtgacgacagtaccagagttccccgagcccatgttaatttactctgacagtgtgaaaaccatctacgtgggaaatgggtcgctcattcctgaggcgggccactgctgctgcagaagttcacggatttgatacccgctactggaggcccacccctgaagttccctaccatgggaccaccccttctgaagagttccatttttttcttattttgcttttggtctttttggaggcagggtctcactctgtcacccaggctggaatgcagcagtgcaatcacagctcactgtcaccttgaactcctgggctcaagcaatcctcccatctcagcctcccaagtagctgggactacaggtgcatgccactatgccctgctactcttttaattttttatagagatggagtctcactatattgcccaggctggtctcaaactcccgggctcacgcgatcctccagcctcggccacccaaagtgttgggattacaggcctggccatgagttctagaattggatgctcctgggctcagggaggcactcaggggaatgccagggaggggcagctctgctctctactctctctcgcatacctaggcacctggccaagtgaacaaaacttggtttccttctgaaacatggcctttctgctagagctgttgataggcatgaaggtgaagagatgcctcctaaagtgacgtctttcccgtgctgagctgattctcgtgatcgttaatgcttcagttttacttgatgactgcgcattcctggggacatcacaagctatctgttgagttctcaaatccagggctttccccaggtcttggcaggtacctcttgcaagtgccaaggagcccagcaatcatacaattcttggccaggcacggtggcccatgcctgtaatcctagcactttgggaggctgaaggcagatcaactgaggtgaggagtttaagactagcctggccaacatggtgaaacctcgtctctactaaaaatacaaaaattagctggctgcggtggcacatacctgtaatcccagctacatgggaggctgagacaggagaatctcttgaacccaggaggtggaggttgcagtgagccgagatcatgccactgcactccagcctgggcgacaaagtgagactccatctccaaatatatataaaatataatttttagaaattcatctatttgagtctcagactttgtaaaatgcagagaatgacccacgttgttgggttatgaagatgaaaacggatcaaagtgctccacccggccctgatgtatagcaagtgatcaataaacattggcttttaccattgccctttgcaagggtctgcccaatcaggtgacaactgctcactttccaaagtgcaccaggtagcaacctggccaagaaagacccaatgtcgagtgaacataaagaacacagggaggccaggcacggtggctcacacctgtcattctagcactctgggaggctgaggcgggcagatcgcttgagcctaggagttcaagaccagcctggataatgtggcaaaaccctctctctaccatcaaaaataccaaaaaaattaacagggcatggaggtgctcaagaggctgaagcggaaaaatcacctgagcccaggaggcagaggttgcagtgagctgagatagtgccactgcactccagtcactagagcaagattcctgtcttaaaaaaaaaaaa

SEQ ID NO: 240762 - DNA, 431 bp, Homo sapiens
tgttagtgttagtgtattttatgtgtggcccaagacaattcttcttccaatgtggctcagggaagccaaaagactggagtctagactttgacatcagacctagttatacctttgccttagactctggcaacactaaacaaccacgttccccctctcctcctcttttacccacctagtcactgagtaccatcagttactaattcaaaatgtctcgtttcttctatttctttcccacaacactagccaggccctcattatttcccaggtcagattttagtagcctcctcagtggtctctatgcctccattctatttttcctcaaaacctccttgttttacttctctgcttggaattctcccatgttcccaaggataaaatggagtgtaaacttctcagatataattagaaccctctaccatctagccatatga

SEQ ID NO: 240763 - DNA, 528 bp, Homo sapiens
caaaacgtccacaatttcagtaacaattttagtcacaattccagaacacttgttaccaattgccatgttatctcattcacagaaccatatattcccaatgataacagtaaagcaaaggactagatataattattttgtgaataaattctaaagtgttttcatgtgatctacatagaaacattaatagtgatcaacgctagtaactctgctattaaaatttttcttctgcaactctgcctgtataaggaggaacaacctcttacatgttctggtgataataataactaacatttattaagggctcactatgcccttggctctcttctaagcactccacagatattactcactccttacaacatcattttgaagcagatactgttattacccctatttataggcagagaactaggaagagagaggtctaaaactttatccaaggatacataatgtacaagtacatgagccaagatttagagttaaatccaaagtttacattttaccctgttgccctcctcataatagcac

SEQ ID NO: 240764 - DNA, 387 bp, Homo sapiens
tggaaactgaggctcaggaagcttcaataatttattcaaggtcacagagctaatttgtgatttagagggatttcaacacaagtctgtctggctcccaaagctcttccctccacactccaccaacatgctgcctcaggcccccaactcattttcgtgttcattgccccatcatctgctctctgcacattataaaggaggcaacttatgctccgcacagttggcaaatgcactcttccttggtccatggcagacagaggaaatagagcctgcgttcttttggcttgccagttcttctcggttcagcaatagaggcagccactaccaattgatctgtgaactggcagttaggggaagccattctatttgttaagaattctcagtcaacca

SEQ ID NO: 240765 - DNA, 425 bp, Homo sapiens
gtttcctgatttacaccacatccagatggtgctgagaggatatgaacaggcgagagaagtaacaaggatctcatccattcttgcttcactcaccacttcctttttctcagaggtcaatgcctgatgccaggtccactcactgaaattccatgaagactggaatttgttgccttggagcatgtatatacattctcttgttattctcctcccagttcctcatcaggaccttctgttgcttctaatagttaacctctttaaatagcacagtttccctcttctgcaagtaaagttgcagtagggttctgatggcattaatattttaaaagaacttgtgattttgtttacttaaaagtgagggatgtgaacagatgtcgactcaacctgagaaagaaggtatttgttcacatccctcactttataaatga

SEQ ID NO: 240766 - DNA, 396 bp, Homo sapiens
tccctcgtcaggtcagtcaccaagtcctttcagttctatctccaaacacatctcagtccctgccaccatggtctgttatctgaactactataacagtttcctaactggcctccctccttcctctctggaccctccagtgtgttccttcgtaacagctagagtggatttttaaaagtcctcccatggagttggagaccagcctggccaacatggtgaaaccccgtctctaccaaaaataataaaattagctgggcatggtggtgcacacttgtaatcccagctacttgagaggcagaggtgggaggatcacttgaaccccggaggtggaggctgcagtgaattgagattgtgccactgcactccagcctgggtgacagagtgagactccatctcaaa

SEQ ID NO: 240767 - DNA, 388 bp, Homo sapiens
  misc_feature (56)..(56): n is a, c, g, or t
atgtccgttatctaggtttgcccaggcacagactttatcccataaccttcactatncgcccaggtggccgtaactcaggccagctcagaggctcatgaccttcactccaccgcgcccagctgcttgtaggatttttatcagacggaaataagcaagagattctcataataaattacatgtgtatatttatcattgcattctgtgcaattaaaaaaattaaacttgataataagggagtggctcaacacattaactttgaatgttacacaattattaagtcatgtttttaatatgacagagatattaaagtcacagtaatttacagttaaagtgaattgaaagtggtgtttaatgtatacacatatatagtgtatttgctgcttgtaac

SEQ ID NO: 240768 - DNA, 262 bp, Homo sapiens
gtgttcaaaagtaatatatcttttaaaccacataaagagtaaagaaaaaaaagtatttagctttttaaaaaaaagttctattctagagtcactaaggattcataataagaatgaatgggccaggcgcagtggctcatgtctgtactttgggagaccaaggcaggtggatcacctgaggtcaggagttcaagatcaccccagccaacactgtgaaaccctatttctactaaaaatacaaaaattagccgggcatggtggcgca

SEQ ID NO: 240769 - DNA, 393 bp, Homo sapiens
gcagaggtaggcctggtcttaccagggcaaccacctaacgtggactcaacaccatctagtggtttaacagaaagaaggctgaaccttctgtggagacagataacaccatcaaatctttgcaagtttttatatacaatcaaagactaaggagctaccaaaggacaggattacatgactagaacaaaagggaaaacagttaataacagatccagagatgatccacatcattcaggtttattagatgaaacctattttcagtaacaactatgtcatgaacatagaggacgtatggagaaaattgatgtgaaatgaagaatttcattagcacattggaatggctaaaaggattaaatggaaattcaagaagggaataatacagtatctacatttaaa

SEQ ID NO: 240770 - DNA, 155 bp, Homo sapiens
ggttgagcccaagagtccgaggctgcaatgagctatgatcataccagtgcactccaaccagggtgaaagagtgagactccatctcttaaaaaagaaaaggtaaggtatttaagccttctctccttggaattaaacttggtgcaaaagcacactgg

SEQ ID NO: 240771 - DNA, 376 bp, Homo sapiens
gcactattcacaatagctaagaagtggaagcaacacaactggacactgatgaatgaattgatttaaaaatgtggtgtgtgtatgtatatatatgtacatgtgtatgtacgtatatatacatatacacaatattattcagccttaaaaaggaaggaaatcctgtcacacactacaacacgaatgaacctggaagacatgccaagtgaaataagccagtcacacacacacacaaccaaatactgtttgagtccacatatatgaggtatctaaattagtcaaattcctagaaacagaaagtagaatggtggttactagggaccaaggagaggggaaaatggggagttgtttaatggatataacatttctattttgcaaa

SEQ ID NO: 240772 - DNA, 2071 bp, Homo sapiens
  misc_feature (1708)..(1708): n is a, c, g, or t
  misc_feature (1739)..(1739): n is a, c, g, or t
  misc_feature (1753)..(1753): n is a, c, g, or t
  misc_feature (1966)..(1966): n is a, c, g, or t
  misc_feature (2048)..(2048): n is a, c, g, or t
tttaatttaagaagcattgatacaggaaatatcttaaacccaaacaaaaactcaaataaatttaactagagtacaatatgtaatgacatttaaactacaaaatattgcaagctacaaaaatattacaaactataaaagtatgggttagtattatatcctacttatcttttgtttaagccttaaattaaataggaggataatattaccattatggtaggaacaatgtgttctgtaacaaaaatagcactcaaaatattcatggcgtctgttttcttcttccaaatcactttatacttgaatgatttagttatgaatagaggttaaggtagacagtcttaggaccagagaaaatgagtgtttgtttcaaattctaattttgctgcttaagtttaataatcagtctgaacctccctttgttcatctggaaaatggaagtaaaaccacctggcatggtttcagtgaagactaaagacatgtaaaacaccaagctctgtgcttggttcataagagacgtttaacaactggaaactcttaataccatttgcattcttttgagggtaaatacattgatttccacctccattttttagcatgctaaatattatctactatataattttttcttatctagtgtgatactcttgatgaaatctaattcatcagcatgtcaatttgatctcttgaggtctttaacattgtggtatttccaactttatattctgcaaactgcaagcttccaaatcaaatgcactttgttctgatttagcgtattgaaattttctgtagaatggctagatccaaatagtctatctgggccccagcatcacataatatattcatgtaataaacctgcacatgtaccccctgaatccaaaaaatagttgaagttataaaaataaaaaataattattatagggtatattagtctgtgttcacactgctataaagatactatctgagactgggtaatttataaagaaaggaggtattattgactcacagttccacatggctggggtgggctcaggaaacttacagtcatggcagaagtcaaaggggtagctagcaccttctgcacagggcagcaggagagatagagagagcaagcaaaggagcattgccacactttaaaaccatccactctcttgagaattcactcactctcatgagaacaacatgggggaaatcgcccccatgatctaacatctaccaagtccctcccctgacatgtaaggattataattagagatgagatttctgtggagacacagagccaaaccatgtcatagggtaatgactgatttaaaggttttattcagcttccaaatgccaataccgttatacatcaagcactgtggtaagcagtggggacacgtatgaaaaccattaaactctcaccttgcaaagactgaatctctcagtattattttcaagaaaggccaaaaagagtatgtgtgtgcctgtgtgtgtgtgtgtgtgtgtgtctatttatatatagaaagtatgaacaacatatcataaggacaaaaaatgaaaagagacacatagcactatatactatggttctggtgaaggagggaataaagaagttgatacccaaaagccatagattgggcaagaaggattagagacttcctcagcacagttagttctgaaccagtaatagtaggattttcaaccagatgctgtagcaatgaaatttaaatgncaatctaaaagataatctaaaaataataaancaatctggaaatancattaactttctcttctggcgtctaaatcctgagtaattgtgccttagattgcagaagagtttaaattaatttagtgcaatgaagtgaaataagctgtctttacttttatttccccaattcgatataagaaaagagtataaatctgtagtaaatccttttacaactgtgacgtaagtaactcatttatatagtttcagtacttgataagtaancaaaacatcctttgctaagaaataaagtcttacaatatatgtatggtatgtgactatataaatgtatttttatacttgtatntgaaataaagcaatttttaaatc

SEQ ID NO: 240773 - DNA, 391 bp, Homo sapiens
agccacaccagtcagccatatgaggctacatcttttatatgatccccgcaaaacctgtacgaaaccccagcacatcccagaacccccgtgagctgctccgtgggagctggagagcctgccccagaatgggactccttcttggtgatctgattcacctgctgctgactcaggcctcagcttctgttgcccacgtagatgcagcctaaattaaaacccacgagagcttgaaaaaatgcagatgcctctctccccaccagttctcttagtgatgaacaagcaagtctaattttagcagagaagaatcttagaatgtgagaaacagaaaggactttgagatcatctcatcttgtggttttcgactctcactcagcaacagaatcacctgaggagg

SEQ ID NO: 240774 - DNA, 321 bp, Homo sapiens
tagccaacttggtttgctgggacttttctggtttaaaaactgaaagtctggctggttatggtggctcacgcatgtaatcccagcaatttgggaggccaaggcgggtggatcacaaggtcaggagttcaagaccaacctggccaacatggtgaaaccccgtctctactgaaaatacaaaaattagccaggcatggtggcacgtgcctctagtcccagctactcaggaggctgaagcaggagaattacttgaacccaaggcagaggttgcagtgagccgagattgcgccagtgcactccagcatgggcgacagggcaagactc

SEQ ID NO: 240775 - DNA, 444 bp, Homo sapiens
aaaagtgtgtgcagtgaaacattgtattgtactgagacccagaaattttgttgataggaatattagaaatgctaacatttttctaaccttaaaggaaagaaagaaaataaagtgttcccaaccattggctgttaccagtgcattcacaggaattaatgacaaattttccaaaggctaataagtagttctaaaagcaaaggatttatttcttcaattcatttcatacctaattaaagcataatagtgcccctttatatgaagtatgtttcctacggaaagatcgggcaatgtgctaaaagcatttcattttctagcatgagatgttcttgttttcatggcctgccctttcaaatatggccagaattaaatattgtttaccttgcattttataattatttcctgtacttgatggaataaaactaaaaataaaacattaaaaaaatt

SEQ ID NO: 240776 - DNA, 358 bp, Homo sapiens
tttttttttactacacataaaataattgacataaaatcaatttaataacacgtaatgagtgcccgttatatgcaaggcatttaaattgtctgactggccataatcgggtcacatttaaggtttgttacttcaattccaagtaatgtggtaatacattattccagaactttttggaacctgatggcccgttttttaaaagtcgttttgactggactggcattttggacctctgctctttcccatttccctgtgtgttagtaactgactttttttgatatgttttatgtttgccatatttcacagatccttttattttgctcacttttttgtactcctctccatcctgcctttcattctc

SEQ ID NO: 240777 - DNA, 397 bp, Homo sapiens
tatagacgtcaagaacctcatagataatagtaaaatttagtaaaataattaggaagtaccgagttttaagtttttaattacctgtttttaatatacttgtaactttatatatatattaacttttgaaaatggccatgttttaacaaccagcttacaaatttcctagaaattttgcaatcagttgtcataaactggctcaagcacaccactagcccaggtactatactgggtacatgaaaacatagtattttatttaaatctcattttaagttattgtgagataaaaactagcttggtcatcttacagttgagaaaattgggattttaagtttgcttgttcaaggtcacatacctgcacataaatggtagaggtaatattcaagtccaaatctgtttg

SEQ ID NO: 240778 - DNA, 314 bp, Homo sapiens
ctccattcttatcactattaacatttttccttgtgattattcttttactttcttttaagatgagaaaaaaatagacttttattcttgactgaataggtaaaaaccatcaagaaatgtcagattttccagagaataatttcaacagagaagattgctctacatacaagaaactgaggccaagagagttgattgacttgcttaacactgaagcaagcatattagcaattttaaatgacattttcctataatgttttatattatgtataaatattcatataatcagaattcagtataaggtatgtatcttaaagatt

SEQ ID NO: 240779 - DNA, 706 bp, Homo sapiens
gtagacatttttatgtggataaagtgtaagtttgtaaggaacagtggagaaacaagaagttgtggtaagggacagaaatttaagaagttaagtgttctgggtaaaaacaaggtagaggcatgagtcaatgagctggttacttagatggagaagagtgaaagttttcggagttttactagtaaggggcaaattaatcagtagcatttactgactgtctgctatggtccagatgctttgctaggcactttccatatatttctaacactatttctgttctgcaaagtacatatagttgttttcactgtgcacatgggagaatgaaagcctggagaagttcaataatttgcccaagcttacacagctggcaaagaattcaaacccagctgtgtatacagtaagttctcacttaacatcattgatgggtttttggaaactgtgactttaaatgacacgccatataacaaaccaattttcccactgactaattgatataagcaaatgtgaagtgtctatggcatattcttggtcacaaaaatatcactaagcttttacgtaaacaccaaaaacttctgttattaaacactgaaataaatgtgagctatacgtacatttaagaaagattaatatgaacaagtaagataattatttacctaattatcccagttcagagtgttgggtgaccggaacctctcccagaagcttaggg

SEQ ID NO: 240780 - DNA, 419 bp, Homo sapiens
gtggtgggtatatggtgatttaagaaatatgaaagggctatcaaaagatgcagtactacactgtctaatacactggccattaagcacatgtgactgttaagcatttggaatatgctagaacaaactgagatgtgctatgcatgtgaaaaacatgctgaatttcaaagaataagaatagaaaatatctaatttatagtactttatattcattttgtgataaaaatttaatatatattaagttaaaatatatcactaaaattcatatcacctgtttcttttttattttttctttgtggatgttagaaaatttaaaataccacatgtaaattaaagtataattctattgaacaatgctggaccagaatctaggaattgtgcttgccactaacaagctccttgtcctggcctccatgacttaa

SEQ ID NO: 240781 - DNA, 438 bp, Homo sapiens
gctgagcatggtggtgcatgactgtaatcccagctacttgggaggctgggtcaggagaatcgctttaactgggaggtggaggttgcagtgagccaagatcacgccactgcactccagagtgggaaacagagcaagactccacctcaaaaagaagaaggagaaggagaaggagattatctacattcctgaggaggagaagttgtacttaaactaccttgatccaacttccagctttacaatcattgccccccaccatgcatatatcatacatatatacctgctagcatgaatacctgcatcatatctagaattaatgggaatagtcatagggccaatctttcttatatcaagcaagctgaacaagggtccaagggataaggccacagctacttcctcctgctttagaacagagctaaataaacctgttcctaagtcttg

SEQ ID NO: 240782 - DNA, 406 bp, Homo sapiens
ccgagcactcttttaagctctgatgcgttcttcagattccatttcagtgcctttccaacactgaggagtagttctggaggacctcccaaagattacattgtgagatgtatagttgggtaaaacgtcatggtaagggctctgtcttaacttggaagtggctgtgtttattgagtggcgaattgagaagtctttcctcggttttctataaatgaatatttgtttctgtaacttaagaagtaggtaaactccttgggagtaagagatgttcctaataccaaacttacctttcaggttctctaaaagatgaatttggccacaaaagcagctctgaccttatatatttccttactgtatttttcctgtgagtgctacttgtttcttttaaaatctggtaggactatgggat

SEQ ID NO: 240783 - DNA, 927 bp, Homo sapiens
atgccaagtagtccctaccctctttaaaaatatcggtgggaacccaagctagtgtgaggatgagggaggtgccttgtaaaagccacaaaagaagggatgaaaacagaaaacttttatattgtcaaatgttgtaaacaaagtcaacaacatgataaactgaagaaattattgacagtggacatggcatacaagatgttaagtccatgatgtataaagaggttcggatcaaggagggacagtcctatggaaactgggccgagtatataacggaatccaccaaggaagaaagcggaatggccaataagcatatgcagagattcttgactagtaatcagagcagggcaaacaaaacaacccatatgccagtttttgtttatcatattgtaaaaatttaaagattgatgatctctaccccgcacaagaaacgaggtgaacaggtgctcttgaaatactgtggatgtgaatacaggttgactgagctggtatctccactgccaccaccgtcgtccaggctgctgtgggctccagcctgaactgttataaatgccctagcaccttttcttggcccaaatcacttctggacacaaatcagaccctgctacactactctttaaaacccttcagtagtttacgctcttcccagtttgaacactgaaccccatcacccgtccctcaaggctctgcgtggcctcactcccgtttacctcttcatcctcatataggcccccttccgtgttcccttgcccttcatccacacaggtcacacgcagctcatttcctcccgggtgctgctgtcttttctgcctggagcctttgcagtttgcaggtgttttactctggaaagtcccacctcacctccacaacttttcaaccttcaggtctcagctcaagtggcacttccataggaagctgtttaaaataaatgcc

SEQ ID NO: 240784 - DNA, 448 bp, Homo sapiens
caaacctcagcagattgacttgccaacctaaaataatgaaaggggtcagaatatgatttaaagagcatttaaataagtacaaagtgtgaggtaggccacccagaaacaccaactccgaagaaatggagtcagttttccgaagtaggaagtgaaggcttcatttatgtgggctgagacagtggagtttttagcaggattacaacattattcatacaaggttggtgtgtatgttatagcaatttgattggctctaggtgatgtttctttttggggaggggatatttaacattttcttaacagagggtgtaatagtcctgggttttctttcacctggtctaagcgaagcagggcaatgaagggggagttaatctacaacaagggtcattaattcagagggcgggaggcttttgaccctgacatggtttccctttagtcaatgtacagagca

SEQ ID NO: 240785 - DNA, 224 bp, Homo sapiens
tcatagtgtacatttcctctcgcagcagcttgtgtttcttccttcaagagtctgcttagagataataaagatcaacactattccttataacaacacctcagtaattttccattacctttccaaatcctataaaacggccccacccctacctcccttcgctgactctgctttcggactcagcccacctgcacccaggtgaaataaacagccatgttgctccccca

SEQ ID NO: 240786 - DNA, 895 bp, Homo sapiens
cgcaggagcccagttacgaaaggccgtttatgcttgcctaggagtttcagctttaccctggagaggtggagaactagtgagagattttatgcagagaaattatatgatcctgcttgcattttggaaagatccttgagtggctctgcagaaacttgatggaagggaaagcaaggatagagacaacaaaaccagttagccaaggaaaaaataagagttcagaaatgaacatggcaaggtaaaaaaatctacaagttttcacattaaacacagactctttcatcttcaaccccagaaaattacgaagtgttctccatgtcttcaatttgctgctcagatccactcgcctcccttcgacgcagtatctgcatctggaagacggacctacttcagttggccaccttgccctctaggttccagctggactcagtcaggacagatcagagagactgaggagggggaggcctcctgcagggtcactgtgaagtacctgtggatgccactgaaatctcagctcatgtctggtggccctttttgccaggctctggtcttaagatggtcctgggtccttactgccactcccagtgtcctctactgtcccttgtggttttcctgcacaaggctatatcttttctcttcaggcctccctgttccctgagatgcgacaatattgaaattaggctatttaaagtacttcatgactaaaacacgaaaagcaatggcaacaaaaaccaaaattgacaaacgggatctaattaaactaaagagcttctgcacagcaaaagaaactaccatcagagtgaacaggcaacctacagaatgggagaaaatttttacaatctactcatctgacaaagggctaatatccagaatctacaaagaacttaaacaaatttac

SEQ ID NO: 240787 - DNA, 455 bp, Homo sapiens
ccatgagctaacacaccaagtaatctgttgtgttcacaaatgtccaagagaataacaagagattaaagaaaggtaaatacagccacctggcaaaaatatttacccttttaaaaatgatggaagttatatatagaagaaatgtttttggtaaaaatatttgaaagtttgttttataatcataagtagcttgggctattttgactagaggggtgtgtgtgtatgtgtgtgtgtgtgtgtgtgtggttggcagggagagaaggagggaggcaggcagctggtagggactgtggagtgtgtcagttgggagagggaaatgagatgattaagttagtaagaatagaaaacatgtaggaaggcggatcttgaaatttcagggctattcattagtcattagttgaagatttcacagagaaatggtagaaaccaccagtaattaagaaatagcattattgttt

SEQ ID NO: 240788 - DNA, 370 bp, Homo sapiens
ttctgctaacagggcaggtttagaaaaacaaagatacagcaacataagcattgggctaaacttacttgagagctttggaaaacactgaaaaagtattagttttgttcatcaaatggtataatctaaaatatatcactttcatggagctgttgttagactaacctgactgaagattttcttgaatatattacattatttctggataataattctttatgccatgtcagtattactttcttccccttggcctttacctacccctccttgttggttcctcttcaaacataatggaacatacctttctgctttctttaaaaatcagtcagcccttctcaacctccaattatcatgggtgcattgctatgggttg

SEQ ID NO: 240789 - DNA, 274 bp, Homo sapiens
atttctcatgttctcttcccagccaatgattgaacatggtggcgttcctgcaggacctgggtctcctcaaccaggagatgctgcctcaagaactccccagaagcctggctgaaactttcttggaataaggctacagtctgagactcttcctacttaatcctccttcacaggggtcagacctacatcatggtctgatggttttcccagcgttgttggcttcttccttcttctccttcacaggcagtgccctcaataaatgctttgctcatctaat

SEQ ID NO: 240790 - DNA, 174 bp, Homo sapiens
cacaaagagttggatgctgaagccttgagatcgcatgataggccacaggggcacccacgtggagtgggcaggcagggcagtggcgggacaagccacaggccagcagctccctgcattggtggatttatggggagaggaaagggatccgtgagtggagagtggagccgatgggaa

SEQ ID NO: 240791 - DNA, 1849 bp, Homo sapiens
  misc_feature (602)..(602): n is a, c, g, or t
aattgcaccactgcacccggcctgggttaaagagtgagaccctgtcagaaaaaaaaaaaaaaaaaaagtcatttcataaaattgttggaaaatatgcatttctgaaggagaggcgtcagtgtgaagaacactcatctgaactaagaatcagaaaatggatctgaatttcagctttgctattcattcagtgtccttaaataaatcatgcaaccttgcacatcattttcttatttatacaatgaaagcattggattgatcattgctaacatttctctctgctctaaaactgtgatttttatcctttgctatttgcaagaaccagaagagataaaggttgccttttatgttagatttgattctaaatctaatgatataggacagcggtgcttaagctatttttgtgaagtgataaggaaaaaccctgggaaaggttcagtggtggtttgcacagctgattatttgttatgattaattgttccacttttattttcttttgtggcctgtaacctaatttttcacttagtattgggattattttagtacaaacaagtgatatatttgtaagaagggatccagagagtatggtaaaatgtctggatgcngatgttctctaagttaaaggagattctagggggtagtctataataaaggaaaaacacattttttaaggttttaatttttcagagtgcagggaggtgctaggtgctttcctcacattaagtataacatttccttttacagtatgtcagcatattgttgaagttttccaatatgaaaataatatctatttactagcatattaaagcttagcaagagaattttaatagcctcatttagcctcctaaacagtcagaggcagggaaatattattagagtaacaacactgtaggtgctctcttttgtctctagtagcaaaatgaattctggctaccatgtactgtaggagtgctgctggcttgaggctcctgagatctggcatggctgttatactgacttgttttctttcaaattcatgttagaaaaatctgtgcgtgtgtgtgtgtgtgtgtctgtgtacacaaatatttatattaccgtgtctcagtgctttgagactgtgtgaggcgggggaagagctgttgaggctttttatagataaagttgataatgcttttttgacttggttttctgttaccatcttttttgtctctattatgatatctattatataagtcagaaggagaaatgacacaaatgccagtataccagttcaagataggatcttggtttgatttagctaaaatttaccctacttattggtgcaatttttaataatagaaaaccattcctcattgcttggaatttttatctgcactttccattttgaatattattgttagttgttgaacaccaggtttactctgcaggacaccaagcaaagctttagaaatttctgccatcattaaaccctgaacagactgataagcagcaaaattgaatcagtttaaaaaaaaaaaaaaacttgccaacaaaaaaagtccaggaccagatggattcacagctgaattctaccaaacattaaagaagaattggtaccaattccaaaagattgagaaagagggaatcctccctaaatcattctatgaagccagtatcactctgataccaaaaccaggaaagaacatttaaaaaaaaactacaagaaataataaataaataaaaattaaaaagaaaactacagaccaatatccctgatgaacatagattcagaaaacctcaaggaaacactagctaactgaatccagcaggacataaaaaagacaatccaccatgatcaagtaggtctcatcccagggatccagggatgatt

SEQ ID NO: 240792 - DNA, 613 bp, Homo sapiens
cttccctgcttcgaaacaggccatctgccccttggtgttgagtatcccagtagccattgggttctagaccaagctggacacagtgattcttgtgattcaaatgtttctcctcaactgaaaaagctcagggtgtcttttggactgtccctcaaaacctagctttccactaattagtgaagcatgacttttccatgccatgtctgttctgggaagtttcctcttcatcgtggccttgggccccagggaaatttcagtggatgagcagaagaagtggaaaaggggatgaaaagtcaggtggaatgacatcatccatcattatggcatcatcacagctcttacatcattgtcatcatagattgtcactgttatggattgattttcttctgattcttggtatccatttcttcacatgtgtttaaaactcttttgactgactgcttacctaacagaagtttcttgtgttgagttcctttgccagataaaaacaaaataaggctgggtacagtggctcacacctgtaatcctagcactttagaaggccaaggcgggcggatcacttgagatcaggagttcaaaaccagcctggccaacacggtgaaaccccgtctctatt

SEQ ID NO: 240793 - DNA, 290 bp, Homo sapiens
aagggtgaaggggttgaagtggggaggatgaggagaaattggttaatgagtatgatgtatattatttgagggatggataccctaaaagccctgacctgaccactatgcaatctatgcatgtaacaaaattgcagatgtaccccatacatttgtataaataaaaaggaaaataaaaatatgtgccttcttgtgatcagttttattagagggtgccttatcactgtgtggtcaaggaaattctgcctttacagttataaacacacccaccactttgaacagtgtttagttga

SEQ ID NO: 240794 - DNA, 580 bp, Homo sapiens
agagtatcaagtttcattctcacagaccttcagtttagtttttaactctctatcttaatttgagaatgcaaatgaaactacctaatagccaaggctacaaatatataaatatataaaaagttaattatcggccatattcttgtactaactagtccagtggaacgactagcgagttctggattatctttgctaatgaaagatctaaaattgtcattttaatgcctatattctttgatgaaaagaaatatactaattcattagaacttcagtgatagtacagaattcctgaaattgcgttgcttttggttttgaccatttaatcatttttgttttgattatgaacattaaaatactttccccttagcatatctgtataaggcacaatagaaataaagtgcagataatttccccttgctttgtggaacagtgaattatagctcaagtctgcaaataaattctatcttccatcttttattataaaattagaggtatattcttctagaagtctagtagtcatcatttagtagcagctctttcgatatgtggaaattcatcttttttgttgtcattttttaaagaa

SEQ ID NO: 240795 - DNA, 414 bp, Homo sapiens
acccagggcgctcctgtggttcacctgtgtgaatttcatgagttttgacagcatgtacagtagtacagccactgccatattcaaggtgcacagcaagggagtcctccattgagacacagtaaaccggccgggcacggtggctcaagcctgtaatcccagcactttgggaggctgaggcgggcggatcacgaggtcagcagattgagaccatcctggctaacacggtgaaaccccgtctctactaaaaataaaatttaaaaaaatagccgggcgtggtggcgggcgcctatttagtcccagctacttcggaggctgaggcaggagaatggcgtgaacccaggaggcggagcttgcagtgagccgagatcgcgccactgcactccagcctgggcgacagagcgagatttcgtgtca

SEQ ID NO: 240796 - DNA, 474 bp, Homo sapiens
gaggttctgttataattgggtatgaggtacagtacattacggataaagagtgagattcaggatgcctttgatttgtgtagtattttacattcttatgtgcagcatctatctgagcttttttaggtaggtaggatagaaacaatatccccatattatggataaggaatctgaggatcagaaaggtcactccaggccaggtgcggtgtctcacacttgtaatcccagcactttgggaggcccaggtgggtggatcacctgaagtcagaagtttgaaaccagcctggccaacatggcgaaaccccacctctactaaaaacacaaaaattagctgagtgtggtggcatgcgcctgtaatcccagctactggggaggctgaggcaggagaattgcttgaacctaggaggcgaaggttgcagtgagccaagattgcaccactgcactccagcctgggcaacagcatgagactgtgtctca

SEQ ID NO: 240797 - DNA, 467 bp, Homo sapiens
tgtcactaaaccagacattggcaaatgtcagtccttttatggaagtaccagccttgagctaggaggtctcctaggcccggagatcctcagcagcccactgtcaataggtggttgttatcagttccagtaaacatttttaaatatcctggaaatgcctcaacagtggacctagatatttccctttcagccggtaggcaagagtcggtatgctctttgaagttttgcggtgttataagacactcaagaaaaatgtgtggtaaagtattctaggtatgtttaaattgtcagttattgcttattctgtttgtgccttcaaagaatgtttttgttaaggaagtcacagggatttgacttacttctccctgactgaagagaatagtggaagactgcctccagatttgaaaagaaattagtcacaggttttttttgtgtgctttcagcctggagaacagacgcctttccaccaa

SEQ ID NO: 240798 - DNA, 472 bp, Homo sapiens
aatcatctttgtcaacaccatcacagacacacccaggaacaataatctgcatccttcaatccaatcagattgacaatattaatcattacacaccaggatcaagtgggatttatccctagaaagccaggatggttcaacacctgatgcaaatcaataaatatgacaccccattttaacagaataaaagataaaaaacatgatcatttcactaagtgcagaaaaagcttttgacaaaatttgataattcatgataaaaaacactcaaaaatttagggatagaaagaataaagtacatgcttattgctatagaactataatttcataataaaggctatatgtaataagcccagagctgatatcatacttatcagtgaaaaaccaaaagtatttatgtcgtgagcaagacaatgatgcccactctcaccatttctattaaatataggactggaagtttttgtgaggcaattagaca

SEQ ID NO: 240799 - DNA, 292 bp, Homo sapiens
taattcaaatgttgacatctcagcttgggtcttcaataggaattttaaatttaatatacaaaactaaattcattttctttcttccaaatcttctccttcaataaccaataacctttcccatttaggaaaaagaatatctatccttctagctgctaaaactaaaaacttaaaggaatcagtttctcttctattttcctcatgacccatatcagcaaaatatgttggttttgtttttaaaacatttccaaggtatggcttctcaatacccctgatgaaccatcattatctcttg

SEQ ID NO: 240800 - DNA, 777 bp, Homo sapiens
gcccatgacccacctaacaagggaaggacactgtggatcacacctttagcaattaacaaaattcctaaaatcaagtagatttggaatcttaaacccctggtccaaaaatccaagattgagaccactgacaacatatgatatttattattattattgatactttttccttattttcttggatatcaaagggaaattataatttcaacattagtgctaatcctacaaaaattacagtccatcgtgtgtaaacagtcaaggagatggttccacatataaaagatcaaaactacaactattatcatcatggtgctgcccacagcgtaaacctgctacagaagattagaagacttgggacccagctatgaccaacattaacatcgtcatggcaaaagcaccaagacaagaggtggacagtaggaactctcatttctcacaggcccttagacattctgcttatggccagtaatctctttattccagagaagcaggctctgataatcccaaacatgaaagacaaaaatgtagccaacagaaccagaaaggcatatcctacatctcaaactggcaacagaatgaaaactgaacctgagaggccaaatggtaaaaagaataacaaaaggctcagaaactgcattgttgcccattctaaacggcattgcaacttcaaacattgcacattctggcatgtggtgtttcaggaaatctacaaaagactgccccaagaggtaggtttataaatacaagaaaaaagattgtttatcgctgtagttttcattt

SEQ ID NO: 240801 - DNA, 455 bp, Homo sapiens
cacgcttagcatccccagaagaagccagagctcattagcagtgactccgcccatatccccacagtcccttcttcccccagcctgggcacccactcatctgccttctctctttggatttgcctattcaggacatttcatgtaagtagaatcatacaatatgcagccttttgtgtctagtttatttcacttggcatgttttcagagtcccttcatattgtagtgcatatcagtgctcaattcctttttatggccgaacatttttcccttgtacagatgggccccattttgtttatttatcagttgatggacatttgggttgtttccactttgggctattatgaataatgctgccataaacattcatatagaaatttttggggtttttttgggagacaaggtctcactcttgtcacccaggctggagtgcagttgtatgatcacagctcactgcagct

SEQ ID NO: 240802 - DNA, 625 bp, Homo sapiens
tctcacagatgcagttcctgcattagtattgataaatgtgtggctgctccacttggagtgttttcaaagcataaatcacagcattgatggtgctgtggtttggctcttccagccctcttaacaacggtctgatggacttggcgagagtctagccacgtgttctggcctctgtcactctcatggctgaaacgcatgcacacccacagatgggggccccgtggtagagatgtgcctctacttgtcaaatagactgactccaaattcggaaatatgcctcaggaatctagaaagatagaaaaggagtcttcgtcactgtagggtctcattcacaatatggaggagagatggaggggagtttttggtataaattttgcctcataaaaattctccacgttgttttgtactgtatgagggtagcgagaaattagttgatggttaacaatcaagctggagaagaatatcctcaatttttcacatggaaaatgaaaaactacaactccttccaaatatatgtatgtttcttttctgaagatagacgtgtgtgtgtttgtgtgtatcatataacatttattttttgatttctttgttatcaacagtaaaaatacagaaaatgatgccaaagaga

SEQ ID NO: 240803 - DNA, 380 bp, Homo sapiens
gcgggcacctgtagtccccactccttgggaggcagaggcacaagaatcacttgaacccagaaggtggaggttgccatgagccaagattgtgctacaattgtgtggcggctcatacctgtcatcccagcactttgggaggtcaaggtgggcagattgcttgagctcaggagctcaagaccagcctgggcaacacagcgagacccccgactctactaaaaatacaaaatgatgagctgggcctggtagcatgagcctgttatcccagctactggggaggctaaggcacgagaatcgcttgaaccccagaggcagaggttgcagtgaaccaagatcgtgccaactgcattccagcctgggtgacggagtgagactccgcctct

SEQ ID NO: 240804 - DNA, 157 bp, Homo sapiens
aacattctgaagtaggagaacttgttgccacaaaggagtctgatccttctccacctcaaagcccgctgggcattgctctgaacctgcaggattccaggggaagagagcaataggcacatctatgaccaggcagactcctgggcaaggctagatcttt

SEQ ID NO: 240805 - DNA, 1217 bp, Homo sapiens
gtccccaccgcctccacccccgccaacctcatcatttttctccctctttcctgctgttagttcttcctaggattgtcagtgtgcctgctggcctgtggcagccctgtccgccttctgagtgattggctgtcagtctgccggtagctgaaaagtaaataacttaacatgttagaatttgcataaagtaaggaaaactggagctgagtacaggacttgaactgcgccatctcctctaggccacagaggcctttttgacccccttccaggtctttagacattgtcaggcagtgaggggtcgtagctgccagtgtctccatggtagcgtgctctgccagggatgcagaagattctccagtcattcctccagtgggcacttcctgcaggtcctgtgcccatggctgggagtggtggctgtcattgttctctgccagaagggttagcagtgcatcctgacctgacttatgtggcgcccagattcctggaaggggtctaaaaatggacctagacttggtgtagaacgtgtgcctcttggcctgccaccatggttccctgcctggttttgtgtgtcagctctgccgcttaagaactgagtggcttcgggcaagttgttctctctcataggagtgtgtgaagatgaagcaacataatgctgctgtaggccagcgcccagtacctcacgcagacataagtgctcagtaaatgttgtctgtggtggggatggttgtcaccaacatctgaagtgcacttctaggtcatcaggtgacatgattggcgccaacacatggtactcttgatttagcacatctcagctgaggcacctcattgatatttgtttaaaaacaaaaacaaaaaaccttggtgattctgctgtgaagtcctggccagaaacctccagaccgctgatcaacacgcaacagaaccatcaccgttcacctctttgacatggtgccaggataccctggatctctagcttttgctatagttgctctaattagggaataatcttgtctttaatattcctttgctacattttttaacatttcttatctaaatggttttatgaatcagttttacagagaaaaaaaaccagtatttaaaatattcttccaggggctggtccaagtacagtagtgtttacaactatgtgatcacaaccagttacagatttctttgttccttctccatccccactgctttacttgactagccaaaaaaaa

SEQ ID NO: 240806 - DNA, 547 bp, Homo sapiens
atttagtttgtagcctttttctataaaatcgtgaacttgcatatctctcaattactttaaagccctcaaaaatcctacccttccatcttcatcttctctgctaaaatcagaatcttcaggctagcaatggggcacacaaggacaattaatcccacgtaatcactgcacaccatgtaaataatcagctgtcattttctcaactaaattccctaattaatacaataatcaaaacagaactttcaaaatatgtgtttaccttttgaaaagttaaatatcttgtgtaagtattgtaaagatgctcttaatgggaaaataactttaaaaagttatgatctagtatgtaataattttataataagagcatgcattaaatattataaaagctgaaagattttaagtttagggtatgtgcatttatcacctttaaatttataacttccaactgtaagcctgaataagatataaattcatttgtctttgagtgaattaaagtaaaatggtttattttgatcattaaactttcatatgatttacaacttcttggcaa

SEQ ID NO: 240807 - DNA, 343 bp, Homo sapiens
ggacaagcttagctttttcatcattggagaattcacacaaaaaaaggaatgagcttggacagatcgtgggagaactttcaggcactaatcaggccaattcatccccgagaaaaaccttgatgacgaagaaggggaaaaagtcttccagtttttttccttattggatttcacagaatcctcagtgatatatagagaaacttgctggaggagttcagggtttattaatattcacattaaagcattaatcccattaaagtaggggtttaaacttttttacttctttcaccccaatcaaagctttcattccttacatctctattgagtgaatgaagcaacaggcaaa

SEQ ID NO: 240808 - DNA, 246 bp, Homo sapiens
cacagggaccgggtgcaatggctcatgcctgttatcttagcactttgggaggcctcaagtgatctgcccaccttggagtcccaaagtactggaaatataggcatgagccaccatgccccgctgttttctacatttcttttatatgtaaatttctgtcctgagcagatgattcacttccagagaaaaggatctttgcattccctgctgtctggcattgtgcataataaatatatactggcaaataca

SEQ ID NO: 240809 - DNA, 481 bp, Homo sapiens
agagtcctaacctcccacttgtcttgattgatttttacttttttaaagtccttgaattcttcctcaagtgaaatctcaggtagaggtgcaatatgtaatacagacaaggtgcgggtttactctgtcaaagctgggataggaggcctagaccatgattctcaaattttattctgcatcagaatcacccagagggcttgtgaaaataaatggctatacaggaggaacgagttgaggagatgtatcgtacatcatggggactatagtcaataacaatatattgtatacttgaaaattgctgagaatagatttcaagttttctcaccataataaaatgaaagtatgtgagttaatgcatatgttaattagcttgatctagccattccacagtgtatacacatatcaaaacataccataaataccataaatacatacaatttttgtcaattagatatgcattttttaaaataagaggaaaaaacta

SEQ ID NO: 240810 - DNA, 518 bp, Homo sapiens
gagatggagttttgctctcgttgccaaggctggagtgcaatggcacgatttccgctcactgcaacctccgcctcccaggttcaagcaattctcctgtctcagcctcccgagtagctaggattacagaagcatgccaccacgcctggctaatttgtgtatttttagtagagacggggtttcatcatattggtcaggctggcctcaaagtcctgacctcaggtgatctgcccacctcagcctcccaaagtgctgggattacaggcgtgagccactgtgcccagccggaacagacatttttacggagccaaagccttcaatattttcttttgcgatcccttccattgcttttagcttacaaatccttctccattcagaaatctaatatttacctattttcttttaagatgctgtaatctatcttagaatcatttaatctgaagttatgcagtcaggctattttttttcttttttctttttctttttctttttcttttttttttgatggagtctcactctat

SEQ ID NO: 240811 - DNA, 582 bp, Homo sapiens
acagacacatattctctagctcatttttctcttctgagatgctaaaccatacccgctgggtatcagcagtagtcctgtttgttacctattctgtcattgtggaatggaatcagaagctggcaaaggagctaattcttcatcctttctgcatcatggatgtcccattctttgttgatattccttctttaatacatccatagacaaagcccatacccaatgaggacagatcattaaccacctgttctgcctgggagctgatggcagcagcagctgggttgatcttagttggagggaatggcagaactgtacatttcttggggagatggtgtcaccttggactctggaaatgttagaaagattctaagtaagttcaccagtagctgggctgttctatcatgagcattcagacatctgatggatatgccaacttgtcaggactggtagctgaaaaagtttgctctgaatgccattactgattttttcccaccccctatctccccaccctttggccattctcttaaagccagattctaatctttctttgaaaagggtatttctcaaaagaaatgttttctccctctg

SEQ ID NO: 240812 - DNA, 430 bp, Homo sapiens
aagaatccgtctcaaaaaaaaaaaaaaaagcagcaaatcaacatggtacatgtatacctatgtaacaaacctgcatgttgtgcacatgtaccctagaacttaaagtataataaaaaaaaaataatctaagttcatggggggggttgggtggttctgagggaattgatggcaagaaaacataccaaagatatagagtatgatatgggcaaatactgatgatttgaatagataactagagatggtgacaggtgccatgttttgagactattctctataacgaatattgtgctaaacaccttaaatacattgtgtaatcacagaaacaggaaaaattaattctgcctgtaggggttataagaaaattttctgagtaaaagatattaggggatggaaaatggggaaataactaaaataagctaacaataacaac

SEQ ID NO: 240813 - DNA, 509 bp, Homo sapiens
aaattgccacagccaccccaaccttcagcaaccaacaacctaatcagctagcagacatcaacatcaaggcaggaccctccaacctccagcaggaaaaagattaccacttgctcaaggcccagatgatcattagcacgttttagcaataaagtattttttaattaaggaatgaaagtgtgtgaaccgtctagtggaacggtgtgaatactatttcaatagtgctgttcctgcagagctgtctttctctaactgatctgagaaatgatggagggcaagacagagacatgcacagggagaacatcatgtgacaacaaaggcaaagactggaagttatgcagctgcaagccaaggaacaccaaaaattgctggcaaactgccagaagctaggaggatgcaaggttagaattccccaagtctcagagggagcgtggacctgcccacaccttgattttggacatgtaacttccggaaatgttagacaataaaatgcagttgttttaaaccatcca

SEQ ID NO: 240814 - DNA, 608 bp, Homo sapiens
aaattgccacagccaccccaaccttcagcaaccaacaacctaatcagctagcagacatcaacatcaaggcaggaccctccaacctccagcaggaaaaagattaccacttgctcaaggcccagatgatcattagcacgttttagcaataaagtattttttaattaaggaatgaaagtgtgtgaaccgtctagtggaacggtgtgaatactatttcaatagtgctgttcctgcagagctgtctttctctaactgatctgagaaatgatggagggcgtatctaaaaaacgatgagacttggtgctgaaaaccagacttcagcctccaggagaactggcagaagcaagctggtcagcgagaaacaggaccaacaagaagacagagacatgcacagggagaacatcatgtgacaacaaaggcaaagactggaagttatgcagctgcaagccaaggaacaccaaaaattgctggcaaactgccagaagctaggaggatgcaaggttagaattccccaagtctcagagggagcgtggacctgcccacaccttgattttggacatgtaacttccggaaatgttagacaataaaatgcagttgttttaaaccatcca

SEQ ID NO: 240815 - DNA, 514 bp, Homo sapiens
agctggaaaatcattagaatggcatccggtgccatttccctcactcctgcctgcacaagcatctggaaggaagagtgcttggttgaagagcaggcaggcggcaaggatgacaggaggggatgcccaccggagtgctggcaagtgcaggaagtggaaccggaggcccagagttctagccaatttcaggagggtctctatgggaatcctagggctgctgcataaatcaattacatagcccagtttaaacatcatttttgcatctgatagtaataaatgaggaagggaattgtttctgtattcactgagacaatttgtgtttccctgaagagttttaagggcaacatactaaatgacactaataaagtaacaactatctgcattatttaagctgcattaagaccagagctcaatattttaactagtagcctgctgtccttgagtgtttaacaaaccggagagaaacagattactccctggtcaaaacactgcagaggcttcatgtcacactcaggaa

SEQ ID NO: 240816 - DNA, 398 bp, Homo sapiens
ttgctgaatttgttagctctagcagtttgttgtggattctttggtattttttatatagagagaatcatctgcaaatacagataggtttattcttcttttccaatttggatgccttttctttctcttgactaattgctctgttcagaacttccagtacagtattgagtggcagtgtgaaagtgagcatccttgcctcgttcctgatcttaggggggaagtctttcaccatggagcatgatattagttgtggattttcccataaatgccctttatcatattaaggaaattcccttctatccttaatatgctgattgttttgatcatgaaagagtgagcccattttttctaaagtgaaagtttggctcaaagtaataaagtgctgacctgaaagaaaaaag

SEQ ID NO: 240817 - DNA, 381 bp, Homo sapiens
aaatagttccacatggcttaaaatgcaaaacacgcttccctttcactaccctttggtgcttcctaaaagccaccattctcaactcttttagctcttcccttagctattgatttttgtatttgttaaaaacatgctcttactgctgtttgttgtttttcagtttgagatattatattatgattattattattaatattagagacagggtcttgctctgttgcccaggctggagtgcagtggtgcaatctcagctcactgcaacctctgcctccccggctcaagcaattctcccacctcagcctcctgagtagctgggtgccgtgttactaactctagtatgtttttgtgtcaatcgctgtgaaataaagtttgaaaacttta

SEQ ID NO: 240818 - DNA, 340 bp, Homo sapiens
agcttggtaggaattttcatgggactcatcattcagatactatggatcctgcaatcatcaccaggcaaatatttcccaagcatatcctctgtgcaggcaccaagctctgggctgggaaagaaatgtggacctgatgtgctccggcctccagggggcgtggattttaagccggtggttttcaatcccctccaacccagggttggtgcacactctcagcaaaatagttttcagcatgcatctccaatatatgtacagtttaaaactgataaataatatgcatatgtactgctatttcattctctttgtaaatctttaaataaaaattaggaaatttaaggcc

SEQ ID NO: 240819 - DNA, 596 bp, Homo sapiens
ttataaataaaaataacttcacaatgaattcagttaattaataccacctgagtggaacacagaaataagaacaaatcctgcacagagcagcacaaggagaggtaccctcaccataggggaaggagagtgaaatgagcacccccagcactggacccatctcagtgccaggctggtcctcacggtcccaggttacaagttcgtccctacaaatccaggatccagacctgccacagcatcagcctggcccttgaagccccaagctccaggtacacctctgcaaactcaagctccaggcatacctcagagccaggctggccttcacagccttcacaggctggcttcaagcctgccctaatgtcaggcaagtccctgtggacccaggctccacactggctcctgtgatactaggctccagtggacccagggttgaagcccgcttcagtaggcttaggggccatgcgtaccctatgagatctgagtgctggcctgtccctgtggacttaggctccaggcccaccatgaactgactcacacaccaggcaagcctgcttgctagctcacctagctggtttgctcagactctcttgatgggatga

SEQ ID NO: 240820 - DNA, 364 bp, Homo sapiens
atatttatagcaattggatggagtcattttatgtctgttgaagctgataataataataacaataataataataataaaacttagctgggcgcggtggctcacgcctgtaatctcaacgctttgggaggccgaggtgggtggatcacaaggtaaggagtttgagaccagcctggccaacatggtgaaaccccgcctctactaaaaatacaaaaattagccaggagtggtggtgggtgcctgtagttccagttactcaagaggctgaggcaggagaatcacttgaacccaggaggcagaggttgcagtgaaccaagatcacaccactgcactccagcctgggcaacagaggcaaggctctgtctca

SEQ ID NO: 240821 - DNA, 404 bp, Homo sapiens
taggggagggatagcattaggagaaatacctaatgtagatgacaggttatgggtgcagcaaaccaccatggcatatgtattcctatgtaacaaacctgcatattctgcacatgtatcccagaatttaaagtataatttaaaaaaaaaaaaaaacttgcaaagtcaattcaccagtctctcaccttgaggaactctttggaatcaataggaacagagtagcaccagcccagtgtggcagtgcagagaggagccggagaagatgcctgccctccccaggaagccatagagggagatttgctccagctcacaagttgaaattcttcgttttgaggaatttaattatggctaacagcgaggattaattgctttatactgtgttagtataaataaatactttcttcatt

SEQ ID NO: 240822 - DNA, 290 bp, Homo sapiens
ctgcccattgttaaaagcgctgtgaactaaggctgggcatggtggctaacacctgtaatcccagtgctttgggaagctgaggcggtggttcaactgaggacaggaattcaagaccagcctgaccaacatgatgaaaccccgtctctactaaaaatataaaaattagacagacatggtggcgggcgcctgtaatcccagctactcaggaggctgaggcacaagaatcacttgaacccgggaggcagaggttgcagtgagctgagatcgcatcatttcattccagcctgggc

SEQ ID NO: 240823 - DNA, 480 bp, Homo sapiens
tgacttcctcagtcactgactcacaaacatgcaccataaactcctgccacagttcctggtatttaaaatagcattttggccaggtgtgggggttcatgccacccaacactttgggaggccaaggtgggagaaatgcttgagcccaggagttcaagaccagcctgcacaacatagcaagaccccatctctacaaaataaaataaaatgaaacaaaaatagcattttgtggaaaactggagtaacaagaatgtacagagtaagaaatacacttgtctgtattacaaatgaatagaattctggtatctaaggaaggaaatctctaatcagagccatagagaccagaacataaaatctgttacacaaaaaatcttactgctcattgcttcctaattctagtcataaatcctcttaaaggatgtccccaactttcatttaaaaaacacaatacaagacaaaagcaaaaaaaggaaaaaaaaagag

SEQ ID NO: 240824 - DNA, 512 bp, Homo sapiens
tgagccaggggcataaacacctcaactgcactgtccttcctgcctcgagtctcctgctagtcagtgctcaccactgatcaaaccaactgaagctagaggccgaggaagtccacgatgtggcccatacatgtcagcttcccaggcaggtggagaagagtggaaagtggatctggggaggaaataagaaatatccagcccctagacttagtggccatttttaaaattaaaaaccaacacatgacctggtgcggtggctcacgcctgcactcccagcactttgggaggccaaggtgggccaattgctcgagctcaggagttcaagaccagcctgggcaatatggtgaaaccccttctctacaaaaaatacaaaaattagctgggtgtggtgactcactcttgtagtcccagctactcaggagactgaggtgggaggattgcttgaagccagggaggttgaggcttcagtgagccacattcatgccaccgcactccagcttgggtgacagagccag

SEQ ID NO: 240825 - DNA, 375 bp, Homo sapiens
attaataaaccctcaaagatctaaaaaggtgaattaactctcaggggctttaacagataaattaacttgaacctgcctagttgtctgtttcagagccagaattcgaacatggattcattttagccgcagtaagcacctgtgttagtcagaattcagtgtgggtaacagaagggcaggccagattggagagagctggaaacatattccaggtagagacaatggtgcctgatgaagcctaagggtctgaatgctggagtaaagccaggggttatttacactgtgactgggtgtgaatctacagatagatctgaaactagaagataagcccatgaaggaaatgggaaaatgtgccctgattttgagttacattagcaa

SEQ ID NO: 240826 - DNA, 491 bp, Homo sapiens
ctcttgtcgaagctatccagtctacggtattcgttatggcagcctgagctgaggaatacaccacacattaaaaaagtaaggactgtgtgcatttgggaagaagtcatctagtcctgcaattagatttgggaggcaactataatgcataaacagtttctgaatttgtgaatttcctatttctttgcttcagaatagtttgacctttagacatacaggctcacagattgctgaaaaatcacaaggtctgtgatgaagctgtgaaaataattgaaaggatttgtttttctaaccctggctctatccatctgattacactgtaactaatatttgctgcaaaacctgtggacaaaaattattcataaactgcaaagaaattgcacagccatgaaagaaatcagtgtgttaaaagggccatgttttctccctctaagcaatagagaatctgtgagacactttgttgtacaataaataaataaataaaataaaaaaaa

SEQ ID NO: 240827 - DNA, 675 bp, Homo sapiens
ttttccaattttaactctcttggacagaaatctttacttctatacatatactgcctttcattcttgaacaaaaattttaaaaataattctattttaggattcagggtcattatgaaatccattcataactgtgcaacaacactttgagatcttcagagaatactgtaagtagggaacaacaattagttttacgtagctcaaatacagtatatgtgggaaagggtgggagactgggctaaacaagatagtttggaggcagactaaggaatttgatttttatttcaggaggcagactaaggagtttgatttttatttcaaagagtaagaacttatccttttttggtgggtaaatgaaatgaacagatctattttccaaaggccacaaatgaataaaatagagtgggaaaaaactggaatccaacaagaagctctagtaagaggcaacagatcaatggctgggcgtggtgactcacacctgtaatcccagcacgtaaggaggccaaggcaggtggatcacctgaggtcaggagttcgagaccagcctggacaacaaggtgaaaccccatctctacctgaaaaaaaaaaaagaaaacgataaaattagtcaggcatggtggcatgtgcctgtcacaccgctgcactccagcctgggtgacagtgcgagacactgtctca

SEQ ID NO: 240828 - DNA, 467 bp, Homo sapiens
tgattcacgtcataccctgtcaccaggtgagggtttctgtctgtgtacctaccctttttgtgtatcctttttcacttattcattaatcacattatttgagtacgtgcgaaaagatgggatatttgaattgtgccctgggagattattagtaactacacaataatggcagccaaaatttattggacgcttcctacacttaagtgctttgcttgcttcattaatgaattcactcaaatatttattgagcaccttttgtgtgcagggactcttctaagttatgttcctcaagtagattatataaataacctattaaatgattttggaatcaaaaaaggataaaaagaggccgggcgtggtggcttacgcctgtaatcccagcactttgggaggccgaggcacgtggttcacctgaagtcaggagtttgagaccagcctggccaacatgatgaaaccctgtctctactaaa

SEQ ID NO: 240829 - DNA, 518 bp, Homo sapiens
tcttggcaattccagagatgggttcaaagtaacaagacgaaatttaataaaataaggtttaagctctaacaagagttacaacaaatagctcctccattacaaaatcagagacctggaaatctcagtttacctgggccaacagtgtgacatgagtgctactgtggtcccagccccatcaatagaaatacagtgtccaaaaaataggaggtcacactattctggaaggtgaccagtatgaggaacaatctgggaaccaggtaactttagaaatgactagagcaactgcagatgttgagcttgaacagatggctggtggaggggcactccttagaacattgcaggaacaggcttcagttcaccctctaaagggcgattgggccttttctgccaaattccacagggtgcacctaggactaatggttaaagtcaaagcagagtgaatttggttccatgttcagaagaattttaccatcctcagaaccaatttaaaataaattgcattgctttgtacattagtg

SEQ ID NO: 240830 - DNA, 201 bp, Homo sapiens
ggtttctaagaactaagaaagtattactgtggggaactcagcaggtggctgcctgcgaatgaagctcccagagaggaaaatgttctcgagagagggagagaagcagtttcctcatttaggtcaccagatctggctgtgcctaaagcaaggcctggatatttcaattacaacagccaaataaatttccctttttcgcttaag

SEQ ID NO: 240831 - DNA, 454 bp, Homo sapiens
aaaaaattgtgactcactttattccaatatttgctttatttcagtggtttagaaccaaatccacaatatctcaaaggtgtacctgtaaatacctgggcaattataaaagctagtattattgtaacaatgatttgtaactccagtttttgttttctccatgatttgagagacttatacgttttaaaaattattagtctaaaaactaatattattataactttggtttgtgactccacattttgttttctacataatttaagagactcatgtattaaaaagatttagtttatgttttggcacacacaatgtataaggatgtaattttgttatatcaacaaccagaaggaatggggacagaactgtaaagcatagtttttatgtgattaaagttgaacttgtaaaaattcaaattaaagcattataaccttagaatgttaaatgtaatccctatagt

SEQ ID NO: 240832 - DNA, 525 bp, Homo sapiens
tagttataagaatcttgaacaggtatttcacaaaacaagagatacaagtggcttataggaatgtgaaaagatgctcagtgttattagataaggggaaatgcaaccaaaatgcatcgaaactggaaagactaccatttaaaatgataatactaatattggcaaatatgtggggaaactagaagtcgtgtctatttcttgtgagagtgtaaaatagaacaactggctgggcgcggtggctcatgcctgtaatcccagcactttggggggccgaggcgggcggatcacggggtcatgagatcgagactatcctggctatcatggtgaaaccccgtctctactaaaaatccaaaaaaaaaaaaaaaaaaaaaaaaattagccgggtatggtggcgggcgcctgtagtcccaactaatcaggaagctgaggcaggagaatggcgtgaacctgagaagtggagcttgcggtgagcccagattacgccagtgcactccagcccagacgacagcgcgagactgtgtctcaaaa

SEQ ID NO: 240833 - DNA, 551 bp, Homo sapiens
cccccaaacccataaccacagttgaaccatgagaaaaacagcagacagaccccacctgagggacagtctacaaattacctgaccaacagtccatcaaaagcaaggaaagtctgagaaactaccacagccaagagcagcctagggaaataagatggctgcatacaatgtgagagaccctgtggaacagagaaaggatggtgggtaaaaactaataaaatccaaataaactacagagtttagttaacaataacataccagtgttgtggaaaatgtaccgcagcaatgtcaggtgttaacaataggagaaactgggttggggtatatggcaattctgtactatctgcaaaacttttctgtaagtctaaaactattctaaaagtttacattttaaacagtgagtcatctgtctgggctttaggtaatcctcaaaacctagctatctttgattccccttttttgccatttatgaaggatttgagcttctgatgtggggggtatccaagcccctagatcccaacctcatttccataggaagaatcatcattttcaag

SEQ ID NO: 240834 - DNA, 318 bp, Homo sapiens
ctttaggatatccaaaatgagcaaaaacttcagtctctagcttttccttaagacaagtttctccctttgctacaaacggaatcacatctttttgttatgattcttcctctatggtccagtttgttgaacattttgccagctgtttctaagctgaactttggcttaaatacaattgcagtcacactaagatcattctgttttgagcccagagcatagagtgtaattttgatagaggaaggggagagttaaattacgatcagctctagtaaaaggtaacggcaactcatgggtgggatactttctggatgaagtacttca

SEQ ID NO: 240835 - DNA, 425 bp, Homo sapiens
cttccatagatattaccttcctctcctccattccaaatccaaaggaccattctcttaagtaatgaaggccttacagggtgatgaactgtgaaccccaaacatctgagacaggtctcggttaatttagaaagtattttgccaaggttggccaggcgtgctggctcatgcctgtagtcccagcactttgggaggctgaggcaggtggatcacctgaggtcaggagtttgagaccagcctcaacatggcgaaaccctgtctactaaaaatacaaagttagccgggcgtggtggtgcatgcctgtaatcccagctactcgggaggctgaggcaggagaattgcttgaacctgggaggcagaggttgcggtgagccgagatcacgccattgcactccagcctgggcaacaagagcaaaactctgtctcaa

SEQ ID NO: 240836 - DNA, 227 bp, Homo sapiens
aggttagttccttctgtaagctccacctcctccaggggcacccgctaattggctccctcagatcctggctagccagtacaaggcctcagcagtgcacagatcccatctccagccagtccaggtggcgctcgcatggtagggtgcatgaacctgtgttggagtacaggccttctttgctccagttgtttcccaataataaatgttataaaattatcaaaggcactgta

SEQ ID NO: 240837 - DNA, 494 bp, Homo sapiens
atcaacaatgctttcaagaagaaagacttttgatcaaaagcgggaaatgagaaagcgactttcctctgaaaagtgcctcccagtcccgaggctgcgaggcccccacgccaggctggctcccacggaagccgggcacccacccggcccgaccaggcgccactccgccccgtgacccgcggaggccccggcccaccccggggacgcccgccccacaccgcgtttgcaccccgggggccccttgccgcagaggcggacggcgcgcctctcccgggcccctggggtccgcgcctccctcgggcagactctttcgactctgctcgagcctccgcttcttcctgcgggcggacgccccggacacaaccggccccgctgttcacgcaggggcgccccggcggggcgggcagagacccggggacgcggtcccgtcccgagacgctcagctccggcccaccgctcgcagctcccgccccgggcgcaggtcccgaccccacggg

SEQ ID NO: 240838 - DNA, 458 bp, Homo sapiens
caggtggagtgcctttctcggagttcaacagagccttcctgtcgcccaagggacaactccactgaatgcccaagccacacccaaaacctaacaagtaaaaaccaaattctgtgctcccccatcctgggccattcctggtttctctactgctgttggtgataccaccatcagcttgtccatcatgaccctggccagttcctcccacaaccctccacagcacccagggacctcacctccattccatccgacacagatctcctcaccacaaaccttggttttgcaacagcagccatgagacctttacaccctccgcccttcatcctgtcccccactgaggccccagagccattccttaaagcagcgcgccacaaactataacccacaagccaattctggtacccagcctgttttgcacagccagtgaactgacaatgatcttttcatacagccagaaaaac

SEQ ID NO: 240839 - DNA, 585 bp, Homo sapiens
  misc_feature (582)..(582): n is a, c, g, or t
gtttgagaaggagggcctttgagacctcagggagtgggagacactggctcgagaataataataatggcaatttctctcatctgtgttttcagggcatggactggaactcccaatacccctgacatgggctgagtcaacgtggtcatgaacatgtgacaggaggcagcagaagttgcagagaagagtgaggcacgtttgaaaaaggctgaaaaatgtttctgtccaggcaagggtgtgtgctgaatgactcaaggattttttggtgcattgaatgaacagcgggacattggacacctgctgatccatcaccccgggcccgggcaggcccgtggatgaagagagatggagaagaccaggcatgagactgtggagaagccacaccaccagaaacccctgccccatgcgccgtccagcccacacctgtggatgcacgggggattgcaggcagggctcccaccgtggactcaggaacaggcagggaagctgctgcctcaccaggcgaaggggccaggagggggaggcggagaggcccgtctagcccctgcggctgtcaccgtggtgcctcctcactggccagtgcgnccg

SEQ ID NO: 240840 - DNA, 791 bp, Homo sapiens
aacttgtaacaagtaacaacagagctcaggtcccagaccgcactgaagctctgtgagacctctcctcatctgtgcatgaacgagtgtctgactctggagcccagcctgctgcttcccagtctggtggtgaatcctccgtagtctgggcatggactggaactcccaatacccctgacatgggctgagtcaacgtggtcatgaacatgtgacaggaggcagcagaagttgcagagaagagtgaggcacgtttgaaaaaggctgaaaaatgtttctgtccaggcaagggtgtgtgctgaatgactcaaggattttttgggtatgtcatttcccatttctcaccctcaaataggactccgcttcccatctaagcatttgtataaatattgattattggttagtgtgtatcagagagctattgagtaaaaattatatcagaaaaattaagaatctctagagatggcaaggtgtgaaacaaaaaacgccaggaaggtaaatgctcaaagttcaccacacaccacagtgagaagtgttgggggcccaggtctctgaggctgcccagaggggctcaaggtttgtagtgaatacaggaatcagctggaagctgtaggccatgtgacccttggacccccattccaggagtagttgaacacgtctgggcaggaccccagaatctgcattcccaagggagtgcctggtgattctaatacagcagggcctgatccaccctgaatccattgcccatctccatcaaagcttcctttcaccagtcaagcccctggctggggaaaggt

SEQ ID NO: 240841 - DNA, 558 bp, Homo sapiens
aacttgtaacaagtaacaacagagctcaggtcccagaccgcactgaagctctgtgagacctctcctcatctgtgcatgaacgagtgtctgactctggagcccagcctgctgcttcccagtctggtggtgaatcctccgtagtctgggcatggactggaactcccaatacccctgacatgggctgagtcaacgtggtcatgaacatgtgacaggaggcagcagaagttgcagagaagagtgaggcacgtttgaaaaaggctgaaaaatgtttctgtccaggcaagggtgtgtgctgaatgactcaaggattttttggcaacacaaaccaacacgagccgtgtgaggatcaggtgacagctgcccaaaagctgacacaaggaacaagcctggaggagcgaggatgggtgctgtgaaggaggttgtgcagctgggcccgcagtcggacctggtgagatcagaggagggggtgccaccagtctgtggacgaagatgagaagctggaatagagcagaaaacaggaggctgccactctccatctttcccaaagtcactccagga

SEQ ID NO: 240842 - DNA, 662 bp, Homo sapiens
tgggtacttatatatgtgtagagtctatttaagaagcctctcaataaattatgtttcacttactaatattccaactttacaagtgaaacaaataagatatggagaggtgaagggatttgcccaaggacgcacagctagaaaactgatgtgaaactggtgcaaaacaggataaggaagggtagactttgatgccagtttctcaaccccagtgcaatgactttctcgtcatatagcttcaccttcatttctccccaatccaaaaagaagaaggacgttgagctcaactgtggtgaaaaactcgctacactgcagagccatgaccttcatccatgccatcaaccatgcccttttcctcttgcagtgttgtgagaagccaaaaagttcagacttgtgcagagctgacaggaaggggcctgtgagggtgacggattttgctgctatacagttatggctgtagattacagtgcggggaatgagagctcaaactggagtgaagaattaatagttgagttctctggcttgtaaattggcatctgtggcatgctgtgagatctggagttgacattgagtggcacaaatgagaggtggaaggcaagtccctagacacagccaagagactggttaattttggaaaggcgaggaatggataaaggatgaaagac

SEQ ID NO: 240843 - DNA, 346 bp, Homo sapiens
ctctctgcgggctgaggtcatgcccttgccatttatgatggatacctttaggcactaggatgtgtttcctccctgagtcttctcccttctctaaagaccccaccctggtccactttcttccagcataacgtggaaattggagcccttgcttgcaatcttcctctctccagtttcccattgcactcctaacttgctcattctctttttcctggggtggggagtggtgcatcttgcttctcacctccaagcttctttgagactgcacaaggaccccccatcccatcactcagctgtcaacagagtgcagcagggaccgcttcctatgtgtgcagacgccatgggatac

SEQ ID NO: 240844 - DNA, 447 bp, Homo sapiens
cttcactagtgtctttatattggcagcacgtccattcagtccaccttgtaggcaagcataaagaaaccctttagccgaagagttccctattttttcttattttctaaatttcttattaaaaaaaaatttgctatcacatagttctgtatagttccagtggataataaatcactcgttctcaaattgaatcacattcaaagttcactactcctactattctaaaaagaggcgccaccttggtagcagcccacatgtgtaagtatgttcttggttcaaactgtgaatccctttgctgtgaattctgctggtttatgtaccctgaagccatttatgagccagtctgtgcgtgcaggaccttctttgtttttgtttttctgagaggaagtttcactcttgtcacccaagatggcaccaccgcactccagcctgggtgacagagcaagactc

SEQ ID NO: 240845 - DNA, 789 bp, Homo sapiens
caggcaggagacagcgactgcttggtccggggcaggtgagcgcagcgcaggccagggccctacctgtccacggtgcgcgcgagcggccagcagagggcgccagaggaccacgagcggcccgcggaggagtccgcgccggccccgatgcccagctccgcgccgcgcggacccaccgagcccgcgctcagacgccccagctccgccgagaggccgctcgctccgggtccttcctcttccccaggtgcaggcagagcccccggggccatggccagcccttccggcagctccgaagcccctggcaagccccgaggcagggatggccggcccaggagggaggaggacgacgtccctcccgaagagaagaggctgcggctcttgctggaggggggaagcgcacagccccaggactgcgaggacgggcaggacgcgccgcggtcggccaggaaggagaccggcacccagacaggtggcgacggcagaggagtaacacagtggctcacacctgtaatcccagcactttggcaggtcgaggctggtggatcacctaaggtcaggagttcgagaccagcctggccaacatggcggaactgtctctactgaaaatacagaaattagccaggtgtgatggcacacacctgtaatcacagctgcttgggaggctgaggcaggagaatcatttgaacctgggagacagaggttgcagtcagccgagatcgcaccaatgcacttcagccagcctgggtgacagagtgagaccctgtttcaaaaataaataaataaataaaatag

SEQ ID NO: 240846 - DNA, 659 bp, Homo sapiens
  misc_feature (553)..(553): n is a, c, g, or t
  misc_feature (645)..(645): n is a, c, g, or t
caggcaggagacagcgactgcttggtccggggcaggtgagcgcagcgcaggccagggccctacctgtccacggtgcgcgcgagcggccagcagagggcgccagaggaccacgagcggcccgcggaggagtccgcgccggccccgatgcccagctccgcgccgcgcggacccaccgagcccgcgctcagacgccccagctccgccgagaggccgctcgctccgggtccttcctcttccccaggtgcaggcagagcccccggggccatggccagcccttccggcagctccgaagcccctggcaagccccgaggcagggatggccggcccaggagggaggaggacgacgtccctcccgaagagaagaggctgcggctcttgctggaggggggaagcgcacagccccaggactgcgaggacgggcaggacgcgccgcggtcggccaggaaggagaccggcacccagacaggtggcgacggcagaggagtaacttcactcttctctgcaacgaatcccaaaagtatataattgagctgactgcaaggtacttgacacncaagagactccacaaatgggattcagcctctggaaagtggtggtagttccagatttatgtggatgttactttgtttttccctataaaatatnttatttaaactatc

SEQ ID NO: 240847 - DNA, 557 bp, Homo sapiens
agtttaaatattacgtagtttgtgaagccttttgcaattctcccaatcagaataaaccagcctctaatccatggactcagaatgaatgaatggtctactgccacccttgtcacaggggaccaagcaaccttggagaatccacctgcaacattcctcagagaagctgcaacattactttaaaagaagttacagcagtgcatactattgttgctttcctacaatgtagcaaacagaaactttggttccagaatgttcctgaatataacacagtaaaatttcttgataggagtgcttcacaaaagatgtcattgaagatacccagtttggaagttaaggcattggctctgacattacttttgccccatctaagcttagtttggtagagtcatatatagggcaggatctagctaataattgtccttaactcaaaagcataatcttatttcaggtagaaagccacactaacttaattgccaaccagataaatggtgatcacttgaaatctgttttatacttataaataaatcttgaaatattaattatccgtgcttaaaaaa

SEQ ID NO: 240848 - DNA, 568 bp, Homo sapiens
agccaatttggtagcatgtaggcacaacacataacacaacatgtacatacatctaaatttattttaacccacatacacacacatacaaaggtacagcttttactgcagaactctagccatgagacagcagtacaaactcaccagtttataaaagagggctggatccaaattatttctgacaaaattggaaccattcacataaataaactttgtttatcccagtaggtaattcagtgaaggctgtgaactaaaattttgaataaagcagtttctatagcagtttgattttaaaaacttaccctttctttttttctccagtttcaagttttcaatgattacattttagctacaactggctgagctgtataagcaaaacaaaatctccaagtagctctgaatataccatagacagtgagtcttttctcaataccagtagcttaataataccagattcaaagcagacagaaaagagacaggggtgatggctcatgcctgtaatcccagcactttgtcgggggtgggaggattgcaggaatccaacctgggtaacatagaacccctctctata

SEQ ID NO: 240849 - DNA, 556 bp, Homo sapiens
ataattagctggatgtggtggcacatacctgtagtcagctacttgggaggctgaggtgggaggataccttgagcccaggaggttgaggctgcagtgagctgtgatcatgccactgcactccagcctaggctgagtgagatcctatctcaagaaaaaaaaaaaagatgacttttttttcccctaatatcttgaactttaaaaatcttgtatttctaaataagcttcaacaattataaaatataaagtcaatggaagaaaactttaaagagaatattgatagaattcactacataaaatgtgatgctttcaggcatccaaaactctaatcaaaattttaaaataacagataagttgagacgtgttaatatccttactattcaaataattcttataaattaataagaataatatgaaattgaaatgagcaatggacatatataatttacgaaaaagaagtacaaatgaccagttgccttatgacaaaaatttcattctcactaataatcaaagaaatgattgtgcagcatctggattttatgaaatgaaaataaatatt

SEQ ID NO: 240850 - DNA, 486 bp, Homo sapiens
gtcccctgaatacacagtccatgtgaaagagccacaggagaagaagtcattgtatgagaaaaagaaatatgaagacccagcctgtacttgacatctgtgatgaatgcagcctttcaatgatgaactcctgccagccccacctcaatttgaatttgcattctccattaatgtggttataatgctggccctggtcaaagtcccatcgtaagtctcctgtttcctgggtataatacaaacatcaaggtcacatacaagccagctgttgactaacaaaacagtgaactattattgaagtagccttgggccactgtacagagtattctttacatgcaacaaaagctatgttggggacaatgtcagaaatcaattagaaccaccaaagataatctttcattctctctctcatacaagctctatttcactttgtctttcttttccttttgaattgttttgcaagcagtattaccaataaatctatatctgatc

SEQ ID NO: 240851 - DNA, 372 bp, Homo sapiens
tatacatcactgtgaattgtgctctgtgtattttacccatctccacgtattttacccatctgctccctggctgatgggtttggagatggcgtctaacaccctgcctccacaaataatgctgctccagatatcttcctggatggtctcaccagatgatttctacccaggagcagaattgctggccacagggcatactttgagtactacaagactggtttcctcaatgactgacatcctccattctcttccacctactcccatccccaaacaggacatgtaaatttctatattttacctatatatcatggcagtatccagctttattgtaggtgtaaaatacacattgctgctttatcatgtacttttctaata

SEQ ID NO: 240852 - DNA, 647 bp, Homo sapiens
gcggccgcatgtagcgatgtggagcgcggcgactcggagtccttctcggagcccatggccggcagaggccgaggagccaggggcgcccagcgccgccacagctcccgcctcagcgcccctcagccagcgcccggccgccgccgacgccgccaccaccgcctcaaccgccctcccggcgatagaagccgagcggcaacgacgaagtgattataaagcctccgccccgcgcgccgctgccctgcgcaggcgcttcgctcaaacacctcacaacccttgcgccccggtctaggagtgcgctgggcagggccgagcggggtggggccgagcgagctggggcggagctccgcctcctgccggtcaggtggttccagggccgccatgttgcggagactctcagagatcctagcccgctgctctccctggtctccgcctccaattccatcaccatgacacccaaggtggactttttggtttgccgttcctcacaggttgattgccacttccagtaaatgatggttcagttacattatttataaaaagcaggcaggggttgatcagatggtgactcccaactggttcaccttccaacatttctgtttattaagcagacggcataaattaataaagaatatattcattcacaaaaa

SEQ ID NO: 240853 - DNA, 479 bp, Homo sapiens
gtttcaaaaaaaaaaatgtaactccagattccactatgagaaagtgataaatttagattactttgtgttgaggaactaacaggaatactgattctgcattcctataactctgttgttaatactttagtatactttatgtgtcttaatctttgcaacaatcctatacattcatttatttcatttaataaatatttattgaatgcccactctgtgccaggcattgtactaggcagtagagataaaatggagagtgggaacagaggcaggcttcacgctcattattatgattttattcatttttttaaatcctgtcaacagatatctattgatggcctagtgtgtataaagtactgtttctaggcaccagaataaagtaggcagaaatctgtgcctctcaagtagattacattctagatggggaaaataggatgtaaacaaggtaaataaaaagtatagtatattggcgaaaagagctaagc

SEQ ID NO: 240854 - DNA, 458 bp, Homo sapiens
tccacaatagatgttccctgcctatgtggtgtttttaattaaacgttgacatcattctcacatgttcactgttattagcactgatggatgtaatcttcatgttttcctctgaacactgcatgccaagaaaggggccctctatcctcacggattttctaggcaagagaatatcaggccctcatctgtcatatttccatctcattcagcacaaaacaccctggctcatggaaactgcaagcatcgttgtcagctgcacctgcaggcaccacgggattgcaagtcagcataccctttcagaaatgaggatgaaattagaggtagagagaaaattctccactgtcctctcacttgtctctgttatggtttctgctatgttttcattgattatgctatagggagaaaggaggaaaagaatcccctaagaagaacagtgtctcactggacattgtttctttgca

SEQ ID NO: 240855 - DNA, 1128 bp, Homo sapiens
acaccacattgttgttccatccttctctgtgcctttgggcaaggactctccgttctgtagggaccaccaggtggaattaaagtctacactcctccaagagctgatcttggggcggccccacctccatgcccctctacagcgtgccattctcatagaacacactaggacctttgtcctctggagctgttcagtgcagcagctctgacctcatccttctccagaagcctccaccttctctcccctctctcctcctgcgctttgtgtgtcctgttcttccacttcggtgacctgtctcctcccctaatctggctcagagaggggtaccagctgctgctgctgctattgcttcttcttctgttaaaggttttttatttttttccaatgacaaagctatgctcattctgaaaacatgaaaaataaaaatgctcaaaaaataaaactcactctacattcattgctaggagagaacagcctgctcccattccagcctttttatctatatccacttaacattaaacatacagagtttctactctatttagtgattgtcacctgcactttaaacttaatggttctttatgagcattttactgggtagttgttctacaataacattactggaactgtttgggtttcccttgaccctcttaaaaattactgagaaccctgaagagcttttgttttataggttacatctatcaatatttgctttattagaaataaaaactgagaaaaagtaaatatttattaatttattttaaaaatgttaacatggaaagaaattatattacataaataatgtattttagaaaaataattatactttccaaacaaaaataattagtgggaagagtggcattgttttacagttttgcacggctcttgaatgtctggtgtaatagaagatagctggtttcatgcctcctcctgcattcagtcggtcactatatgttgttttgtttgaagtatgtgaagaaaattcagccttatgtagatatgtatatgggaaagaatagaggattttaatcgccttttcagataattacagatgttcttttttcataccacaccaaaatgcaaggagtcgtttcttaaaggttaagtgcaatgtcagaacctgaaaaaaaa

SEQ ID NO: 240856 - DNA, 364 bp, Homo sapiens
tcaggggcttttagtctttttccaacaagcagctgccctggaaacttgacatctgtaactcagggcaggggaaggaagctctccttgttttggagcatttctgtcaggaagcctaattacagaactgaccagaagccacgttgtgagagattgtcagaagagccatgcggtaagcgctggcagaaattagagctgggatggcctcagctctgctggtgacaagatcctgccaggcctcggcacttaatgaccttatttacccatccacacggaaccctcagaaaagccctgtggaatcgatgtaattttctctcagctttgaaagttataaaatatttagcatctcatgctacatggtgaacag

SEQ ID NO: 240857 - DNA, 546 bp, Homo sapiens
gaaattgtttgctaaatctgaacacattaaaataaggaactaaacgacaaacttgaaaaaggatcattttaggccaaataaatgggcaagtcacacgtaatcataaactgttgtaagaattaaaatacctgtaagggagaattgcttgaacctgggaggtggaggttgcagtgagccaagatcttgccactgcactccagcctgggcaacagaatgagagtctgtcttaaataaataaataaataaataaataaataaataaataaaatccctctaaggactttacaacactgcctggcacgtggattctcagtacatgttaatagacattattatttttgagattgttatttgaagaagtgagggaggatactgagtagtctgaaaaataaacatatgttcaaaaaaggtattaaagtgatgctgtccaatgtggtagccaatagccatatgtagctattcagcactgaaaatatgggtagtccaaattgagatgtgctgtaaatgtaaaatgcacaccagatttcaaagtcttaatacaaaata

SEQ ID NO: 240858 - DNA, 795 bp, Homo sapiens
ttcctgcgcgtcctgtatctatggagacggcaatatggaggcgatcttacatttctttgatttcatctgaacgtccagttcacaattggagaggcaagagtgttcagaagaaacaagcagagagtaaaagccagataaagctccatactcagagtgctccctttggactgtgtcccaaggacatgatgctcacccaggctccaagctccgtcgtgaggtccaggaacagcaggaaccacaccgtgaactctggtggatcctgcctgagtgccagcacagtggccatccctgccatcaacgacagcagtgcagccatgagtgcctgcagcaccatcagcgcccagcccgcaagctccatggacactcagatgcactccccaaagaagcaggagagagtgaacaagagggtcatctggggcattgaggtggctgaggagctgcattggaaaggctgggagctaggaaaggagaccacaaggaatctggttctgaaaaatcgatccttgaaactccagaagatgaagtacaggccccccaagaccaagttcttcttcacggtcatccctcagcccatcttcctgagcccaggcataaccctcacgctccccatcgtcttccggcctctggaggcgccccttacagccgtcatctacgaggtgcaggccacgtgctggtacggggcgggcagccggcagaggagcagcatccagctgcaggctgtggcaagtgcgcccagctgctggtgagcataaagcacaagtgcccggaggaccaggatgccgagggcttccagaa

SEQ ID NO: 240859 - DNA, 716 bp, Homo sapiens
ttcctgcgcgtcctgtatctatggagacggcaatatggaggcgatcttacatttctttgatttcatctgaacgtccagttcacaattggagctccatactcagagtgctccctttggactgtgtcccaaggacatgatgctcacccaggctccaagctccgtcgtgaggtccaggaacagcaggaaccacaccgtgaactctggtggatcctgcctgagtgccagcacagtggccatccctgccatcaacgacagcagtgcagccatgagtgcctgcagcaccatcagcgcccagcccgcaagctccatggacactcagatgcactccccaaagaagcaggagagagtgaacaagagggtcatctggggcattgaggtggctgaggagctgcattggaaaggctgggagctaggaaaggagaccacaaggaatctggttctgaaaaatcgatccttgaaactccagaagatgaagtacaggtaccagtataagggatcaaggacccagtgccacagccttgagccccgaaagcaggctctcttcaaaacaaaacaaaacaaacaaaaaaaacctttaacatgccatataaaagccagtgagtgtttaaaatacgtgcagtatgaataattatgcagctataatccattatttttcattgtggtatagtgtcccaatgtgtgcctgtaccataatgtattcatccagaatgaaggaa

SEQ ID NO: 240860 - DNA, 481 bp, Homo sapiens
atgtgttgagtggagactttttcagagctctgaggcaggagctgtctgtacagtcccctgaggtcagaggcattaatgagtcaggacagggctgcaagaccatcccgtggcagaaaagtaatggactctctctgtgtctcctcagcttacatttctttgatttcatctgaacgtccagttcacaattggaggtaggagccttgcctgccttgtctggtgcctagcacagtacctggtacataatagtaagtgctttgtgaatgaacgaacgactgaatctagatagtcccctccagagggtttagacatgttgccaactaggaaaaccagggtcaacagaatcttccgctttggaagggtgttggtgggtggtgggggagggataagagagtgtctgatggaactgtataaattcctaaagggtgatcatgaaattgtttgctaaatctgaacacattaaaataaggaactaaacgacaaa

SEQ ID NO: 240861 - DNA, 682 bp, Homo sapiens
ttcctgcgcgtcctgtatctatggagacggcaatatggaggcgatcttacatttctttgatttcatctgaacgtccagttcacaattggagaggcaagagtgttcagaagaaacaagcagagagtaaaagccagataaagctccatactcagagtgctccctttggactgtgtcccaaggacatgatgctcacccaggctccaagctccgtcgtgaggtccaggaacagcaggaaccacaccgtgaactctggtggatcctgcctgagtgccagcacagtggccatccctgccatcaacgacagcagtgcagccatgagtgcctgcagcaccatcagcgcccagcccgcaagctccatggacactcagatgcactccccaaagaagcaggagagagtgaacaagagggtcatctggggcattgaggtggctgaggagctgcattggaaaggctgggagctaggaaaggagaccacaaggaatctggttctgaaaaatcgatccttgaaactccagaagatgaagtacaggccccccaagaccaagttcttcttcacggtcatccctcagcccatcttcctgagcccaggcataaccctcacgctccccatcgtcttccggcctctggaggcgggacctgcccaccttcttcacctgggagttctccagcccattccagatgc

SEQ ID NO: 240862 - DNA, 672 bp, Homo sapiens
tctcatctgttaaatgttacctacctaatagggtagttgtgagaactcaatgaaataatgtacatgaaatgtttagcacaatgcctggtccacagcaaatgttccacaaaaattaacctctatggtagcattctagactttaagccataaaaaaaatcatagattatttccaaatggaaagaatcctcattggttggtattctcagtttactccaagaaaaacactctttgtactagcataaagaaaggagagaacttggccaaaaaataaaaatacctggataaagatccgtgcagtgttgttcttctaatttcaccttttagtaaggactagtatttaatattttttgtacacctccatgtgtcaggcactctgtattcacagcagtcctgtgaagtggctataactgtctcacattacaggcaaggaaactgaggctcaaagaaatgaaagaacatggccaagcctgtgtactatgtcagcagaagagggatttgaatgccagaggcaacgctatttcagttcatcttacaacgccttagaagtagaaggaaagaaaggttcatgggcaaagtctggccctgctatggactccacggtaatagcaatatttctactttgatgttcccattaaaatcttatcctctagctgagggggcctggcagagtgg

SEQ ID NO: 240863 - DNA, 307 bp, Homo sapiens
ccggaaagggcgtggaagctccgcgccccttcccacagactttcccccatccatctcttcatctggtgttcatcgatagcctttgtaatgtccttaatagtaaaccggaaaacatgtacacctaacagcatggtaaggaagccccagaaggatgtttctaaagaccatgagggagtctgaaacctgaaatcatgccaaggactctctgcttctctttcacttggggtgtctatctgatgctgccacaaccagttgaaacgtataacattaacaataaaaattagtttttttgtaactaattttatgc

SEQ ID NO: 240864 - DNA, 408 bp, Homo sapiens
agtgaaagaagccagagcaaaagactacatattgtatgattctatacatatgaaatgtcatctttagaaaagagatgcagatgacaagctggccaggcctaattccagccttaagactagcattggccaggtgcagtggctcatgcctgtaatcccagcactctgggaggctgagacgggcggaccacctgaggtcaggagctcgagaccagtctggtcaacatgacgaaaccttgtctctactaaaaatacataaattagctgggtgtggtggtgggtgtctgtaatccctgctactcgggaggctgaggcaggagaatcacctaaacccaggaggtgaaagttgcagtgagccgagatcgcgccactgcactccaagcctgggcgacagagtcagactctgtctca

SEQ ID NO: 240865 - DNA, 413 bp, Homo sapiens
taggtgctttccctacatttttattgccttttaatgaaagagatctttgggtttttggggaggagatgataaatagtagggagtgtgaagtttaaaagaacatatatcttggctataaattccataatgtgaatacaacctcttttgtttagatctcttaattttttctcccagcaatgtacagtctgtttgggaatcattcacatacttaagctgtatttacatataagaatcatgctttggtgaagtaggtgataaaggcatgggaatcttccagaatgtaaagagaaaaaaaaatcaaataattaggagtaaaaaaaaacactccaaacttaaaaaacattcactcatatttagattgagagaaaactcaaaatgctgagcacattcatcctgatgaaatttcgtaatta

SEQ ID NO: 240866 - DNA, 465 bp, Homo sapiens
tcggacaaacaagtcagcaccatgtggccctccgcaccacccagcatcactgggccctcggtcagcaccgcgtggccctccacactgtggaatattacttagccctgaaaaggaaggaaatggacacaggctgcaacgtggatggaacttgagtatattgtgctgagtggaataagccagtcacaggaggacatgcactgtatgatcccatttgtgtcaggtccctagagtcattgcattcatagggacggaggtaggatggtgcagcctggtgatgccaggggccggggaaggtgggaatggggagttggggttgaatgggtagtttcagttgcgcaaggtgaagagagttctcgggatggatggcggtgagggctgcacaacagcatccacgcacgtagtgccactgacctgcacactgaaaaatggttcaaacggcaagttttacgttatatttaccacaat

SEQ ID NO: 240867 - DNA, 546 bp, Homo sapiens
tgaggatcgtcttactcgcaccctggtgctgggcgctgaccacctcccgaagcacttggccagggggagaggatgctggacacaatcaggttctcctggggggaggagggagggaatggctgctggaagggttctaccggggactcctacagcagcttgttagatctccttcctcccaattccctgaagttggtggaacaggaagaggacgagaagtcatgtttgtatgttgtccccttggaatctctcaaaaatccgcaatatcccgatttgagaaatgagcatcacagagaaagcaaagcggtagttggaagctgccaagcttgtgagcaacgagacggaatccacgcccagggctttctaacggcggggccacgccctccacactccacctcggccctctgccctgcgatggtgcagagacagggtgtggtcaaggggcctagggtgagggtcctgccagtactttacaggaaactccccctcttttagcctcatttgtcaaagaaagggcttagacactaaaatcttttaagtttccttcta

SEQ ID NO: 240868 - DNA, 590 bp, Homo sapiens
tacagaggtagtgctgaaatgctattgctattagttataatgaaatttcgtactaaagagtttccttaggtctgttctctgaccagcttttctagggcgagttaagcagcgacatggactgttcgtacatcctttctcattttcattctctcagaagaaatattcaaattattttagtcatctgaatagtagaagaaacactattctaaaaagttttctgaagtaaaagaaaaatgtcacaaaaacatttgagttacttaacttgctttgtcctaaagctattgaattaagaaagtttctcatcttttagaagtaaattatttcagaattataaaggtactgatcaggaaattatgctactcccaacacatgacaccaggtaaactcattctcaatgagaagggttaaaccatcagtcacagaagattcatacgcagtaaaatcaatctgcacattaatcccaactcttctaaaaccctccaatttaaaccagttttccctggtgaatagcaaagagagtctctttcagacacataagttgggcccacaaagtgttcacttgttgaaagtgctggggcttttttattatt

SEQ ID NO: 240869 - DNA, 482 bp, Homo sapiens
tgctcttttctttaggaacactaattatatgtatttgattatctttctttagttactggttttctctgtaatcacatttgtattcatttcattttttattatttctccaggcctcattgtgaccttgtagtgattatttttgttgttccttatgtgaatttcatctacataatgctttttatttgcccttccatttctttcctcagcattgtcaaatcacttctcactactttttattgttttctaatctaatttgtttttggccaggcatggtggctcatgtctgtaatctcagcactttgggaggctgaagaatcccttgaggccaggagtttgagacctgcctgggcaacatagcaagaccttttctctacaaaaaaattatttaaactagctgggtatggtggtgtgcctatggtgtcaggctgaagtgggaggattgcttgagcccaggagtttgaggttgcagtgagctatgattg

SEQ ID NO: 240870 - DNA, 406 bp, Homo sapiens
ggtattctgtgtctgctttgttccatgccctctcctaggatgacacaccctttctattaagacagaagagcagtaacttaatttttgttatgtgatgccctggtctgaatttttgtgtttccccaaattcatagattgaaatcctaacttccaaagtgtgttagtagatggggcctttgggaggtgattaagtcatgagggtttgagccctcaagaatgggattagtgcccttataaaagaggctcaagatggctgggaacattaactcatgctggtagtctcagctactcaggaggctgaggcaggagggttgcctgagcctaggagttccaggctacagtgagctatgatcatgccactgcactccagtctgggtgacagaatgagacactgtctctaaaaaaa

SEQ ID NO: 240871 - DNA, 424 bp, Homo sapiens
gaatatagagataaatatttgtggggtgcctgggtattttgataaatatctgcttcacaaatgttcttccttcctttatggtctataagcccccgcagaaagtcttgcactcaatctgtccttttgttacattgcctttctgtccccagtttccaagctttcttcactttatcctggtatctttatacttttaatctactctaagtcctgttgctgcttttgttctaaccaactcaatggtctagttttcctcttgcaggccctacaccttcttctacaaggtagttatactgtaatcctgatacaattctctgataggcagctagtctctcttttgggccaccccatatgacactgttaggtggggaggccaggagctgccaagggtggtgtgcagagggtagcatccaaggggaacctgaag

SEQ ID NO: 240872 - DNA, 370 bp, Homo sapiens
gaatatagagataaatatttgtggggtgcctgggtattttgataaatatctgcttcacaaatgttcttcttgttacattgcctttctgtccccagtttccaagctttcttcactttatcctggtatctttatacttttaatctactctaagtcctgttgctgcttttgttctaaccaactcaatggtctagttttcctcttgcaggccctacaccttcttctacaaggtagttatactgtaatcctgatacaattctctgataggcagctagtctctcttttgggccaccccatatgacactgttaggtggggaggccaggagctgccaagggtggtgtgcagagggtagcatccaaggggaacctgaag

SEQ ID NO: 240873 - DNA, 600 bp, Homo sapiens
cccctggtgggaatatgtcactagtggtgtcttatcctcttttaagtgacactgcttcattgccaagggagcagccttatgaggaccaaaccttgcccctttccagcccttccccaactgatgggatcagtgttgggcctctgagccaaagcaggccaggctgtaggctggccagcaaagtggctggcaggaagagatgagatgtcagcttccatgttgagaatttagggaacagaaagattgaacacatagaattaaggtcatgagattgaggccagaggaatggcaatggctgtgagagagatgggagaataacagtcaggcttttctttgagtccagggagcaggccaccgtcctgaggcataagactaagccaggggctcactccatcccctggccagtggggccttggccctgagttcagcaggagcagagctgccactgaacctcagaacgtctcggcttgtctcctcatctgattacatcgagtgtcatgttcctggaagaactccactatgaaataagtgattttatgatgaatggaaataccacttgccatggcaattattaaacacaaggaacttattatctcccaaaga

SEQ ID NO: 240874 - DNA, 811 bp, Homo sapiens
acctcatgagagaacctgaaaacaatgaataaaaattaaaaatagaaaaggatttcaacagacacttctccagtgaaggtatacaaatggccaataagcacatacaaatttcttccgcatcttcatcattagggaaatgcaaatgaaaagcacagtgagctaccacttcacccccatcaacacgactaataaaatatacagcaagtgttgtcaagtatatggagaagttgagaccttcatacattcctggcaggattgtaaagtggtgcatctgctttgaatttggtagtccttcaaaatgttaaacgtagagttaccacatgacccagcaattcctctcctatgcatttatccaagagaaatgaaagcacacatccacacaaagacttggacacaaatgcacaaagcaacctcataacggttcaaaatcgtgaacaactcaaatctccatcagcaattgagaggatgaacaaattctggcatatccatagggtggaatactgctcaacaacaagagtgagttaggcggggcacagtggctcacgcctgtaatcccagcactttgggaggccgaggcaggcagatcacgaggtcaggagatcgagaccatcctggcaaacacggtgaaaccccgtctctactaaaaatacaaaaaaaattagctgggcatggtggcgggcgcctgtagtcccagctactcgggaggccgaggcagaagaatggtgtgaacccgggaggcggagcttgcagtgagccgagattgcaccactgctctccagcctgggcgacagagactctgtctcaaagaaag

SEQ ID NO: 240875 - DNA, 949 bp, Homo sapiens
gttataaagccaggatgtcccttagattttgttctcttcgcacatgttcacttcgcctttgaatttctccaccatgttttgacacaacacaaaagccctcaccagaagccagaggcatgatctttaacttctcagcctgcagagcgatgagccagataaacctcttttctttatatatcactgagtctcaggtattcttttatagcaacacaaaatggactaagacaagtagaacttacttagaacattgagttggttaggtagacagggattttagcaatatgagaaattattaatttctgattgacagctcatgagttaaggcttgctttacgctttctcaatattaacgacctttccataaacttgtactgtgagtactagaaaggtctatctattcttgcataacagatatttctatcatgttcactaacactgtgttttggtttaacaacccctttgcctaggaacccaagacaattttagaaatgaaaccagtgtacttccaagtgatataatccattcattcaactatttattgagcaacttctcaaaaatacgccaggcaatgccaggtactgaaaatataatattgaataaaacaatcatggtgcttgctattttagaatttacattctaataaatctgtgttaactacatgtgggtttctcctaacaataatcaggctgtactgtaatccatctctcacatgtttaagctttcttctatctcaggttgatatcatagtccacctctcactttcccctaagttaaaggtattatttattcttggtgatcatttgcaactacttgcatagatctcaggatacagtgtttgtgacaggtttcttgttcttgtgaaccctctgcctcttaaaatggctcttttgaacagaatccaaaatgactgcatgtaagctctttcttctatgttgtctgtatttcagcc

SEQ ID NO: 240876 - DNA, 322 bp, Homo sapiens
gtctggaaaggtgccctgaggacaagagtgaggagaagggaggttgggacactgaggagctcaactgaacgctcagctctgtagggaagttggctgccctcctaggtgaccctcacgctggtgataggcacgggccaacccctgggacaccggggtggcatcagcaaagacctaaagagattagggtgcacagattcaaggtagtcaggcagtttggggcctcctggaagcagctgaggagatgggagtgcagtgagctgtgatcacgccactgcactccagcttgggcaacatagtgagaccctgtctcaaaaaaaaaaaa

SEQ ID NO: 240877 - DNA, 795 bp, Homo sapiens
aactctgaagttgtctaaatgaaactctgaatccaggacaattgagctcatactacattccccaacttttccaaccacatgtagaaacatggacagtcagacaactgtatcctatgtaaaaacataaaaataaaattaaaattttaaaaaatcaaagtgttcttttacaaagaaattgaatgaattatctgagattacctaaggcagagtgatcggacatcaatttttccagagcaaagacctctacatgtgggcactgggggtcttgaaacatacttggcctgctcccttttatttctgtaatgtgaagactatcagttaataagcccacctacctttccagagcagccaagtgtcatgcattactaccaactatttgaggaaatacggtaacatgaaagaaagatacagctaaaaacaaaaagaagaaaagcctctaatcacttaacttaggagaaagaatgatttaaaaaaaagaaagaaaacttaagaacagacaaaattctagttagtttctgtaaagaaacttgaagagttttcatttatataaaataaacagtggaggccatgaagaaagacaaaaaactgttggaaattaaaagtatgataaaaacaaaaagaaataaaaatgaaagaagaatgaattaaaagaaagataaaacctaagaaatatctggaaagaagaaagaagagattaaaactgagcaaaacatgaaagaaaaagaaaattaatttagaagacccagtgagataccaagaaatttcaaaaaaaaaaattgacagaaagaacttatc

SEQ ID NO: 240878 - DNA, 376 bp, Homo sapiens
gaaggataagtgtagtcacaggctcggcttcacgtgaagggcaaggcggtgtacatgttcgctgaaggctagcctcaggattcagtcaggcgttaggaaggacaatcgcgggatactaacgagaggtcctcagagcaaagttgaaggcgagccgctatcatctgctgttctctgccgcagagaggactggaggctcacagctggaggaatttgccttgggatgaatcatgccttgagtctcacctatatctgatttagatgagactttggacttcaggcttttgagttgatgctggattgaatgacggtgccatgctcttggacttaccaacctccagaactgtgagctgaataaacgtcttttctttaaacatta

SEQ ID NO: 240879 - DNA, 370 bp, Homo sapiens
gattttgttttcaggaaggcatttccctataacgcagttaattttcaagtaccagtcccaatgcagtagcattgggtaatttatcatcacagaaaatcagacagcattaatgttccttgagacaccttgcgttggtgtggtttcatggaaggagcaccgagctaggaattaggaacctggcacttatctcagattggcctgattgatgatcttgggcaagttgctagtgttctctagatttcaatttatctataaaatgaagggattggatatggtgatttctgagatctcttacagttcacggaaacatttattttgtgtgtactttctgcaggtcaagtgcaggctccagcaatgcagagaccaaaaa

SEQ ID NO: 240880 - DNA, 359 bp, Homo sapiens
gagcagaagatgagagggagatatcattttacttctttgtactgcaataataaaaagaacagatagaatggaaggaagaggccaggggcagtggctcatacctgtaatcccagcactttgggaggctgaggcaggtggatcacctgaggtcaggagttcgagaccagcctggccaacatggagaaactccgtctctattaagaatacaaaaattagccaggcgtggtggtgggcacctataatcacagctacccgggaggttgaggcaggagaatcacttgaacttgtggggcggaggtcgcagtgagccaagattgcgccacttcactccagcctgggcgagaaagtgaactctgctc

SEQ ID NO: 240881 - DNA, 336 bp, Homo sapiens
tctgaaccttcaaattttcatctgtaagataaaaataatgctaatttttaggggtttcgtgagaatccaatgatagaaaggaaaagaactgacattcattgaatgtcttctttataccaaccacgtattatctcattaaaaatggaaataacctgcctgggcaacatggcaaaaccctgtctctacaaaaaaatacaaaaattagctgagcatggtggtgcatacctgtagtgccaactgtttgggaggctgaggtgagcctgggaggttgaggctaaagtaagctgtgatcctgccactgtattccatcctgggcaacagagtgagacccaatct

SEQ ID NO: 240882 - DNA, 284 bp, Homo sapiens
gaagactttttagagccactgttcttggagcctgttacctctgggagaaactgcaactgtagcagcattccttccccccaggaatgtgacaaagatgagcaccattccaacacctgttgctgaggcactttccaggggtctagctgtggaggcccctactcttctctagagcaggcacttcaatcttcaggccaaaactaaaatgtctgcatgaccacactgccaggttgcccaagattggctgactttgtatgcatcctgattaaaaatggcatcttgctctc

SEQ ID NO: 240883 - DNA, 1156 bp, Homo sapiens
gtccttgaacatttcttaaccagctctggcaactctgggctggagtccaagccttataccatgtttggccagcctgaaagtgcctgtttattctgtcttacccttctctagtatgtgccaactggctcgtgctgagggaggtcaatctagccaaacttgggatgggggaggtatgcatcataatttgctatcttgccagcagtgaggttgccttcttagactcattgccttagtcccaggctccaagagattagatgtctgtggccagatggcactgtaggcagatgtcaaacttattgtatcatgaatgtcttaatcacgacatgggcaatgtggggaaagagaccattgtgtaaatgatctacaatgcactagatagtttcctcctgttacaaagctgtagggagtcatggatctttagttacatatatggcagtggctcctggatactatcccaggatttatctttgtatgatcctgctaagttaagaccaagatatagttgttctcgttttgattaggaatattcctttggtgagaaagataaagaaggagaagcagaaacaacagtctgtaaaactatgattacagctaataagtcttaaattcaccaggcttctgaggaagctttatctttaccctgctctctgtttttagtttgtgttttgtgtgtgttttatgtcatggaggggaaggtatacatccataaaaatcacttagaactggatacagaggaggatgctcacatgctccctgtgattattgagtatagtgaatcaaatttggctccactgcttcacagccaccttattaacaaaagttctttattaaaaacaaaaaactataacactatggctcagccatttttcttttccactcacaagatagggataacaggtgctccccataaacagtgggtcctatgggtactacatatttagtagtaaactctgggggagtcccggccaaagcagggagagcggggtgtctgtgatttggtaacacagctaaggaagataccccttggggaatttccacttgactccagaaacacaaatccagaaacaaattcagtgagagtggggcatctgtgatttggtaacacagttaaagaagatactccttggggaatttccacttcactccagaaacacaa

SEQ ID NO: 240884 - DNA, 990 bp, Homo sapiens
tcacttacctttcagtgctggcatcgtccaggtcataggagaaagtagtaggggtgactcaaatatttagtatttgcacacattgcaccccagcctgggcgatagagggagaccctgcttgtaaaaagcaagccaagctctttactggctgaaattgcatggagtaagggagggagtcgaaattctggggcagagaactaccttttgttgttcatatgtgtttgtctttaataatgttccccagtatcttatgttaatgaggaacattaatgctttgacatcgtttcacggtgccacttcagggaatcactcttgcttattctaaggaggatttggagctgtaccgagctaaaagtctgaatttggagatgatagtggtgaccttataggcaatatcaggtacagatggagctttaatagtgaaaaagtagactgctcagagtaagtatggaggatcatacttctgcatacactgaatgtagttgtttcttttccacacaagcactctctacaagagaggtttctttagaaagaattggacctgatggagggtcattctatcagaatgaattttttaggtttcttccttacagttaacatctctgaaaggtacggatacaagttatctacagggtaacacctgtagatatgatgcaacaggcttatgccattggagagtgaatagtcaaccttctgaaaacagtgtacaccaccggaagggcaagaaaaaaaactacaatatagaacatctttctgaccttgaggtcaggaagtcctcctcgacaagacacaaaaaagaaaaatcacaaaggaaaagaatgacaacttgactccatcaaaattaaaaacagatattgcatttttttccagattgaaggtttgtggcaaccctgcatcaagcaagtctataagcatcatttttccaacagcctccctattccctgagacacaacaatattaaattaggccaattaataatgccacaatggc

SEQ ID NO: 240885 - DNA, 418 bp, Homo sapiens
ctaaaaatacaaaaatttgctgagtgcacgcctgtaatcccagctactcagggggctaagttaagggaattgcttgaacctgggaagtggcggttgcagtgagccgagatcacaccactgcactccagcctgggcaacagagtgagactctgtctcaaaaaacaaaaaataagagagaagcagaggaagattagaccggcacatacagaaaaggccacgtgaagatggaggcagagattggaatgatgcggtcacaggccaggaaacaccagggcatggcagccaccacctgaagctgaagaggaaaggggcaggttttccccgacagtctccagagggagcgcggccttgccatcatcgtgatcttggacatctggccttcagaaccatgagagattaaatttgtttgaagccacca

SEQ ID NO: 240886 - DNA, 456 bp, Homo sapiens
aattatgaatgggttattatcaatgttgtacttagaatttcttttcctctcctagtttttatttctgcgggtatagtcggtgtatctatttatgggttacgtgagatattttgatacaggcatacaatgcataataatcacatcagggtaaatggggtatccatcacctcaagcatttattctttctttgtgttacaaacaatccagtcatagtcttttagttatttttaaatgtccaataaattattgttgactataatcactctgttgtactatcaaaaactaggtcttattcattctatctaactgtatatttgtactcactaaccattcccacttcccccttaccccactgcccttcccagcctttggtaagcatcattctactccctatctccatgagttcaattgttttaattttttcagctcccacaaataaatgagaatatgccaact

SEQ ID NO: 240887 - DNA, 249 bp, Homo sapiens
aaaaattgtgtttggctgggtagaaaaaaaaaaaaacatagcatcaattagctctgtctgcaatgggttcagtagacagagtagtagcatgcacacacacatacatacaaacataaaacatgtatatttgcacaaatattatatatatgtgtgtgtatgtatatgctatatcctgtccctttcagcttcaaaataataaagctcttttttaaaaataatttggctctttttaaaagggttaaactctta

SEQ ID NO: 240888 - DNA, 233 bp, Homo sapiens
tctaataatcatccttgccataaattctaaatctttctctgaaattagtgtgtcttttttaaggactgtgcttcttgtttaatccagtctgacaaaattcgtcttttactagaagaattttttctacatcggggtatctactcttttggcttccctgggtcatactggaagcagaagaattgtcttgggccatacataaaatacactaacacgaatgatagctgatgagctta

SEQ ID NO: 240889 - DNA, 274 bp, Homo sapiens
gtagagatagggttttgccatgttgcccaggctcttctcaaactcttgggctccagtgatccaccttcctcagcctcccaaagtgttgggattacaggcgtggctgggcccaaaataattatttaattaaatcgaataacaaggccatattcaagtttccccgtttacccctaaatatctcttgtagctggtttacttaagccaggacctaatcaaggatcacacgttgcattttattgttatttttcttaaatctattttaatctagaacaat

SEQ ID NO: 240890 - DNA, 522 bp, Homo sapiens
cacaaatcataacaagagcctgagtgtagaactaatatctatgaggagagatgggtttccccaaggggaaagagtgaagaacacatgatgaagggaaatgtgggtaaagtccatgacgttgaggagaaaaaatgcagtgttcttttaggacacctccttttcaaagacctaagacttcccactacattaaagttatcatctttatacttcccatgtacatcactgtcctttagaaagactttctgatttaaataactacatgttccctcccaataatctatttatgtgatctttaacagagtggggacacagtagatattcaggggagaagcagtaaatataccacattatgctgcaaggactctggtgtgaacagagcccaaaatggaaatatgatagattgttgaaagtggagaaaagacattaaaatgagtggagaagaaacctgaaagcgccgcagagaataagactaaaatttccaaaggcctctcagggaacagcaggtgacatatatcaagaaag

SEQ ID NO: 240891 - DNA, 381 bp, Homo sapiens
gagagtcttttgttgttgttattattagcagtgtcttactgagataacgtttccttcctctgaagcctgcatgcttgctttaatttagaaagcacagcgatggtttacattgaagagaatgattggtgttagcatgaaccactcctagatgatgtatggaagtagtgcttcctctgtgcaaaacaaaacacgtacttggaatgttttctgcattacttatatcagtcagtatttgtcatctaagttgatttatttgcatcctttttttttcttgtagaatttactaagtgacttttaatatattcaataaccattctccttgataagcactttactgctggcgcctaaaggtgcttatacttagaatctgaaagacttatt

SEQ ID NO: 240892 - DNA, 490 bp, Homo sapiens
gtattcaatctaaagaacacagagaaaaaactgaacagaaaaataaactgtgcctctgacatacatgagacatcaagtgcactagcatatgtggtgatgggagtctcaagagaacaggagagagagaaagacacaggaataagatttgaagaaataatagctgaaaatttcccaaatttgatgaaaagcattaatctacagattcaagaagatcaacaaacaccaaataagatgaacacaagaaaaatccaaacctggacacatcatagccaaactgttgaaagacaaataaaggagcaggagaaaattgattcacagtgtccagagtaacagcaatatgataaatggctgatttctcatcagaaactatggaggaaagaaggtggtggaatggcatattcaaaatatgaaaacaaaaaaaaatttgttagccaagaatgaaagcaaactaaaaacattacagatcaagagaaactgaaagaatctgggg

SEQ ID NO: 240893 - DNA, 373 bp, Homo sapiens
gcaactgaagtatgtagtacttacataggacaggggtggttattgtcatgtaagatctcttgggaaaggtaatacttcagctgtgtcctgaacaatgaagaaccatagatgtcaagatctggggtaatgagattatggggagaaggaacaacaaattcacacaattagtgaacagtagtgttacttagtaaatgacaaactgtgaccaataggtaacacagcacccatgaagtcaaattaaggctatcataacattctttttttttattattatactttaagttttagggtacatgtgcacaatgtgcaggttagttacgtatgtatacatgtgccatgctactgtgctgcacccattaactcgtcatttagc

SEQ ID NO: 240894 - DNA, 585 bp, Homo sapiens
catgagttgctgccggtggggtggcttcacccatgcaccaggtgggcaggagttctgggtgtcatgtggtgtggggagctggaggcctgagaaccagggacccctccctcagccagatcgccaagggtcttgggaccagcaggacattcacacatctctctaggagggtctgggcatggaaggatgcccagttgtgaagagcaccctctcaggatggggcacatacagcagggcagtttctcagaggccctcttccttcaggaagccttcctaggattttgttgttgtttgtttgtttgagacagggtctcactctgtcacccaggccagagtgcagtggtgctacctcggctcactgcagtctcgacctcctgggcgcaagtgatcatcccacctcagcctcctgagtacctgggatgacaggtgggcaccctcacacctggctaatttatttattttttgtttttttgtttttttttagtagagatggggtctcgctatgttgcccaggctattctcctgagctcaggtgatctgccagccttagcctcccaaagtgctgggattacatgtgtgatcactgct

SEQ ID NO: 240895 - DNA, 406 bp, Homo sapiens
actgaaaaggaaaaacatttggtaggtaacagatcagtggttgccaggggttagggtacggggagcataagggagattttaggggtgatgaggctcttctacatcttgcttgtgattatagttatttgaatctataaatgtgttaaaatgaggacaccaaaaatgtcaattttaccatatgccaatttgtttaaaataaaacaaaataaaagaaacaaatgtcaatgggaagcataagtactttttatagtaaataaggcaaaaggggaaaatgttggccgggcacggtggctcatgtctgtaatcccagcaccttgggagactgaggcgggtggatcacctgaggtcaggagttcgagaccagcctggccaacatgttgaaaccgcatccctactaaaaatacaa

SEQ ID NO: 240896 - DNA, 650 bp, Homo sapiens
tttccaaggaaaagagtatgattggtagcagttgattcactcaggtggtagaaatcacagggtttatttagaatgaaaaacacaaatgcttgtgttgtttcttaagatggaaagccacactaggtactgtacataccagcatgctgtttttcttcacttcaaggcagatttgtattctcaaacaaattaagaaaacttcctgacagtccacaacagagggcccaaatgagagaagggggtctttcttgaagacaggagaaggatcgcctactaacttagaagggagaggaggcaactgctggacccagagcaccttaacaggagggaggaaacctccagggcactacctgactgcggaggaatgacaagaatatgataatgacactacttactaaaggcagaagtctatgagtacatcaggaaaaaagcagttttttggtactcatttaataagacaatgaagaatcctagccagagaaacattaagaactgagtagtggctcatgcctgtaaccccagcactttgggaggctaaggtgggaagatcacttgaggctagaagctcaagaccagccttagcaaaataacaagaaaccccctctctaaaataataaaaaaattagctgggcatgatggcatgcccatagtcc

SEQ ID NO: 240897 - DNA, 303 bp, Homo sapiens
atttataaattttgatggagaagaaaaggataatctgatatgagttggactgatgacagaagtacaagataaattttcaacggattttagaattacagttaatgcagttcaattaaattcagcaaatatttatttagcacctgctatgggtaaagagttgtatctttgctataatgattcattaactgaatgtacatttattaattttctattacatgtcaggaactgcactgggaatacagcaatacaatatgatatggactcatttcttaaggagctggtaaaggaatgttgctgagcttt

SEQ ID NO: 240898 - DNA, 791 bp, Homo sapiens
accaaggtacagaataactaagtggggtatgcagggtctggccagaaatacaatcttttgattgctagcccagctgctttccttgttatcactttgtggagcaggctggacattgacaatgagttctgagactgagtggaatgggagacccctcccagctggtggtcgagctgcctagagcatggtccatctgtttgggactagggttgagctccaagatggaccaatcaaccccaccaagaaagaaaccccttctatcaccgcggagtgtaccatagctcctgtcagccgctctggaagtttttgccaccagaagagagatgcagagcatcttttcttaccacagctgaactgagaacatatgtttcatccatatatggcaccttacttattaagcttgtgtccttgtcctttctaatactctggcaccttgcccatcagatggctgcccctttttataagataagtgcctgtatggctggctgttctgattttaagtcatgagctttgacttttatcagaaatttacagcttggttttcaaaggacttagttgagtgcaactgcatgaaatggtagtgttaaattttatactgtagaaatgttgaaatggaactctataaaatgtgcgttttcagtgtcttttttgaatggttttatttgtgtgttttatcagtcttagacatttttattactcaagtaatctgttcattgtagaatgattagaaaatacagataagcaaagagagagaggaaaagaaaagaaaaaaatataggtctactgtaaataat

SEQ ID NO: 240899 - DNA, 504 bp, Homo sapiens
tgccagagaattcaggcccttcagagccagctgagatgtgctgaatgctaagtgattcctcatctgattccttgctccagaatacagggacttgaagacagactacatttttcctgagcgagacaatttggtctcaagggaaaccaaactgtagcacagaatgtgagagagagcaacaataggatggaatgcataaaatccttccccagagcaagcttctcccacttcttgaaaggctttatttttatatagcctctggaagccagacaaagtatcacttagaaagcgagcctcacagggcggctctggagagatctgaaggctgcgttcataagttcagaaagaacaaagtttatgctttaggccgctagaccgtaagctctttgagttcagtttttatcttcattgtatttcaagaactgtgcaagtatctggtacctggaatatgctcaataaatgtttgaataaagattaaaaaccctgaatggattgaaaagatctgaa

SEQ ID NO: 240900 - DNA, 275 bp, Homo sapiens
aactaatcctaaaaatgcttggtttgaatatgaaaacttagggagattttgtcaaaatagtactcaacataatgtcaacaactgataatttatgactttgcaagaaataatatcataacattgtatttgtatcaaattaacagaaagttgtatttaatttaaactatctttaatgtaattttacaccttcttagattatttcttttgaagcatggtcatcaaatgttacgaagaaggtcacatgctgttaagatcagagcaatagcatctagata

SEQ ID NO: 240901 - DNA, 520 bp, Homo sapiens
gagcctcagacttccacataacttttcaattttctcatttgtcaaaatgagaattgcagtcttttctctaattgtgaagccatatgttcagggaggggctttgaaagcaccaatattgtacacatataaggcatagttactgctattactatttattactgcagtttccaatagtatttgacagtgcttcttaagtttttacatgcacatgaatctcctggggatcttgttaaaatgtagattgtgattcggtaggtctgcattggagacaagagtctgcatttcttacaagcttgagaatgataccaatgatcctagtttatttgatgtttattttaaagtagaggttgacatggcagtgtggagtcaggggttttcagggactcactaggaagtaagggagacaggacaaaagtctagggtcttccatttcaggttggattgatgaagccaacagtgaagattaaggggcaagggctgtgccagtgggtcctagccagaattctttcccatccccctg

SEQ ID NO: 240902 - DNA, 424 bp, Homo sapiens
atcaaagattgatcaagtgagatggaacatagcaagttttctgctttaaccactttagttaagatcccaaattattaatttctgtttttttctctgccatctctagctcatcattggcaaagggtaagttaatgctaaacaggtatagacgtgcattttatctaagcatttcaaaatagcacgctaaactttaattttgaaaagtttatacaataaaaatatgtaaaagtagaccaaatattgtaatgaatccacatatactctgtgctctatttttaactcatggccaatctaggtttttttgtttgtttgtttgtttgtttaactgcctctcttcccatataatttgaaacacatccaagacatcacatcattttactcatatgtactttagtaggaatccctaaaagctaaggactcttta

SEQ ID NO: 240903 - DNA, 390 bp, Homo sapiens
ttaaaggaaaatttgtataattctaccatcgtaatttttttttgcttttccatgttctcctttctttatccatatggatatatgttttttaaatatagatataataggctgggcatggtggctcacacctgtagtcccagcactttgggagggaggctgaggcggacggatcacaaggtcaggggattgagaccattctggccaacatggtgaaaccccatctctactaaaaatacaaaaattagctgggtgtggtggcgcatgcctgtaatcccagctaccagggcggctgaggcacaaggaattgctggaacccaggaggcggaatttgcagtgagctgagatcccgccactgcactccagcctggtgacagagtgagactctgtcta

SEQ ID NO: 240904 - DNA, 567 bp, Homo sapiens
gttaaattgcatcaaatgatatttatcattattggtcttctatactgtaacagaattggtaaccaataatgatatatatgttaaattgcatcaaatgatatttatcccagtgtgctgagattattttttttttttactatctttaaatctttttttttcttttgcctcaaaaagtgacatttattcaaagaaaaaaaaatgacaagatgtccatcccttggctcccttccctcccctctcctgctgttcctcggacccctgagattgagccctggctggggttgggtggcaggacagcccctcagatgaggtcggcaacattgaggggcatttcctcaatggaggtgttgtagagggtcttgatgtctcaaagagtccttttgtcttcttctgtcaccatgttaatagccacacctttatggccaaactgtccacctcaaccgattctgtggatataattttccctattggtgggaaggtcatagctgatgactaaagaaacttgctgcatatcaatgcctctgacctacgtcaagaaagacaactcttcagcatgtgcacaacagg

SEQ ID NO: 240905 - DNA, 417 bp, Homo sapiens
gctcttaaaggaaagtgaacgtttggggctactgatgaaagtatgaaaaacggtggccaaactctgctttgagacttgaggcaaaataacttattaagaaaattcttttcaaaatattctatagtttgggctgggtgcagtgggctcactataatcacaacactatgggaggcaggggtgggaggactgcttgagcccaggggttcgagaccagcttgggcaacatggcaaaactccgtctctacaaaaaattaaaaaattagcccaatgtggtggcacatcgactatggtcccagctattcaggaggctaaggtgggaggattgcttaagcccaggttgaggctgcagggagcagctgtgtttgcaccactgtactccatccagcctgagtgccagagcaacactgtctcatttaa

SEQ ID NO: 240906 - DNA, 405 bp, Homo sapiens
ttttcaggagttttggggaaaagcattactcactaataaaatgtgaagaggaaagaccttcctaattttgctctgccctctatctttctgcttcaaattctgtcattggaaaacttgccaagtagagctacagcatccatcttgcaaccctgaagcaccaagatggagaatgaacatcaatgtgttgaggatagtggaaggatgggaaaagcctttctctatgatgtcattgttgagccactgagccaattaaagacatccaaattgtggacatttagttaaatttacaaaagttattatagcctaaaccaggcattggcaaactatggcttgtgggccaaatctggctgtttttttgtttgtttgtttgtttgttaaataaaattttattgcaacacagccatg

SEQ ID NO: 240907 - DNA, 910 bp, Homo sapiens
cgattccattctttatctcagttcaaatgcctcatctctcccaaagaagctaaggaagaaatgttttgtttcacctcgaaagccatttatatcaggctcagggctctctccatgtcctacagcatcattctttcgaccatgagccttgcatactcctgcctggccatataagtggcattcttaaaggttcatttggttcctcaaacgtattccacattaaataatatccacatgttggcttgttgagagaagaaggtaaacagttgggggcatcaacaaaaaatcaggtgaggggagaaaggagagatagtgagtgtggccccttaggcatgctgagttcagttacaacagtcacacttggactgtatcaaagttgcccactcatccaccacagctactcaaagacatttaactcgctagccattatccaaccgcatttaccagacgctcagtcttgagggaggagggtaacgcagtaggggatgcggagtattggtgtcatcctacaggttaaggacaaacatgcccactacaaggacagggatacatcaccaacttcaattcagcccagggttcatgtagtaaggggtgggtgattcactcctgtgggctagaatggagaagagaggaaaagggaggcacacatttcattcactaggacccaagatgacctgccgcctctctcctgcccttctcggagccccccaccctcccttagccccagtggggctggaggcacgaacagacaaggcaaggggagcgcagtccgtcaaggtccacagctgcacacaaagcccttcaccttctccttgccttccaagctcctccctgggcttggtttctccgagggtctctgatgcccccttcggtggtcggcgggacggtcctattccctcttgcatcgctgtct

SEQ ID NO: 240908 - DNA, 460 bp, Homo sapiens
cgattccattctttatctcagttcaaatgcctcatctctcccaaagaagctaaggaagaaatgttttgtttcacctcgaaagccatttatatcaggctcagggctctctccatgtcctacagcatcattctttcgaccatgagccttgcatactcctgcctggccatataagtggcattcttaaaggttcatttggttcctcaaacgtattccacattaaataatatccacatgttggcttgttgagagaagaaggtaaacagttgggggcatcaacaaaaaatcaggtgaggggagaaaggagagatagtgagtgtgtgtgtgtgtgtgtgtgtgtgtgtgtgtgtgtgttggaagtgggggttgttgtaaagggaaagttgatgtcaaaagttcagccatgcccaagagagaataagatggcctcctattgaacgagatcataaatatgaagtcaggc

SEQ ID NO: 240909 - DNA, 524 bp, Homo sapiens
gatgttggcaccaatgtttgttaccattctgaaaatcctagagtccttaagaattattctaaatctattcagtctgtgctctgcaaatggaataacaaagcccagataacagcacatctgtttacagcatgggcttactgaatattttaagcccattgttgagatatatctcagaaaaaagatttatttcaaaatattattgctcattgacaatgcacccagtcacccaagagctctaattgagatgtacaagaagattaatgttattttcatatctactaacatagcactcattctgcaacccttggataaaggaatactttgaactttcacgtcttgattatttaagaaatacatatcataaggctgtgactgccatagatggatctgagcaaagtacattgaaaaccttctggaaagaattcaccattctaaatgccattcatagaaagaggtcaaaatatctacactggctgggcatggtggctcatgcctgtaatcccagcacattgggaggccgaggc

SEQ ID NO: 240910 - DNA, 424 bp, Homo sapiens
agacggggtttcaccctgttagccaggatggtctcgatctcctggcctcttgatccgcccgcctcggcctcccaaagtgctgggattacaggcgtgagcctccgcgcccggcctactgcggctcttctatcctggtgttctttgaatgcctatcttccttttgtgccacagaacctctcacgcccgccacaggttgctcatttccttggttgttctgaactttaaataagttaatgtatgtaagagtgccataaatgctcagtaattgacatctgttattttcatcagtaacatcatctgaatcatctgtattgtctatttttaacaactgcatttttcattgtccaaataaagtcacatacatttgaacattatataatgattgaataataaaattattctgctattttacaataaaaattaa

SEQ ID NO: 240911 - DNA, 533 bp, Homo sapiens
cctgtgaagtagacactttcatttttacagacaaggattatgaggcttagagaaatgaggtagtttcccgcaacatcacactgctggacagagatgtacacacagctcctgggactcaagtaggtgggttttcccagggacacatggcttcatgtgttcttctgggaatggcaggtgacgcttggcagacgagacaacaaagcaaggctcatgtaagaaagctgggatgtgctcccctatagtccagaataatagacctgggtcctcacctcaggaaacgggcctccacttcctcactgccaaaggccacactggcacctcccaagggagctggggagctggtgaaggatgagtgcgaggaactcagccaccaccagagccacagggagagcacacctgggtccactgtgcttattgctgagctggctgtcatgtccaggctgtcccctgccccgagtcctgtgtatacatctgtgggtgtgcacatgtttgcatgaaggaattcaggccttattaaatattctcagaggggg

SEQ ID NO: 240912 - DNA, 991 bp, Homo sapiens
cctgtgaagtagacactttcatttttacagacaaggattatgaggcttagagaaatgaggtagtttcccgcaacatcacactgctggacagagatgtacacacagctcctgggactcaagtaggtgggttttcccagggacacatggcttcatgtgttcttctgggaatggcaggtgacgcttggcagacgagacaacaaagcaaggctcatgtaagaaagctgggatgtgctcccctatagtccagaataatagacctgggtcctcacctcaggaaacgggcctccacttcctcactgccaaaggccacactggcacctcccaagggagctggggagctggtgaaggatgagtgcgaggaactcagccaccaccagagccacagggagagcacacctgggtccactgtgcttattgctgagctggctgtcatgtccaggctgtcccctgccccgagtcctgtgtatacatctgtgggtgtgcacatgtttgcatgaaggaattcaggccttattaaatattctcagaggggggcatttggctctaaatgtatcatcaatttatcatggaatcttgggggctgctgacacccctggactctccaggcactgaaccatgaggccctcctggaagcacagcttcttctatcatctacttttaaacaggaatttcctaatttattctgtgcatgggtttgcagtttcttgtgctgtgtgtgtgctgtccaagtggtaccataataaaagagaaatgactcccgagaggagtcttttcagaaactgtaatctggggctggccaggaggggcccggagaaggctgacccacccaaagaaggggaaccagagaagccatcagagctgctgccgggctaccctgggtcccagtgtaccttctaccaaagttccatttgaacagattcttctgtgttctccctaagaagcctcttatcccagaaacactccctcaatggacataggaaaccctggagac

SEQ ID NO: 240913 - DNA, 444 bp, Homo sapiens
atgaattcaatgacgtatggaaggataatactgaattcactgtcttctacttcttgccactaaacaacatatcagcttgcttttctactgaaattgcataaaacagataggacagctaatttaaacagttgtttgcacattcaatatttataacccaaatcttgcatgactgactgcaagcagtgagttagaaggtttagctcagctgctgcctagagtgatggatggccttgaagaatttatagatcactgaccagatcaatcacataacaaaatgggaaaaaaagatcgaccttaaactagatttccaacatttccatctgtatgcaaaactgttgcaggaagaaatgtatcataaaacataatgtgaagctacttaaaaataataaaaatccaccagaaatgatgtagaatgcaaataaaaaagataaggtggctggataa

SEQ ID NO: 240914 - DNA, 427 bp, Homo sapiens
aaagaaagaaagaaattagaagcagatggggcagttcagcctcttctcgcggagcggggctagacggagtcaggggcggaccgccacagcctgcaccaatcaggacccggttgataggcagagcctggcgacttcgaagactcgcccccagtcaaagagccccggggattcgtttccgtacgcagcctggaaaccagcctgggcctatcctgcgcgccgctgcgggctactattggctgccaagaaaccccgcccatcttcctgctcattggccggtgcggtttacgtaagaggagcctgttgctgagcgaaaagtctgttctgcaattttcgctaaggagttgttaacgctgaaaccgcactgggcgtcctggggtcaaaaaaacaatactagccacagtttattaaactgcaactaaatgccagg

SEQ ID NO: 240915 - DNA, 639 bp, Homo sapiens
ggcgtgagccactgcacacagcccgtttgtcttaggatataaatccacctgcccaggaaggtctaggatacataattctatttgaatcaagccaaaaatcttaaggggagtattgtccacttaaagacactcagtgaatgtgaattgtatgactactgattctgcttataatacctgttcaaatatacatgtaactatcttaaaatcttaacaactgtaccagaattttagaaaaataacttcacatttataagctggagcctgtcagagttcactttgaccaatgtgtcctataggatctattactcttatatttaatgttttgacaaatgtactataataatatcaaaactcacatagcaaataagaataattttttagtatgtgtaatattttccccaaaggggaaaagcccagatagaatgaaaaaagttcagtgacttttaagtgcaaataataaaatataatccataaaatggaaattgagtttcataaaaggaccaacacaatagtgagaactttaacaggaattttaggaagaatttagaccctcaagataaatttaaaatcatacggttttctgacgttctaagcaaatagagctgtgcttattctatatttgcccagcccaacatattc

SEQ ID NO: 240916 - DNA, 511 bp, Homo sapiens
agtttcatagacccatcctgtaagggctcattgcaatgctcaccttttttctgggttgtgggctcaacaaataatgtgtaatttagagttctctcgaattccacttttgctcagtttttctttgtcagcacttattgtcagaagagtttaagtgctgtacctgcctgtcatgcaaggaattaagttttgacctactcgtcaagtgtgcagtgtgcaagtgaccgcaggagtactaaaagccaaccattgacaagggaggccaaattttcaaggaatggaaagagcacaggccttccagtgaactcctggctttaaattctgttccatttagtcactagctccatagccttatgtaacctctcttcagttttcttttctttaaagaaagggataatctcacctttttgtgaagaataaatgagatgagattatccctttctttaaagaaagggataatttcccctttttgtgaagaataaatgagatgatgagtaaattgcctcacttggca

SEQ ID NO: 240917 - DNA, 395 bp, Homo sapiens
caccgccaggctccagccccgggctgggtcaaggaattcgagggatgcaggctgaacgcaccggttgaaactctgggcgccgcatcggcactttgcgccttggtgggctttgcgctcggaagacgcgtccacgcaccattttcccaggcgttgtgcgggtttcttaaacctctcagctggtgcctcggaagagtttctggaagctccatctctactgcctcccctcccccccttttgattttacccccgccaggagcttctccagccccacagcgtccgccctgtgaggggtacaggtgccgctgtcccgccggctgccgccccgtccgcccacgcagcgcctcctccgggctagcctgggggattgacccagcgccgctgcttctcgaatggtc

SEQ ID NO: 240918 - DNA, 399 bp, Homo sapiens
cctttaaagggtattgaatttttttcttgtaggcagttagattagtaaggaatactcttgatcctgtcagactttgttttatgctttgttaggatgggtttattttgcttttgtccttagtcctagagcatggtccttactctaggacatgacccttatttccaaagcatggcctttttagggttgtaagtggttgaccaaggtaagcaatgaagtattcccactatagttggattggaactccaatgtctccaaaactatgcaacctttattatcttcttcattaacagcagctactctctgttagaccttacagagcctcactctacacatgtgcagcccaggccttgccaagacccaagggaaacccccacacagactcttggagcatccctccac

SEQ ID NO: 240919 - DNA, 505 bp, Homo sapiens
aaaaataatctctgccttcaggagcctcaagtctaatgagggagatgacatccactttataaagcctagagatatgagtgcagtaatctctcaaagtggcagaagtgcatgggggactccgagttgggtggaacttgagctggcctcacagggcagggtaggatttgggttggtggagggcagagagaacggctgtgtggagcaggggtgtgttgtaggagaggcactctttggagctctttgtatggagatcattgagggtaggggctgtttgtgttcatttttgtattccctgaactcatagagcctggcactttgggagtattctataattgactgttgaatggaatgatcgtttcgtaacctgttaactgggcctgatgtgttagaaaatatgtaaaagtgcagcctgtgtattagaaaatgtgtgaaagtacagcctatgagcagaaagaaaatcttactgaaaagcgatcccacgtacacatggagcctggtgcggccg

SEQ ID NO: 240920 - DNA, 350 bp, Homo sapiens
cctaattcatggattcactgaattccatttttaatatctcatgaaaatttaactttccaaagtcccatgaattatattattttaaatggaaccagcttttaaagattagaagctatttcaagtgttaatttttgaaacatctttatagtttaggatgtaacaatgctgtttaaatccattaaaccaccgaagagctatttcttccaaattaataagaaaatttttgtagatcatgcctggaagaaataattttttttcttcatagttttgtactcaccaggctggagttgcagtgagccgagattgcgccattgcactccagtctgggtgacagggcaagactccatctc

SEQ ID NO: 240921 - DNA, 626 bp, Homo sapiens
ataacttacaaatgtagttaatacgacagacagaccacagtttggaaaatgagtaaaaaacaatattttgaagcagtaatataaataaatgtgtaaagtattgatctgagaaatctgaaatatgcattaaaaaggttttgaaatcttcttaccatcaacattcctacatcttttgaaataacagttcttctgtctctctgccataaataatttacttagttctttctcctaaatttctaaattctaataacaaaattcttaattatatctaaaagcaaaactatctctttgcattactgaaatgtcatggccaatggtcagttgggaataaaagaattaacagctggtctgtaacttgttttcttctctgaagcacctgggaataaatagtctaatcaaattgccctcaaaacatactagttgaatctcttgatagcatttattagaagaatgttttattatttatggaattttttagcaagatatacctggtctgtctaggttacttatgacaaacacacctgaaatttatggatgtttgtggtatgatactctggaaaaatgtttcagttagagatggaattatcagagaaataaatattggtatttcatggttgtgctgatta

SEQ ID NO: 240922 - DNA, 451 bp, Homo sapiens
gtagcaggaaagaaaaataaatgagtagagcccttatcaagtgggttttgcagaggatccattctttgcaacttataataggaaaatcttatattggaagaaatgcatttatactacaaagcttgaaaaagtagttaaatgtatcttctcaaaaaattttgttcactgaattaggtctgaaacaaaatggttgcatataggtaaagagtgcaacaggcccatccatgtcttctcaacatctggggggtttgtttttattattttatttagaatttaaaagaaaaaaaattgatttttttttcaatttttagtccaaaatctctaatggttttaataataaggctattttaaacattcttaataaatctgtctattaataaatctgtctaaaatgctcatctatgttattttattatccagaaacaacataaataaagccactagaaaagtc

SEQ ID NO: 240923 - DNA, 358 bp, Homo sapiens
gcaaggctgaatttttgtgaaaaaaaatttttccctttcaaggttactttgcatgttcatttaaccttgctgtggggagtaagaaagtttggacacagaaataaatttgttcccaagtctatagcatcctgagtgcagccccagttatccttccccgagccctttgcattttaatattaaatctaggacccaatgaagtgaataaataatggttgaatttctcatgataggaatcagttaagaactcaaataggagaacagaggcaaggtgttttcaaatcataccacgctgtgatccaccttttgtattcagtaaaactaaccctatttgggaatgtagtatcaaaaaatcagtaag

SEQ ID NO: 240924 - DNA, 964 bp, Homo sapiens
agcacccttcaagaactagaatgcctgggaaacatggctgtcccagttaagttgaggttttatctgaaacccattttgttttcaaacatgttggaaatgttcctaaaaatgcctgagtgtgctttgggggtgtgcttggtgagtatgctttcctacccttgagtgtttgagacttgttttcattatgttaggggcttatgataaagtcttcattttcagatctttatgtagaagatatatataattgagcagattttgaagtttcgctcaaatcttgtttgtatttaagaatactttttcttattcattattctgattaatttttcttttaaaactggcaacattttgcaggtagtttatggttttgcaaattagaatatgggtcattcctctaaatagaaacagtgtttttggtcttgatgggtctgtgaattaggtgaaactagttttatctttctccttctacttctaggggaaagtctttacctttccccccctgcacactcctcccaccccacccttccaagcttgatctcagcaaattcattgacttccaaaattcatttatatgactttaatcttaagtcatctttatgaaaatggcttatctttaacttactacctgtttcaggaatagttgcaggcagagcttttttcttatttttcttggtatgaaaggctttgtatcctgctaaaggaatttcaggatttatagttataagtagctatatttttagtcatgagctttgctatggtttgaaagtgtccgccaaatttcatgtgttggaaacttaatccccaaatccatatgttggttgcatttggaggtggggcctgtgggatgtaataagggttaaataaggtcatcaggggggttcccattgatgttacaggtggctttataagaagagagacctgagctagcatgctcttgctctctcaccgtatgatgctctctactatg

SEQ ID NO: 240925 - DNA, 660 bp, Homo sapiens
tattacagttttagacagaggttctgtccctcatcaaaaaacactggtcaaatcctacactaagtcctattttaaagaggaaaaaaaaaagtgtatgccaagctaatgaaattccagtatggtctttttttttttttttaagagatgggtctctttatattgcccagtctggtctggaattcctaactcaagtggtcctcctacctcagcctcctgagtagctgggattacagacttgagctaccacttccacctatttatgtgtctgcaattctgtgacttgcattgtgccaatttcaatttcctggttttgataatgcagtatagctaagtaagatgtcaccactggggaaagctgggtggtgggtacccaggacctctctattatctttcaacttcttgtaagtaagtccacaattatttaaaaataaagtttaaaaaaacactcatgacatttatcattttgcagagctctaccaatatccaacagctccctgttcctcctagatcctaatattttgatattggcccttaaaacttgcagatacaggccaggcatagtgggcatgcctgtaatctcagcactttgggaggccgaggcaggaggaatgcttgagcccaggagtttgagaccaacctgggcgagagagtgagaccccc

SEQ ID NO: 240926 - DNA, 511 bp, Homo sapiens
gtatcccaggtagctgggattacaggcgcatgccgccacgcccggctaattttttgtgctttagtggagacaggagtttcactgtgttagccaggatggtctcaacctcctgagctcaggcaatccgccctcctcggcctcccaaagtgctgggattacaggcgtgagccaccgcgcccggcccaaaagaacttactttttgagggagctgttgttcaaagaagggagcacatgcaagctatcctagaacatatgacaagaaactcaatgactttatagaatagacaaactaacaaagaaagctgaattctgaagcagggaaaggaaataatttaaacagtctattagattggaataatagaaaaattttaaaatgcaatctaaagatctttgtttttcttcttatgtttgctttacttttctgtacgtggaactaaatttcactgacaacaaaaatagttgtgactattgtaaatgacagtcattatattaaataatatataaaaatgtc

SEQ ID NO: 240927 - DNA, 419 bp, Homo sapiens
ttcccatattcttcctctgagattttcttaatgaatatattgatctagttgatggtatccaatcacttttacattccatgttttaattttgttttggaagtttatatttttatgttatatattttagggtatgctaccacacatccattaattgtgttttgattttttagtatatattataattgtgcatgccaatattttaactttatataatttaagacattgtggagcaaaatcatatatgaattagccatatgtctttttctgatagaattatctgtatgtttgtttgcctgtataaatgttatccttgtatttttttaataacgtgtatatttgttgtgtaagtttgttgtgaatggttttctaatcctgtgtagatgtgaagtcataaaattattgtaatttcaacatcctat

SEQ ID NO: 240928 - DNA, 209 bp, Homo sapiens
caggagataaatacgcagtttataaaagttttttctaaatgctcttaaaaaaagataaaaacccagagaatattaattagttcagtaataatagaccggtaattctgtttgtttcaaggagtattaggggaacagatttgaattaaccaagcgtttactatgaacagctgtgaagaactgcagtactggcaaaacttttaaaaaggagg

SEQ ID NO: 240929 - DNA, 426 bp, Homo sapiens
agtaataattacgtacttcactttaaaaagttgatgcatgatgttagctctttaggtattcgctaaaagaagagtaaaaatatatttaacatactaaatagcatatggggagatatcaatagcaaatgtatatatattcttagagatgggatcttgcactgttgcccaggctggagttcattggtgctgtcacagctcacggcaacctccaactcctgggctcaagcaatcctcccgcctgtctctacaaaaagtacaaaaattagctggttgtggtgacatgtccctttgtcccagctactcaggtggctgaggcaggaggaccacttgagctcagaaggtggaggctgcagtgaaccaggattgtgccactgcactccagcctgggcaacagagaccctgtcttgcaaaaaataaaataaaatt

SEQ ID NO: 240930 - DNA, 414 bp, Homo sapiens
tgcaaacttcgcctcccgagttcgagcgattctcctgcctcagcctcccgagcaactgggactacaggctaccgccaccacccccagctaattcttgtatttttagtagagacggggtttcaccatattggccaggctggttttgagctcctgacctcgtgatccacccgccttggcctcccaaagtgctggggttacaggcgtgagccaccacgcccggctgctttttttttttttcttttttattaagagcatacctctcctgtgagaatatgttcatgttcattttctacatggctctgctctttatgaaagttttctatcatttgacatacaccgacatgggcattctatcattccacatgcactcacatgcagaccacagatttggtggtcacagtactgcctaggctg

SEQ ID NO: 240931 - DNA, 3882 bp, Homo sapiens
  misc_feature (487)..(487): n is a, c, g, or t
  misc_feature (506)..(506): n is a, c, g, or t
  misc_feature (972)..(972): n is a, c, g, or t
  misc_feature (1428)..(1428): n is a, c, g, or t
  misc_feature (1437)..(1437): n is a, c, g, or t
  misc_feature (1545)..(1545): n is a, c, g, or t
  misc_feature (1632)..(1632): n is a, c, g, or t
  misc_feature (1654)..(1654): n is a, c, g, or t
  misc_feature (1699)..(1699): n is a, c, g, or t
  misc_feature (1949)..(1949): n is a, c, g, or t
  misc_feature (1963)..(1963): n is a, c, g, or t
  misc_feature (3404)..(3404): n is a, c, g, or t
  misc_feature (3407)..(3407): n is a, c, g, or t
  misc_feature (3622)..(3622): n is a, c, g, or t
  misc_feature (3650)..(3650): n is a, c, g, or t
ttgatggtgacatgtggaaggaaatagacctgtggctaagttggggaataactaagaccgtggtccaaagtcagagaaggcctcctggaagagtaacatttgagcaaatgcctgaataaagctagacgttcattgaccagcagagtcttttataactaccccagttccgtggaaaacttgggctggtctaagtactgtccaggcacagtacacagggggcttttgatcttctgaactaccagccccttcagtgtgttcagaaccctaccctctatctctagggcttatgagtatcctggaatgatgaaaggagaggttgttccgatgggaaggtcacactgggagctggcaaatctcagggcctctgcaggctgaacatccaataggtagcatgctgattatgatggacaagagaccctggccagatgctaccaggaaagacagcaagtgtgatccccagaactttctggagcagaagctgggcaanctaatgctgctcagatccnacctagttcctgaaaaattcaccttcaggtggaggttgatccagcctcttgtgtctgtccacctgtttaggtcagatcctttcccctggttcctttatctattttccctctcaaattctatctatctttccccctcccttccagcctagatatcctttttctggctcagggactgatacccacccttattcattataaataccaaatgtattttctgtgacctgagatcctcattaaagggcatagaattttgaatttcaaaagctggagggagattctattttcctttgttttctgatgtctcaacttttccctgaaacaaggagtacaaaagaaacaaacacatatttggaatggaggtagagagtgacaaaatgggctggggggtggggggtgactggtacaatgcaaagaataacagtagccaggctgtggcacaagctattctggaggccaggattggtgncacacacctgtagtcccagctagtctagaggctgtggcaggcagatcgctagaggccagatgttcagggctgcagtgagctatgattgcatcactgctccagcctgggcaacagagcaagaccctatctaaaaaaaaattaaaaagtgcttagcagtgagtgtttaactaaaggaagtccataatatgggaggatcccttgagcccaggagttgcaggctgctgtgagctatgatcacaacgcagcactccagcctaggtgacaaagtgagaccctatctcaaaaaagcaaacaaaacccagtaaatattaaaatatcccaagaaaaattgcttaatgttttcaaattattacctcactacaaatatcgagtgagcatctactgggtacagagttagggactgggaaaaccacaggaatctagacgggccccatcctcaggaggctagtgaaaagnaaagcgggnacatgggatgagcagggagagcctccaactgccacggagatgaagagcagcacctcggtccacacagcagggagctttggagcagagatcaccaggaaaaactacccnggcccatacctcggtcaagtgcagtcatcagccaggaaagaacctggctttagccagaagccaaggtgactctggaaggctctgcanctagatctgtgggctcctgcantgctcacagctgggcagagggttctttcttgaaaggagatctggnatggggcagggctgtgactctttcacaccctaaggagggcaatgaaatgggctgaagaggtgagcagaggactcaataacccggctcttagggctgtctgagagagcgtccatgaccaggaaaatcgacagagagacctgaaggtgcagggagagtcagaggagggtgtagagtaggggtaagtgtgtgaaagttgaagccaggccgccctgggatgtgggtttaacccacactctgccacccaccaccngagaggtgagaacnggttgtatcatctatttgtgcttcagcttcctctttaatagaactaggatgatgagagtactaatcctacagctttattggaaagattgcagaaacagtactaatcctatagctacattggaagaataagagaaatagtactaaccctatagctttattggaaggattgcagaaatagcactaaccctaccactttactggaaggattacagaagttaatgttctagaaagcacttagaaaatgcctggacaagaaacagcattcataagtgttaaattcccaggttaaaaaaaaaaatgaaaaacagtacttctaggcagagagcacagcctaagtaataacccggaggatgggaacagaacaggaaagaaggtaacccacatcggtggtacaaatccagccaaatgcccaggtaatctaattcaactcaagtaatatttaatttatttttcaggcacctattttaaggaaaatacattctttggtcttgtctaacagcccaccaagatgtactctgtcattttctccaaaatccattcagatcttgcccagattgactcaaagctgaaaaacaatgaatgttggtgccctttccacagtcccacatccctttctggttaaagctgctatttagttcaaaacgacagatgttgacacaaattcttgctgccacccacaagaaaaattgagtgaactcctgaaagcccctcctccttgtctcagactcagatcttctctctcctctctcctctctctcctctctctctttctctctccgttccctcctggtgcctccagggtggagaccggtcagcccctcccaggccagccggtcatccatcagcctcgagctgccctgccctgcacgttgcggactccaccagctccttcctgcccctctcgccagcccatatggaatgagttgctccatttttactccttatcagaaatggaaatatttcccctgcatctttgtgaagattttctgcatctgtgagctggatggatacttaacccttctcattccaaggtgctgctgggccttggaatcccaatgtggaatccctggatgcggaatcctcagatcacagaagtggggggttcagcacttgggaggaatccagttacaccactccatgactttagaaacaggtccttgaggtagctccttctccattttattaatcttgaacttgcacctctaggatagaaatgacagcaaccagcacattttgggtgcttgctataggcacatttaattcttccagcaaccacggagatagatgttggtatcatcatccccattttacagatgaagctcagagaggttaagtaactcgcccaagtcacacagccagtaagtgacaaagctgagctatctaagccacagctggagtctttccattcactgtaagactgtagagagacataaatgatagngcnctgtgacctaggacagtctttccatcctaacctaccaaattttacagatactgtgagatgggaggaagcagtgagccagcaactttcccaagggtatgcagctagtaaatgagaaagccgatgtggatgcaggcccaggagctctgcagcacacccgtttattctcattttcttctttaagaaatgcaaggtaggctgggcatggtgactcatgnccataatcctagcactttgggagactgnggtgggtggatcgcttgagcccaggagtttgagactagcttaagcaacatagtgaaactctgtctctgcagaaaatttaaaaattagccaggtgtagtggagtgcacctgtagtcccaggtactcaggaggctgaggcaggagaatcacctgagcccaggaagtagaggtttcagtgagccatgatcgtgccaatgcactgcagcctgggtgacagagctagaccctgtctc

SEQ ID NO: 240932 - DNA, 452 bp, Homo sapiens
gagatgcctagaattgggtagaatagggtcactattttattaaagtcagatattccatgagaaaatggggcaccctaggcctcaaaaatcagtttgtatattagttctttggctgtaagcaacagatgtcaactgtggttaatttaaaacataaaaacagggtccaagagcagtggctcatgcctgtaattccagcacttggggaggccaaagcaggcagatcacttgaggccgggagttcgagaccagcctggccaacatggtgaaaccccatctctactaaaaatacaaaaattacctgggtgtggtggcatttgcctgtagtcccagctacttgggaggctgaggtacgagaatcgcttgagcccagggaggcagaggttgcagtgagccaagaccatgccactacacttcagcctgggtgagagagcaacaccttgtctcaagaaata

SEQ ID NO: 240933 - DNA, 430 bp, Homo sapiens
cagtgagaaaagtggcccctgtcatctatttacttatgtgttcaattgcaacacatgtatggcagtttcagacttgttaccctgcacccccatgataaattcatctttaccaagtacggtgcagtgtttatggacattgtatttttacatcagtcttgcagtttccagtcaaaatattctttcccaaagttacttaggtcagccctttgttctctcactcccttcagtgaagttttctcatacatttataagacaattgagattctttcatcatcacagtctgcattctaccctgggataccttaactttttgggcgattctaaaagtttaatttctgtacattaaagtttaccttgtgggtttttttttggggggtgggggatggagtttcactcttgtcacccaggctggagtgcagtggcatgatct

SEQ ID NO: 240934 - DNA, 328 bp, Homo sapiens
tagattttattttttaaatttttgttaagaatttttgcatctctcgttatggaggatattgccttttagttttctatccctgaagtatctttagttttggcatcagtgttatcttcatcacaaagaagttgtgattgtgatgtactctttactccaatgaatttgcagttttctttgagataaagttttttattaaaaatttaatttatcagcatgatgtgatggctcatgcctgtaagcccaatgctttgggaggccaaggcaggaggatcacttgaggccagaagcttgagaccagcttgggcaacataacaagaccctctctaca

SEQ ID NO: 240935 - DNA, 401 bp, Homo sapiens
tggtagtttcataaggggcttttccccttttgctccttctcctttctgctatcacatttgcttgcccttcagccatgaagttttctgaggcctccccagccctgcagaactgtgagtcaattaaaactctttcctttatgaattatccagtctcgggcagttctttatagcagcaagggaatagactaatacatttggttttctcatacttttgtgtgaaaaataaggaacgggtgcatttaataactggaaagggactgtggagagtgctagtttgtgtagggagctcaggaattctgaaacttctgggtggccctatcattcatccttgcatctagtgagcactgaaagcgcatatactgtttgcaaaaagatctgctagacctccaggaataattaaa

SEQ ID NO: 240936 - DNA, 1637 bp, Homo sapiens
  misc_feature (1050)..(1050): n is a, c, g, or t
  misc_feature (1078)..(1078): n is a, c, g, or t
  misc_feature (1091)..(1091): n is a, c, g, or t
  misc_feature (1304)..(1304): n is a, c, g, or t
  misc_feature (1376)..(1376): n is a, c, g, or t
  misc_feature (1526)..(1526): n is a, c, g, or t
ggttatgaagaataacatagaatatcatacatttgagatttttgtacttgcttaaaggaaaccaacaggaagactttttttttttccaaaattgacttacactgaaaagtttatctttgcctccataccccctaaaaatcaaatgatgtatatttttccatgaaatgccttttggtgtggtttatgtgcatgactgattcttagaaagccaataagataggggtggagccaagatggccgaataggaacagctccagtctaaagctcccagcgtgagcgacgcagaagacgaaagatttctgcatttccagctgaggtaccgggttcatctcactgcggattgtcagacagtgggtgcagtgcaccaagtgtgagccgaagcagggcgaggcatcacctcacccaggaagcgcaaggggtcagggaattccctttcctagccaaggaaaggggtgacagatggcacctggaaagtcaggtcactcccaacctaatactgtgcttttccaacggtcttagcaaacggcacaccaggagattgtatcctgcacctggcttggagggtcctatgcccatggagcctagctcattgctagcacagcagtctgagatcaaactgcaaggcagcaggaggctgggggaggggcgcccgccattgcccaggcttgagtaggtaaacaaagtggccgggaagctcgaactgggtggagtccaccgcagctcaaggagggctgcctgcctctgtagactccacctctgcgggcagggcatagccaaacaaaaggcagcagaaatgtcctctgcggacttaaatgtccctgtctgacagctttgaagagagtagtggttctcccagcacggagtttgagatctgagaacagacagactgcctcctcaagtgggtccctgacccccgagtagcctaactgggaggcacccccagtaggggcacaatgacacctcacacggctgggtacccctctgagacaaagcttccagaggaaggatcaggcagcaacatttgctgttcagcaatattggctgttctanagcctctgctgctgatacccaggcaaanagggtctggagcngacctccagcaaactctaacagacctgcagctgagggtctttactgttagaaggaaaactaacaaacagaagggacatccacaccaaaaccccatctgtacatcaccatcatcaaagaccaaaggtagataaaatcacaaagatggggaaaaaacagagcagaaaagctgaaaattctaaaaatcagagcgcctcttcccttccaaaggaacncagctccttaccagcaacagaacaaagctggacagagaatgactttgacgagttgagagaagtaggcttcanacaatcaaacttctccgagctaaaggaggaagtctgaacccatcgcaaagaagctaaaaaccttgaaaaaagattagatgaatggctaactaaaataaccagtgtagagaagtccttaaatgacctcatggagctgaaaaccagggcatnagaactacgtgatgaatgcacaagcttcagtagccaattcaatcaactggaagaaaggatatcagtgattgaagatcaaaagaatgaaatgaagcgagaagagaagtttag

SEQ ID NO: 240937 - DNA, 202 bp, Homo sapiens
gaggttagaagcaagatggactcaactatgtcagatttcccttactgtcatcattttgcaaaggtggttacaaaaatcccacttaaacgtctctgcatgtcactgaacacattaaatatagaatccacaggacattttctcattcgttcccccttccttccagtgtcatcccccccacccccatacataggagaagagcagc

SEQ ID NO: 240938 - DNA, 282 bp, Homo sapiens
caagggagatctagggagttctataacagggtatcaagaccatcatttcagggaagtattgctgatggctcctctctcctgcacaggcttgctgtgactgagctcctaactaccacattctctgttgtgtgccctatgtcaaactccacattgtgatgtaattatccaatcccacatttcctccaggagtaagccactgctgtctatgccatttttctcaagatgactgctacccatagaactgaatccagagatttggtaccctctctccactgtcgaata

SEQ ID NO: 240939 - DNA, 446 bp, Homo sapiens
tgcagagatggaagtataaaggaagaagggaagttcccacagttatagtgtggaaaagagtgagtgatacttgggagttgactactgcctgtggttggggaagatggctacaataaaaaggcaacttcaattttaaaacaggcacaggacttgaaaagacatttctccagctgggcgtggtggctcatgtctataatcccagcactttgggaggctgaggcaggcggatcatgaggtcaggagaccagcttggccaacatggtgaaaccctgtctctactaacaatgcaaaaataattagccaggcatggtggtgcgcttctgtagtcccaggtactcgggaggctgagtcaggagaatctcttaaacccaggaggcggaggttacagtgagccgagattgtgccactgcactccagcttgggcaacagagtgagactctgtctca

SEQ ID NO: 240940 - DNA, 391 bp, Homo sapiens
ctcaggtacatttggggaaacctctatagtaaatgtatatgtgcatacttgggatatttttctagtatgtaaattgaattcaaataattgtttatgtatgtgtaaagaagagacagaactgaaagcattcctgtagattttagagaacattgaactccaccttcattttatagttaaggaaacggagatcatctgatttgctgtaagtctcacagttactcactggatggaatcacagagtgtggtgtgagcggatagaggcctcagttacctgacaaagtttattctgccaaggttgaggatgcacccgtgacccagcatcaggagatcctggcaacatgtgcccaaggtggtcagggcacagcttgcttttatacattttagggagaca

SEQ ID NO: 240941 - DNA, 515 bp, Homo sapiens
tcctctgaaatctaagctgaggttcccaaacctcaattcttgactcctgtacacccacaggtccaagaccacgtgtaagccaccaaggcttggggcttgcaccctctgaagcaacagcctgagctctatgttggccccttgagccacagctggaactcactatcaccaaatccctatactacacaaagcagcaaggccctaggcctagcccgtgaaacccttttttcctcctaggcctctgggcctgtgatgggagggactgctgtgaagaactctgacatgccctggagacagtttccccattgtcttggtgattaacatttggcttttcgttactgatgcaaatttatctagctggcttgaatttcttctccaaaaatgggtttttcttttctatcgcatcatcaggctgcaaattttcctaagttttatgttctggttcccttttaaacataagttttaattccaaaccatatatttgtgagtacataaaactgaatgcttttaacagcacc

SEQ ID NO: 240942 - DNA, 445 bp, Homo sapiens
tattcaaaggaaatgtctactggtttcacagcatcttgactcatttaccaatggtcccttctcatgttgaacagtttttttgttttttgtttttccactttggctgatgagtccattttaagagcacttctccatgaagacatgttttctggattagagtgaaatagagattgaatctttttattcccctttaattagaaaattgctcttggcagcttgtttctttcagagctcatttaaacatcttcccatccaagtccacattctcacatgcaattatttcttttattcagctccttaattgctttcattccacacagtaaacctcctaggggaatcctgtagtccttggataatctcaaggacaaaatgggtcagaggccaagaaggtcttttgtctctagctggggaattggtgaagcaagggcagtcgtgagactccaac

SEQ ID NO: 240943 - DNA, 224 bp, Homo sapiens
gctccatgtctgtcatagacagttttccacagctctgagctctgatgctgagataagcttgtgtcatgcacctgccaagggccggtgcctgggtggattttagaggtcacatctgggtcacaaaggatgtccatccaaatggaccaggagggggaagtcaagctgactgctgagggtcagttcctattgtgtcaagtggtaatagtcaggctggagacaagggt

SEQ ID NO: 240944 - DNA, 529 bp, Homo sapiens
gaatgcttattaaaggagatttattaagcatcaaactgtttttcattgtaaattgcagctccttggatctttacatataaggattttgaatccatttattagaaaagaagttaccacaggtaataacctgcattataataagtgtaggaagttagtgcaataaatactgacttaattctgttattaatccagtgaagtaaccctgattgtatttagagcttttaaggaatcttcataaaagataagctgtccatcttttattgtacattttaaattagagaaaattatcaaactgatcttaaatttgcagtgctttatcaaaaaactcatttactctaaaatgcttccaaaagcttataaggcaagacaagtaacaaagtcgtcatttacaaataaggatactgacatttaagaagtgaagtgcttttgatgggtggcaggctactgcaatgcttaagtatttgtttcccactctctacgctctaaaccttcccagatacaattaaagagcaatctaatcaaatataaa

SEQ ID NO: 240945 - DNA, 443 bp, Homo sapiens
caaaagttttcgaaaagtttttcttgtggcttctaaatgcaaaatgaggcagaacttagcttgtcacataggtgtattcttcctggaaccgatgcggggtcagaaaactgatggcttttaagcaagctggacgggtcctctcagcgcattcccccacccgcctggcgccaatggagctggcctggcccgcccagcccctccccgccccgtccgcgctcggaccggactttcaggactgcaggggaaagggtggacacccagcctcccgccaggtcagagcagaggctaaaaatggcccaggggagactgctggagttgcatggagttcgggagcctaggaggggtctgaaaataactgtcaaaaagtttgaagggtgtgtgttggcttggggaaaaaagagggtggagtgcattacataaaacttttgcagcttgtatttcct

SEQ ID NO: 240946 - DNA, 678 bp, Homo sapiens
ctgaaaactttctatgcaccaacactttcatagaattttttttttctcagttgtcaccacagtcggcctcacttcaacaacagcaggcagtgttggctggtgtctctgatgaggaaagtgaagcctagaaataaggaattcacttcaaaggcaccttgtacgaatttcatacttgaaatccagtttggctgaaataaaagcctgtgatttttttcataacaactaagtataatggataaaatttggttaattaaagatttttttaggccaggcgtggtggctcacttctgtaatcccaacactttgggaggccaagtgatctgcccacctcggccctgcaaagtgctgggattacaggcatgagccatcatgcccagtcttcaatcatctctttaaagaccctagttccaaataaagttacattctcatttaccaggggctaggacttcaacatatgaatttgggggaggcacacttcagcccatgacagacacaactggatattagatgatgttatggaattcttggtacttttttcaggtatcataatggcttgtggttctgtaggaagatgtcatggggggatgcatgatgaaatatgttgggatgaggagtgatagagaattgcacattaatttcaaaggttccataccagcagaagtgtttgtgggggtgatg

SEQ ID NO: 240947 - DNA, 501 bp, Homo sapiens
ctgaaaactttctatgcaccaacactttcatagaattttttttttctcagttgtcaccacagtcggcctcacttcaacaacagcaggcagtgttggctggtgtctctgatgaggaaagtgaagcctagaaataaggaattcacttcaaaggcaccttgtacgaatttcatacttgaaatccagtttggctgaaataaaagcctgtgatttttttcataacaactaagtataatggataaaatttggttaattaaagatttttttaggccaggcgtggtggctcacttctgtaatcccaacactttgggaggccaaggcaggcagatcacttgaggtcagaagtttgagatcagcctggccaacatggcaaaaccccgtctctattaaaaatatgaaaattagccagactaaaattgcctgaacccaggaggcggaggttgcagtgagccaagatcgtgccactgcactccagcctgagctacagagtgagactccatctca

SEQ ID NO: 240948 - DNA, 676 bp, Homo sapiens
atgaaagccaagaaatattgatagattataccattgcttactgttcaacaaggccttatgaaagggattttgctatccctgttcaagaatggttttaatttggccattggaaagcctggttctaggatagatttattaggatggtttatttgttctccgaatggaggaattaaaaacaatactgccaataatggtggtaaaactgcagctaaccctactcacagtgggcagggcccaagacccagtctaagcagcactacttgccaccagcctcctctctggctttgtctctatttctccccattacctgctgtcctgggtgtttatatgtttccctcttacaggttacaataataaaaagcggggattgttctcggaggctcagaccagagcccttcaaaggaaacgttaatgcacttttctggaagttaatttgaaccatctatcataagagaaattgttaacatgcatgttaccactgcctacacataatttgatattttttaaggcactcttaaatttccagtgttcatgtgttttgcatagctttggaattatataaggaggggatcataacataattagaaggagtttatagattgtttttttttttattttttgaatatatatcgcgttatgcgctctattccatatcgagaatatgtgcacatgtagt

SEQ ID NO: 240949 - DNA, 396 bp, Homo sapiens
aatttcctttcctaggacacgtcttaaggacgaatgcattttttgacagttttcaggcaaaggggaggcctgaaatatatgtatatgaaatttagtaaggtcaggcacagcagcacacgcctatattggctgggcacagtggctcacaccggtaatcccaacactttgggaggctgaggctggaggatcacctgaggtcaggagtttgagaccagcctggccaacatggcaaaacttcgtctctactaaaaatacaaaaattagctgggcatggtggtgcgcgtctgtaatcccagccattcggggaggctgaggcaagagaatcgcttgaacctgggaggcagaggttgcagtgagctgagattgcaccattgcactccagcctgggcgacaggg

SEQ ID NO: 240950 - DNA, 411 bp, Homo sapiens
agcttattaatattttcagatgctatggattgtcatacttaaaaattaagacaatcaactaaaaaatcaacaaaacactaagaagagaattgcataaggtagcccagtacaagttaaatatacaatatggaaatacttcctatgacatcaattagagaaaacatctgtcgacaatactcagaacactataaaatagctagtaataaacctaacaaaaaaatgtgtaaaatctgcatgaagaaaacgtgatgggaatacttactacaaagatttcagttcttcccaatctaacctataaattcaatacattcctaagcaaaatcctcatgaaattttattaagaaccttggtgagctgattataaagtttattagtaacatgagtgtataagaatagctataagaaaatttt

SEQ ID NO: 240951 - DNA, 229 bp, Homo sapiens
tgcgcctttaagtccctgatttattctttccattcattccatctgggaggaacccccccaactcctgccagcttcccctagctggggtctctggtactcttcacacctgcaggggcgtctacactgttcgtctacctggtggcagggtctgagcgggaggaggagggaaagagtgtgttctgagctggacccagcctcttgttcgagaataaaaactcttcttctcttg

SEQ ID NO: 240952 - DNA, 481 bp, Homo sapiens
gtttgcgggcgttcggggggttgtgggtggatgttttattagctgagaaaaaatcagttaaagaagcgagagagaatgacaacagatatcagacaaaggcgaactcttattcactcttgtagtagattgaaaacccctggagtgcagaatcgatcactaaaagatgttagtgtttttacgccactgcgggtcttgcaagctcttggagggcgggaactagtctcagtctcatttggctcacaactgtactgcggcaggcatggatccgcgatcgaacacacctcagaaataccgcactggctgaatggatgaatgattgcagaaagtaaaattaaaaaaaaaaaaaattgggttgggctcgatggctcatgcctgtaatcccagcactttgggaggccaaggcaggcggatcacttgaggtcaggagttcgagaccagcctggccaacatggtgaaaccctgtctccactaaaaatacaaa

SEQ ID NO: 240953 - DNA, 378 bp, Homo sapiens
cagcagccctggcaggacagcctgtgggttacagaccgccctcctgtcaatgaagtcaagtcctctgcttcctgaaaaccgcctcttttttctaacaatgttctttcccccaaactaggaagacaggctgatggtaaacacaaagttctctgaaccaaagccttatatgtatgtttctgaggaggttctttataacctagttgcaagcaatctgaacacagcccagcgaatttccagcttttgaaactcagatttccttttgcgacccaggttctgctgagaaagttatctttggctcctctctctctcacaccccacatcccatctgttcggaagtcctgttggcatttcgatctatcaaaataaaagttgcacgta

SEQ ID NO: 240954 - DNA, 459 bp, Homo sapiens
ctgaggagtagggactgttaggggacaagggtaggaaaggagggaccatatgggaggttactgtaatagtccaggtaagagagggtggggactagggtggtggacataggagtgtttggaagtggtcagatgggagatgtatttgtaaggctgatccaataggatttagctggcatcatggatgtgggatgtggctcatgcctgtaatcctagcactttgggaggccaaggcagtcggattgcctgaggtcaggagtctgagcagcctgggcaacatggtgaaaccccgtttctactaaaatacgaaaaattagccaggcatggcggtgtgcacctgtaatcccagctactcaggaggctgagagaggagaatcacttgaacccaggaggtgcaggttgcagtgagccgagatctcgccactgcactccagcctgggtgacagagcgagactccatctc

SEQ ID NO: 240955 - DNA, 523 bp, Homo sapiens
agaggaagagagaggagacttcggaaggagtggagtcattctgggaagagggaatgttgagaagggcacagctttgagaagcctgtgcaaggggacaagagataggggtgtgctgacggcagctcctgggtttctggctgtgctgagcagagaaaatatgaaggagacgcaggcttgggagaagatggacacttcagttgttgatgtgttaagtgggaggtgctgtttataccactgaatggacttctcaagggagcaagtaggtaaacagttggccctccgtatccacaggttccatatctatgaattcagccaacctcagatcacacaaataaaaaacaatacaatgaaacaactatttatatagtagcatttacattgtattaagtattgtaggtaatctagagatgatttaaagtatatgggaggatgtatacagcttgtatgcaaataccatcgagggaagagagagaccctctcatattgttttatattgttttatactcagtacctgttctaaaaa

SEQ ID NO: 240956 - DNA, 207 bp, Homo sapiens
ggcttctgaggctaggaatggtgagagatgatgtattgtcaaagctttaaaaatccttcaaatctaggaaagatgctatgcattgctttaggtttaacatccaggtcagctggatgtggatccatcatcacattatgactaggtcaagttctattatggacctactctgaaaagagcccttcttggtaaattatctcagctgagaca

SEQ ID NO: 240957 - DNA, 335 bp, Homo sapiens
caggtagatggggaatggactattggcagagaaccagaagagatcctaggccagatgtggtggctcgtgcctgtaatctctgcactttgggaggccgaagcaggcggatcaccccaggtaaggattttgagaccagcccagccaacatggtgaaaccccatctctactaaaaatgcaaaaattagccaggtgtggtggcatgcacctgtaatcccagctactctggaggctgaggcaggagaatctcttgaacctgggaggcggaggttgcaatgagccgagattgcaccactgcactccagcctgggtgacagagtgagactctgtctcaaaaa

SEQ ID NO: 240958 - DNA, 202 bp, Homo sapiens
attttgggaatagcactattgaatgaattatgaaaatggtcagtgagctagagtgactatttgacctctgagaaaggacttggatggacacatgtatagaaagtactttagtattattagctacttaaaactgatttcaattgacttgaaataagcttacagtttttattcacttattcactcaataaatgtctattatgta

SEQ ID NO: 240959 - DNA, 362 bp, Homo sapiens
tatgtgctgtctctatactcccagcagagtccccatcctttctctctcttacctggacaaaaagtcccactactagattgatttctctaatcctctggatttcaattcagaaagctacccgttaaaatactgtactcctacgtgacttttggaggtcttcagtgattacaatccttttgcattagcatctaaactggaatgtggtacagcaaattcacaatagtgccctgggtttaattttttaaaggaaacacagcaatagtcaatgtgacactaagtgaacacaagatagttaattttcaacttaagatcatggaccgggcacgatggctcacacctgtaatcccagcactgtgggagac

SEQ ID NO: 240960 - DNA, 657 bp, Homo sapiens
gtcccagctaagtatgtacttaggagcctgaggtgagaggattgcttgagcccaggcatttgagctgcagtgagccatgattgcactgctgcactccagcctgggtaacagagtgagactttgcttcaaaaaaaatgcatgtatcggctggtgtggtggcgcacgcttgtaatctcagcactttgggaggccggagtgggaggatcacttgaggtcaggagttgcagaccagcctggccaatgtggtaaaacctcatctctactaaaaatacaaaaattagctgggcgtggtggtgtgcacctggaatcccaggtatttgggtggctgaggcaggagaatcgcttgaacccagaaggaggagattgtagtgagccaagattgcgccactgtattccagcctgggcaacagtgaagactctgtctcaaaaaaagaaaagtgtgcataaattctcctgattggcagagctattgggttttggctatatagtagtatcagtatcactttttcctaaaatatattcaagtagcatccatactttttcctttgttgaaggtgataagtacaagattgtctcaggtaagccttgttgagaaaaaatgggcttccaaagacagatgggacagaggagcgctgtccttttggagatagctgtttt

SEQ ID NO: 240961 - DNA, 381 bp, Homo sapiens
tgcgattaaatatttcatgtgagagaatacattctaagactggaaaagcattttttaacaagtgagggagactgatctatttagatgctgatgacgcccaaaattatagtttcagccagaacctcacccctcacatcagactcacttgtgcaactgaccacagatgtctccactggcgtctaagcgggatctcaaactcaacaggtccacacctgttggctcatttagtaagaggctcatttaataagtggggctggaataagttaatttccacctgggggcgggagacgcttgactcttgccttacagcttatactaaaatatattccataaggactataggttgtctagtaaaaaataaataataaacattgcaacaaa

SEQ ID NO: 240962 - DNA, 376 bp, Homo sapiens
caaacaaaaatagccttagggaaaaaaaggaaaaaaatgaatagggctgggatcctgccgtcaactttctagtttcttaagagttaagtttttggccaggcgcagtggctcacgcctgtaatcctggcactttgggaggccgaggcgggcagatcacttgaggtcaggagttcaagaccagcctgaccaatatggtgaaacctcatctctaccaaaaatacaaaaattagccgggtatggtggtgcacgtctgtagtcccagctactcgggaggctgaggcagaagaatcgcttgaacccaggaggtagaggttgcggtgagccgagatggcgccactgtactccaacctaggtgacagagcgagacttcatctca

SEQ ID NO: 240963 - DNA, 388 bp, Homo sapiens
ttaagcctcatgagggataaaggttcaattttacacaaggaattgtttacagcctaaatcattatgtcaccaatgatctaaatcaagaatgcctttccttttgtacagtttcttcttttgagccatttttggcttttaagaggaagacaagctaaaagtataaggagttcacatgtacttacttagctgaagatattgttagatttaactcctatctgtggaaaacctaatgagttaatatttatacatctcttggtttctgaatatttaggtataatactttgttccatgttccattgttttcttttgacccaaccttcaaacccatgacttctgaagcagaggaagaaatagaatacagtggaaaaaagtcttctttgaagaaaaa

SEQ ID NO: 240964 - DNA, 446 bp, Homo sapiens
tggtcctcagaccacattttgtatgtagcaaggctccagagtccacatcccgcatcattctaactgtatttaacataccctcattggaaatggggggctcctcccaggcctaccacatgtaactggtaggaaaatgttcattacagcctagtggctcttaggggctgctggtgggtcattagtcatgaatgtaggtgtagaaactggattgggacccagctgatgacagtgagcagggagagaaggagggagggagaggaagacagagaaagtgagaacacaagtaagcaagtgctaaaaaaaaaatgtggtctgaggaccagcaacaaggcatcatgtgagaacttgctaagtatgcagaaccttagaccccaccccagaactactgaatcagaacatgcattttaacaagatctcttggtgatctgaatgtacattaaagtttg

SEQ ID NO: 240965 - DNA, 573 bp, Homo sapiens
attttgatggttttgaatgcttttcaaaatagtatttagtatttgccttaaatccagtgaccctcctaaattcaattattacttttaattgtttacatttttcttttggattttttcagtatttcaaataactaactgttaactttatcttctaaagtgtattttttattttctatttaatttctgttcttatccttatttaactttcagtgttcactggctgttctttttctgatttcttcagttcaatacttgcataatttattttgacaatttttttcttctttagtgtttttattcagtgtatcaatttccctctaagcattggtttaaggtttatctaaatccacagattttggcacattgtttttactatgttttactgcaaacgtttcctaatttccattatgatgtattcttttatgtgtgcgtttttttcagaggtgcattctttaatttttagacatgaaatgatattacttagcgactgctgtgttaacaatattatcacaacttagccttaaagaaacatacatttgttatctcaatttttcttggtcaggaatcctaggc

SEQ ID NO: 240966 - DNA, 656 bp, Homo sapiens
ggccagcaggagcatatcactgtgacttacaacccttctctagtctgctacaatggaatcttaaacaagaaaattttatattttgacttgcatcattgagaaaaacactgccaacctgatcgtggttcctttgaagctgtgtcatgcagtctgtgcactgcatagaggctcctgaagggaagaatagatgctgaaatctggcctgcactcaactgaccaagctgtgtatcctggcgaggggctgtgtgaattcagaagaagtggtgcctttgtgtatgttcattgcagcactattcacaatagcaaagacatgtaatcaacctaaatgcccatcagtgataaactggataaagaaaatgtggtacatatacaccatggaatactatgcagccataaaaaggagcaagatcacgtcctttgtagggacatggatggagttggaagccgttatcctcaacaaactaatgcaggaacagaaaaccaaacactgcctgttctcacttataattgggagctgaatgatgagaacacatggacacacagaggggaacaacacacactggggcccattggggactggggggagggagagcatcaggaagaatagctaatggttgcttggcttaaatacctaggtgatgggatgatctgtgcag

SEQ ID NO: 240967 - DNA, 399 bp, Homo sapiens
aaggtctccctgccagatttgagtttactccacggttttggattccggagcaggtcggagagagtcccctgagaccggcacagcaccctctgcgcaaagatcgcctgggggatactgtagcgcttcagctccgctgtgatgcgctgggccacctctttggtgttgatttcttccagctggcccgacgtggccacctgcgagcccgatgaggacgagggtggccgctcgcgactgggtgccagcaccggcccgtgagactgagtgtggcccgggtggtgcaggccgttcaggtgcgacatcatggccgcaggtggggtgcccaggccgcgggacaggtgttgctcaccgcgggtcagcatggcagtgtggtgcgcgtcgaagttggggctgagcattttg

SEQ ID NO: 240968 - DNA, 344 bp, Homo sapiens
gaggcccaggcaggaggattgcttgagcccaggaatttgagaccagcttgggcaacacagggagatcctgtcgctacaaaaaaaaaaaaaaaaaataggcatggtgacacacacgcctgtggttccagttacttgggaggctgaggtgggagcattgcttgggcttgggaagtcaaggctgcagtgagctgtggctgtgccactgcactccagcctggatgacacagcaagaccctatctgaggggaaaaataaaaggaagcaaacaaagcagaagagagaggatgagagaccagaacaaacaaataaatagcagaaatacaaaagacagatttctccccctcc

SEQ ID NO: 240969 - DNA, 315 bp, Homo sapiens
ttgttttgttcctttaaggttgaatcctttttcttggttattttctgatttttcccttctcctgtgatttgcctgtttatagatttggcccatttgttttctcagtcgcggtgttcgtgttgactttaaggaaatttcatgttttatggatgtgaattttttggcatatggaatgcaaaagttttttacagcttgcaatttatgtatttgccttctttgctctgccttaacacttttatacacccaattctttcttttttatggtctggattaaaacttctaaataaaaaaggactttccttataaaaacaataa

SEQ ID NO: 240970 - DNA, 360 bp, Homo sapiens
aaggaaagtaattttgggctacattagagcaggccttgaatttcagagtagttaggacatttatccaataaaccagtgaagatctgtgaccaaggaaatagcataattagctataatggtgcacacaggagtaatatgattaggaaagatgcttttggccctgggaagcagaattcagaagcgatggaaactgtagatgtttgcagttatgcaactgagagaacattagggctaaaacaagggccaagtgtggtggggctcatgcctgtaatcccaacactttgggaggccgaggcaggtacactgcttgagcccaggaatttgagaccaacctgggcaatacagtgagaccctatctct

SEQ ID NO: 240971 - DNA, 742 bp, Homo sapiens
ggaaaaaaagacaagttaatgagtctgaaagagtgtgtaaaaataggttatttcagcatctttaatggcttgagatacaaagtacatagttttaaaatattgagtacatcctatagggagataaggatataaagatgaataaactaatttcatatttatgatacactagtatcagttcagaatatgattctttatatataaatatttaaaagattgttcatcaaaacaaatgtcataaaatatttggtggtacagttttaataaagtagaatcagattcttctgtgaaatgaagtataaagctgatatcgtaactaataacctgtataataccttgcattattcctgtttccaatgaagtcagtgtagtctttacatctggggctagagacagaacagaggttctctttcagacacatctctgaggttgtgcttttgtagatttttttcctcaaacctatccttacctttctttttaatttgattttgctttaattgagggacaagcagggatagcattgttatattagccaatggacagataagattctatcatacatgttctataaacttaatggtacttccccagagtctgtagcctatatatcttttatcacttctctaatctcattctagctgggtagggagagactaatttttgaatcaatgagaaattcagtttggggattccaagtaaagtaagcagtcgttactattccttaaattttatgcacaattctatt

SEQ ID NO: 240972 - DNA, 458 bp, Homo sapiens
ctgtaatcccagcactttgggaagccaagacaggtggatcacctgaggtgaggagttcaagaacagcctggccaacatggtgaaacaccatctctactaaaaatacaaaaaaaattagctgggtgtgataatgggtgcttgtaatctcaactacttggaaggctgaggcaggagaatcacttgaacccaggaggcggaggttgcagtgagccaagattgcatccctgcactccagcctgggcaacaagagcaaaactctgtctcaaaaaaaaaaaagaaaagaaaaaaatgcatgggtatttttgcttgtagaactgagtcaaaatcccttttctctagtggtggctcacacctgtaatcccagcactttgggaggccaaggccagaggatgggccaggagatcgagctcaggtgattgagatcagtccgggcagcataaggagaccctatctctacg

SEQ ID NO: 240973 - DNA, 371 bp, Homo sapiens
gcatctatgtctatgtttataatttatatttttccaaatagtagatttgtaattgctgttagccaacagaaaataaaatacataaaatataaagcatagcaaactgaagtctaaatgacattagagtcatgtcaaatgaaggttgtagcagtaaaactaaaagaaacaattggaagaactgagtaatcacaacctttgctgaagtgactggaaggattgggaggagcagattagttgtggcaaaatatcacattaaatcaacatttgtattagaattgattggtctttaagtacaacaagtgaatttgcacctagctttatgtttgcatataaaacacattaataatatataataaagacagttaacaata

SEQ ID NO: 240974 - DNA, 406 bp, Homo sapiens
aatgtttccaaatcattgggcatatcaaatagtatttcatcttctattgacagaattttaaaaacaaaatatatattgcaatttgcaataaaacttaccctttatagataattaataacaaaatgttctcagagtagattttaatgtttagactattagtaagatttcagatgattgaaacaaagcatgtttattcttttcttttgtggagcttggattgttaaacattagttctgggagagaccagggaagataaaggtctatcataaacataactaatgagataactcctcaaggataaatttggtctagaattattgttatgaggttatattcttttatagaattttctaaatcaaatcttgtacttaattaaaaacaatagggtaatctgacttaaacttta

SEQ ID NO: 240975 - DNA, 309 bp, Homo sapiens
tgaagtataaacaatgttgtaataaggaaattgaatttaaatttggtgagaagtatttacagacttcaataagaggagctttccttctctttctcatccttttcttttctcggttccaagtctttgctattgtgaatagtgccgcaataaacatacgtgtgcatgtgtctttacagcaacatgatttataatcctttgggtatatacccagtaatgggatggctgggtcaaatggtatttctagttctagatccttgagaccttgagaaagtctcctaacttctctgaggcttaattttcttttttttc

SEQ ID NO: 240976 - DNA, 503 bp, Homo sapiens
tctagaatttatatttattgaaaaattataaatcaaaaattgcatttgttatatgcattggtaatgacaaaaataagccaaatgtttaaataatatacttaattatctatgggagagaaaaatactccaaagtggaattttaaaagtattcgatagttactttttgggaaataatattattcaaacagatacttaaaaactattttagatgatttaggccaggtccggtggctcacacctgtaatcccagcactttgggaggccgaggtgggtggatcatttgaggtcaggagttcaagaccagccatggacaacacggtgaaacttcatctctactaaaaatacaaaactcagcccaggcagtagtggtgcgcacctgtaatccagctattcaggagactgatgcaggagaattgcttgagcctgggaggcgaaggttgcagtgagccaagatcacagcattgcactcccatctgggtaacagagtgaggccttgtctcaaa

SEQ ID NO: 240977 - DNA, 208 bp, Homo sapiens
atgctgagaagccaagcagtacagagaagcaacccagggattagcaacatcaagaaaagtagcttcaatcccactggctggatccgagtcccaaagctgggaaaggaagactgaggaatgcaaccacagctggatggattttttcacaagataatgtttgtggattccagcatttcattcaaattccaaagagaatcatttacaagtt

SEQ ID NO: 240978 - DNA, 635 bp, Homo sapiens
gaagggtctagctgtgggaagtggagcatgaactggaaataacttcctgcctctagcgattcatttttcttttcagcaccatttcagcgatagaggttttactgaaatttaaagagagaaaggtgttgccgaattaatgtggttggtatttactgacagatcccttagatagcccacttcttttgtctttttttttttgttttcttttcccttctaagacttctgtggcatctatcttcaatttgtcttcaattttggggaaatgctctttcttttttaatttctaagtttttagaaattgatgctctcagatatgtctgaattgacacagtatgatggggatctaagacctgcttttgtgcctgggagccatgaacgttacactaagcagtcgaaatttctgtgctgtagttttcttctctgtaatatgaaggtgctgggataaataatctgacatcttgcttattcagctcaacaattctgtgcatatattgcatttacacatctatcttggatttttaaaagatgtggcataggtgatgggttgataggtgcagcaaaccaccatggcatacgtcgtttacttacgtaacaaacctgcacatcctgcacatgtacccctgaacttaaaaaca

SEQ ID NO: 240979 - DNA, 688 bp, Homo sapiens
gaagggtctagctgtgggaagtggagcatgaactggaaataacttcctgcctctagcgattcatttttcttttcagcaccatttcagcgatagaggttttactgaaatttaaagagagaaaggctaaaagcttagtatttcaatgtgccagctattgctgacttgcagtaaagaactgttgccgaattaatgtggttggtatttactgacagatcccttagatagcccacttcttttgtctttttttttttgttttcttttcccttctaagacttctgtggcatctatcttcaatttgtcttcaattttggggaaatgctctttcttttttaatttctaagtttttagaaattgatgctctcagatatgtctgaattgacacagtatgatggggatctaagacctgcttttgtgcctgggagccatgaacgttacactaagcagtcgaaatttctgtgctgtagttttcttctctgtaatatgaaggtgctgggataaataatctgacatcttgcttattcagctcaacaattctgtgcatatattgcatttacacatctatcttggatttttaaaagatgtggcataggtgatgggttgataggtgcagcaaaccaccatggcatacgtcgtttacttacgtaacaaacctgcacatcctgcacatgtacccctgaacttaaaaaca

SEQ ID NO: 240980 - DNA, 245 bp, Homo sapiens
ttaaaaaagaaatcctaaaatgactgaatttggatgtatggagatggtcaggaatttctaagtatatgtatacgtacatacatcttaatgatataatgtttgtaagtgctaaattacgactcatggccaggggctgtgacgtacaagcctgtaatcccagggctttggggagccaaagcaggaggatcacttgaggtcaggagtttgagatcagtctgggcaagatagcaagactgtctctacca

SEQ ID NO: 240981 - DNA, 412 bp, Homo sapiens
atgtaaacattttgattgaatttaaatgttttattcatctccattagcaactgtttacagaaatctcttaaagttgaacttctgcagatagctaaactcacctatttgatattgtttttgttttgttttgtttggttactaatttatctctcctcctggggataggagtaacttaatctccaaattaaggtggcagctcaattacttgctttataaactagcttcattgtgcatgatcccatgagaagaaaaaaaataatatcagatataagaataaaactagcagccgggcacggtggctcatgcctgtaatcccagcactttgggaggccgaggagggctaatcacaaagtcaggagattgagaccatcctggctaacacggtgaaaccccgtctctactaaaaaataca

SEQ ID NO: 240982 - DNA, 857 bp, Homo sapiens
ctcatgctttagagaagcctacactggccctactccagccttgtctcccttcatggagcacacaacccagggtgccaaggaagcatgtctcttgagacctccacccctgccccataccgcacacaggacattgcaattccctgactaaatgggaagggcatgggctcatccttcctcctaatagggattttgccacttgtgtgttcactcctaagcctaggggcagctgtttgcagcatatgggcagagcttggacttgcagactggagtgtccgtaagcatgtgtatgaggccccttgtggttcaaagaaggagttggaaatgtgaagagaagtggggcctgttatatttaacacctggcatgggttatttttatcagaaaagtttctctgaaaccatgaaaaattaacttctctgacctctattgaactattacatttgttctcattggaaaaccaatgagaacaggttacagggaagttctttccattgtacatagctgataggtaaaaatcatgacatgtgaagttatataatgtctctggcaaaagtgtttcaagaatatacacctgttcggtacaatgactgttgtgactagctgaaactatatttagagtcactctgaagtcaacatttctaagtccttctcatgtgaaatgtagtgcatggtgcaacttatttttgtgaagataagggaaaaagagaccagccactcagccagcaatttcagtcctacctcactgtgcacccgggtctgacatgtcttagagcagagccaggaacatcatcagcagccctggtgagggctctgacagtcatgaagcactgtgaccagcaagctcaggaagggagcagtc

SEQ ID NO: 240983 - DNA, 380 bp, Homo sapiens
aatgcaaactatatatatacgctacgctacaataaatatgctctttgaatataatcttcaaaatacaatacctaagcacaccaacaaaactggagattatcttattaaacgaaaaaatatggctgggcgtggtggcacacgcctgtaatcccagcactttgggaggccaaggcaggcagatcatttgaggacaggagtttgagaccatcctggccaacatggtgaaactccgtctctactaaaaatacaaaatattagctgggtgttgtggcacacgcctgtaatcccagctactcgggaggctgaggcaggagaatcgcttatcgcttgaacctgggaggagaaggttgcagtgagccgagatcacaccccagcctggg

SEQ ID NO: 240984 - DNA, 937 bp, Homo sapiens
atcaagacttttacgaatagttttagcattggactgtagttagcttactttgtaaaatgtcattatcttcctagatttctatgtagaatttactcactaatttccataatagtagttctgagtgtccctttgaatcttcctggccccataaggaaggaatgtaaattatgttacactttctcattttgtattttcaaatgttatgctgcttccatgtctgtagaacatccttactaatagagtgccaagggagtattattacaaaacctaactttgttttgtttttttcttttctttattaattgtttttatttttactttaaatttttaaatatataaagctatggagaataatataacaaatatccatgcactcacacccagaattattaataataaagattaacattttgacattttgcttcatatttatatatatatgtatatagttacatctttgaaatagaaaatttcaataaagttgaggtcctcttttcctccgtagtcctgttttacccccctccctccacagagacaagcagagtgtaaaattcccctataccctcgcaatccacattttaatttttacctcatgtttatatccatctggttagtgtactctgtatccatttgcttagtgcgcttagtgtggtttttaaattttaataagtattctctttctgtatgtgttattccccaatttgcttttcaaccaacattctttttaagatttaggctgggtggctaatctaatggctcatgcctgtaatcccaaaactttgggaggccaacgcaggagaatcactggaggctgagagttcagtatcagcctgggcaacacagtgaaatcctgtctcataaaataatttaaaaattagccgggtgtaatggcatgctcctgtagtcccagccacttgggaggccccatctctaaaaa

SEQ ID NO: 240985 - DNA, 484 bp, Homo sapiens
gctgaggctggagtatgacttgagcccaggagtttgaggctgtagcaagctatgatagggccactgcactccagcttgggtgtcagtgtaagaccctgtctataaaaaagaaagagaaaatagtacagattgagtatcctttatccaaaatgcttaggaccagaaatgttttggagttttttttgactttgtaatgttggtatgcatataatgagataccctggagatagggcccaagtctaaacttgaaattcatttgtgtttcatatacatcttacaacctggatgcagttttatacaatattttaaataattttgtgcaggaaacaaagttttgattccattctgactgcaacatgtcacctgaggtcaggtgtggaattttccacttgtggcatcatgtcaacactcagaaagtttcagattttggagcatttcagattttaaacttttggattaggaatgcttaaccatatcaggagtg

SEQ ID NO: 240986 - DNA, 337 bp, Homo sapiens
ctgctgtggatgcttggggaatcttagggatattgccaatctggggtggtggtgtataaagatacgttggtgcccctcctcctaccagggtgaaaagtggtttctgacttttgaaaccagattttgaaactgcacaaggcctttccaaggaaaaaggagtattccattttctctgctataaccatttgagatgaatagtttgtgatggggtctttattccaactgatgttcccaaataaccatctgtattcgtctttcctaggagtatattaaagcaccttttggtttatgttaattgtgatgcatttagtattaataaagaggtatttaaaaatgt

SEQ ID NO: 240987 - DNA, 372 bp, Homo sapiens
ggattacaggtgtgagccaccacgcccagctactttacctttcatatttgtcattattttgtggataataatgaagaatacatttgtatttcatgagaaacaagtactttcaggaaaaacacatatccagtgataaatggcagctaggtctaagtagtttataaagtatacttttatttttcttggatctgaattattcaagttttgatgtaaatttcctgattctttaaataattacattactgttctgtttttctgttttatttgaaagaatgagtttgccaaagctataaagtagtaagtttttcattgggtgattatctgaatgggtctagtgcatacttactaaatattagacttaatgtgtaatta

SEQ ID NO: 240988 - DNA, 421 bp, Homo sapiens
ttgcctagggagagaaaacacggagaggagtcccagggctgagcccagacctctgaacagaagaaggagtcatggagaaacccagaagaatgaggtgtcacaggcaaagaaaaattggatgctccggaaggagagaggtctgtctcacgaagagagataaaagcagctgggaccacatagagattttgtgaagctgtcccattcaaagccacccccagaggcccggaggagaccacaaagctgcgaacacagccgggacctgcccactgacacactgaagagtcaacacgattcaggaaagcactttcaaagagtgttttatcttggacagataatattccgttttgtttctgagaggcaatgacaatctctagttcgattgtaaaactatttccttcaaatatacatttttatctatgga

SEQ ID NO: 240989 - DNA, 302 bp, Homo sapiens
cctctttaacggctccccatgaaataatcattcattatgtcaccaggagggaagaaagggagtattttgtgaagctgtcccattcaaagccacccccagaggcccggaggagaccacaaagctgcgaacacagccgggacctgcccactgacacactgaagagtcaacacgattcaggaaagcactttcaaagagtgttttatcttggacagataatattccgttttgtttctgagaggcaatgacaatctctagttcgattgtaaaactatttccttcaaatatacatttttatctatgga

SEQ ID NO: 240990 - DNA, 524 bp, Homo sapiens
tcatatatatatatatatggaatttatgttaatcaggataagcatatattaaggtatgtttattaagtcacaagaagatctcttacttggccagtttgtggggtggggatggtttgggattgctctgtaatagactaccactagcttagcagcatgaaacaacactgtttactagctgtaggttgagaaacccagcaagcctgcctggtaaagagtatcagataggaaacagatagcaaacagcacaaggctggaatcagggtgtcagcccctgtgtatttctttctggaggctctggcaagaacccacttccaggctctgtcatgtcgttagcagaatgcacttccttttggctgtaggactgaggtccctgttttcttgctggctgttggccagggcacattctcagaccacatgcccgcctccatctcaagtgagcaactctctctcatgttgactcctccttacctttctgatctctctgacatacgcttctgccaccagccagagaataccactgcttt

SEQ ID NO: 240991 - DNA, 403 bp, Homo sapiens
attcagactgaccatgtgattggctttagttaacagacaacagcaatttgccaaatggtgagacttgaaaagtgtttgcgcactgggacttctcctttgctgctcttggaaccctacaatcaccacctgattgcaccagagctagcctactggaggatgagacgacatgcgggagagaactcaggtaccctaacctaaagttagttgagtcccagccaacaggctgccaattgccatccctgtgagtgaagccatcctggattgtccagtcttctgctaattttccagttgatcatggacacttgagcgagcaccacagctttcagtcaacctggtccccacagaagttatactcagccaacacatattgccagaaactaaataaagtgattgttgttttaac

SEQ ID NO: 240992 - DNA, 668 bp, Homo sapiens
cccccatccctacaaaaaataaagaattagctgggtgcccaggggatgctctggcgagggcagaccccaggagaaagcaaaaggcgtctcagggaacccccacattctctcactgaagtttcccaccaggatgaccccacagccagagtcccttggcagcccctcaccccagagcccccttctaaggaaaaaagagaagttcagggcattggaccttcattaacagtggcctggctggcgtggcaggccccaaggcccactcactgccatcccctttctgtgtgtccctgtcccctagttctaaggcccagggcctgagctctcttccccagcatcgcccccccacccccgaaaaaccccgcctttggagagttaattttctgtgtgaggtgcttaacctatcaggcctgagaacacaaagcagtaatctttgttactgagatgcggctgttcgtgttttgggttttttttttttaatgtttcctaatgagtccagagacacttagcttccctgtcccccatacccggacccttccaccccactggacccaaccatgggctcagaaccctggaattccgtttgctgatttgtttgggttttttttttttttttttttaagatgttacatggtatttcgaagccagcaagttaccaccctccggtgtct

SEQ ID NO: 240993 - DNA, 461 bp, Homo sapiens
caattatgatctatgaagaataattgggaatactgaggctatataaaatggaaacaagatttagaagaaatataaaatcagaatctcagaagctcaacctttcatctagtttaggaattcagtcaactgttatattaacattttacctactttactaaaaaattcctgagagatgggaggggagttcattttgtcagatgtggtgccaggggaacagaactagacaatggaaatctgcttaataggaggatagtttcttatataacaataagaaatttccaaacggtgtctgagctgctttgggaaaacccgtgttgcagattttcaggtttagactgtgtaacagtttaatggaagattgttatgttctaacctaagtattttctcgttatttaaaaacaatttttatttcatttcctgtgttattaaaaactatttttattttgaatgacttgatacta

SEQ ID NO: 240994 - DNA, 353 bp, Homo sapiens
gggctgaagtgagaggcctgcaggctcattcccgtggcgcaaaaccgctcctggcccaccagccggcctggacctgccgccacattgctggccaggccccgagatagacggggggggggcagtgagggctgggtgcggggtctagtctcagctgagcagcagcccgcaagaaccggcggatctatcctatcagaagtcggaagtcatctatcccatcagaagagtgaaagccgaccaccccctaatccgcctgggagaaccagactgcaaccaggtcaaacgcctgtgtgcctgcgcggaagcatggatcttaattcgttatttggggatctcagtaaaggaagagagagaaa

SEQ ID NO: 240995 - DNA, 567 bp, Homo sapiens
agagactgcagtgaaccatgattgtacagctgcactccagcctgggtgacagaatgagaccctctcaaaacaacaacaacaacaacaaagaagcggagcaagaaagaaaggggctttgtctatgcctgtcagaaaatagaacataaaaaccaattcccaggcaaccacaactagatttctgttactgatttactcagccctacttcgtcttccaattttagtagcagtctaccttcatgaagccatctgcctctaggctaaaatagttctggaaatcctgagtcttaggtgcactggagcagtctgtcagttttatgcacctggtagcagtatcagcttacactgagaagcctgtttctagtatagtccttcctcctgaggttctgagactattctttgtcattctttccagaagactgactctctggcccagggctgctgcacaggattttccacaatgatgattgaacatttgaaatgtggccagtaggattgaggaaccaaatgtaacattttaattttaattaatttaaacctagatttaaatagccatgtgtgtggctagtg

SEQ ID NO: 240996 - DNA, 465 bp, Homo sapiens
gccagccctgccagccagggagcactgacggggtctgagggaggagggcgacaggtggacaggcccacagccccacactgcacaggaagggtcacgggacacttggacaggcaccctctctgttgaatcgttttggtttttgactgtttgccagtcaccctcccgttcactttcagacctaacccaaagttggctttgtgtcttgtgcgtggcagaactagactgactgagtctatgtctctagcacatctttccctcctgcctcagtttcctcacctgaccacttgggttcacataattcctgccccagcaacatcattggactgttttgaggaccagttctagaagcgaaattggaagtaatgagactaatgtgtgctgaccattaactgtgccaagcactgcagtaagtacttatcttgtataaactcctttaatcttcataacagtcctattttagagatt

SEQ ID NO: 240997 - DNA, 925 bp, Homo sapiens
ggggctggggcctctcgggacttatcagggaaaggctgctgccaaaagtggaggacttaaagctggaggccgccccaaagacggggaaatgaagaaaacgccgtttctggagctccctgaggacaaggggagcagcttctgttctcagaatccctgagctgcgctcctctggagtgtcacccccaggctggaggagatggctgtgtcagtttcccattgctgctctaacaaagcgtgcagattctgcaactcagaaccagagacgtccattgccccacagctccagagactggaagtatgggatcaaggtgctggttgggcccccttccctcaggcaatgctagggaaggatctctcctggcttcgggcggttccttggggtgtgtggcatacctgccccttgccctcccccaacacctgtcttcacaagaccctctccctgtgaagctcattgtccacatttcccctttttatttggcaaccagtcatatgggattacggcataccctaattacctcattttaacttgattaacctctgcaaagaccctatctccaatgaaagtcacgtttctgggtactgggtgttagggcttaaacatatctttttggaggaagacgcaattcaacccataaccacagtccatccctgaactacatgctgcagagggagagacctggttgattggcttaggtcatctgagagggatgcatgtggggcagtggttcgcagggcccacactctcctcgcaggtactgggagagtgacaggagcccagcacctggcatagagaaggctctcagagtctggactagagactacatattagctgtgtaacttggaggagcgtacttactctccctaaacttcagccgcaaaatggagatgacgctacatgcctggaagggtggctgtaccaacccag

SEQ ID NO: 240998 - DNA, 343 bp, Homo sapiens
caggtaaagctgaatgactccaaaacacccagagggctgtcagttgttccacatgcagttgattggtggtgctggtggctatgtgtgtccagacaaatgcacctcgaagctgcagagccaacctggcttcatggccaaggaagcacagcggtgacacgtttccctggctgtttccatacaggcagaggccagtgtcatctccagcacctgggggacataagagaaagagccagtggcctccaagacaatctcaggtgaatacgcttgacccagacgagggaaggatcacacaaactctccgttgatgtatgtggcagttaataaatcattttcaagaagctaa

SEQ ID NO: 240999 - DNA, 597 bp, Homo sapiens
ggggctggggcctctcgggacttatcagggaaaggctgctgccaaaagtggaggacttaaagctggaggccgccccaaagacggggaaatgaagaaaacgccgtttctggagctccctgagggaagcatgaggaatttcactgccttccagcaattaaattgcattcaagaattctacagtagccttggtggtctgcaacgacatttcagggattagatgctctatctcctgtctgcagacacatgagcagaacccaggatggaagaatgtaatcaccagcgtgactccagtgatggagatgaactagatgtggagactggggagcagcagagtcaactcagttatcatcttggcggccgggctgccgtccagctcacagaagccacctgatccggaaaagatttccaaagcctgctggagctgtttccatacaggcagaggccagtgtcatctccagcacctgggggacataagagaaagagccagtggcctccaagacaatctcaggtgaatacgcttgacccagacgagggaaggatcacacaaactctccgttgatgtatgtggcagttaataaatcattttcaagaagctaa

SEQ ID NO: 241000 - DNA, 773 bp, Homo sapiens
ggggctggggcctctcgggacttatcagggaaaggctgctgccaaaagtggaggacttaaagctggaggccgccccaaagacggggaaatgaagaaaacgccgtttctggagctccctgagggaagcatgaggaatttcactgccttccagcaattaaattgcattcaagaattctacagtagccttggtggtctgcaacgacatttcagggattagatgctctatctcctgtctgcagacacatgagcagaacccaggatggaagaatgtaatcaccagcgtgactccagtgatggagatgaactagatgtggagactggggagcagcagagtcaactcagttatcatcttggcggccgggctgccgtccagctcacagaagccacctgatccggaaaagatttccaaagcctgctggaattactatgaaaggcatcaccatttctggaggaggctcttgtgtttaatatgctttctagcacgttcttctagttcctgtaccattgagctgaccacaaaaattggatcaatacatctgcttaacaagatatgaaatccagcatgtagaaaggcctgtcaaaggtcaatcaaaaaggctgtttccatacaggcagaggccagtgtcatctccagcacctgggggacataagagaaagagccagtggcctccaagacaatctcaggtgaatacgcttgacccagacgagggaaggatcacacaaactctccgttgatgtatgtggcagttaataaatcattttcaagaagctaa

SEQ ID NO: 241001 - DNA, 527 bp, Homo sapiens
ggggctggggcctctcgggacttatcagggaaaggctgctgccaaaagtggaggacttaaagctggaggccgccccaaagacggggaaatgaagaaaacgccgtttctggagctccctgagggaagcatgaggaatttcactgccttccagcaattaaattgcattcaagaattctacagtagccttggtggtctgcaacgacatttcagggattagatgctctatctcctgtctgcagacacatgagcagaacccaggatggaagaatgtaatcaccagcgtgactccagtgatggagatgaactagatgtggagactggggagcagcagagtcaactcagttatcatcttggcggccgggctgccgtccagctcacagaagccacctgatccggaaaagatttccaaagcctgctggaagcagccctcccagtcaggagagcaaagtcacattccatctggggacatctgagaggagatgcagaagccaatagctgattttcctcccctgctccttcccttgaat

SEQ ID NO: 241002 - DNA, 1892 bp, Homo sapiens
gtaaaacctttagtcgaagcttctctcttaaacttcatcagaacattcatacgggagagaagccttttgaatgcagtaattgtagaaaagctttcagacagatctcatccatcctacttcatcagagaattcacagtggaaagaaaagccatgaatgcaataaatgtggggaaagcttcaatcaaagaacaacccttattctacatatgagaattcatgatggaaaggaaattcttgactgtgggaaggccttgagtcaatgtcagtctttcaatatacatcagaaaattcatgttgttgggaatgtctgccagtgcagaaagtgcggaaaagccttcaatcagatgtcatcccttttacttcataagaaaattcacaatggaaagaaaacacataaatataataaatgtgggagaggcttcaaaaagaaatcagtctttgttgtacataaaagaatccatgctggagagaaaatccctgaaaatgcgaaggccttaagtcagagtctacagcaaagaagtcaccatttagagaatccttttaaatgcagaaaatgtgggaaattatttaataggatttcacccctgatgcttcaccagagaattcacacttcagagaaaccgtacaaatgtgataaatgtgacaagttcttcaggcggctttcaacccttattctgcatctaagaattcataatggagaaaaactatacagatgcaataaatgtgagaaggtctgcaatcggcattcatcccttattcaacatcagaaagttcatacaaagaaaaagaaactatttgagtgtaaggaatgtgggaagatgttttctggaactgcaaaccttaaaatacatcagaatattcattctgaagagaaacctttcaaatgcaataaatgtagtaaagttttcggccgccaatcatttcttattgaacatcaaagaattcatactggagaaaaaccctaccagtgtgaggaatgtggaaaagccttcagccaccgaatatctctcacacgacataagagaattcatactgaagatagaccctatgaatgtgatcagtgtgggaaggccttcagccagagtgcacacctcgcccaacatgaaagaattcacactggagagaagccatatacatgcaaaacatgtggtaaggcctttagtcagcgcacatctcttattctacatgaaagaagtcatactggagagaaaccctatgaatgtaatgaatgtgggaaggcatttagcagtggctcagaccttattcgacatcagagaagtcattcttcagagaaaccctatgaatgtagtaaatgtgggaaggcatatagtcggagttcatccctgattcgacatcagaatacacattctgaagaaaaagcctaaggttgttttaaatctataaaatcaacgaatgaggctatcaaacatatggcaaatatgtatttgtctataatgtaaattttgtgtatatgggaccatttgatgatatgtcccactttgaaagccaaagagcaaaagtcattggtgattttgacctcaggatttgaaattaactgaaggaaactcagaagtttggtcagtcattgtgaatgaagatcatttttcatttgataagaattactggctgggcgcagtggcttacacctgtaaccccagcactttgggaggctgagacaggcggatcacgaggtcaagagtttgagaccacggtgaaaccctgtctctactaaaaaatacaaaattagctgggcgtggtggtgcgcacctgtaatctcagctactggagaggctgaggcaggagaatcgcttgaacccaggaggtgggggttgcaccgagcagagattgcaccactgcactccagtctgggcaacagagcaagactctgtgtc

SEQ ID NO: 241003 - DNA, 1720 bp, Homo sapiens
gtaaaacctttagtcgaagcttctctcttaaacttcatcagaacattcatacgggagagaagccttttgaatgcagtaattgtagaaaagctttcagacagatctcatccatcctacttcatcagagaattcacagtggaaagaaaagccatgaatgcaataaatgtggggaaagcttcaatcaaagaacaacccttattctacatatgagaattcatgatggaaaggaaattcttgactgtgggaaggccttgagtcaatgtcagtctttcaatatacatcagaaaattcatgttgttgggaatgtctgccagtgcagaaagtgcggaaaagccttcaatcagatgtcatcccttttacttcataagaaaattcacaatggaaagaaaacacataaatataataaatgtgggagaggcttcaaaaagaaatcagtctttgttgtacataaaagaatccatgctggagagaaaatccctgaaaatgcgaaggccttaagtcagagtctacagcaaagaagtcaccatttagagaatccttttaaatgcagaaaatgtgggaaattatttaataggatttcacccctgatgcttcaccagagaattcacacttcagagaaaccgtacaaatgtgataaatgtgacaagttcttcaggcggctttcaacccttattctgcatctaagaattcataatggagaaaaactatacagatgcaataaatgtgagaaggtctgcaatcggcattcatcccttattcaacatcagaaagttcatacaaagaaaaagaaactatttgagtgtaaggaatgtgggaagatgttttctggaactgcaaaccttaaaatacatcagaatattcattctgaagagaaacctttcaaatgcaataaatgtagtaaagttttcggccgccaatcatttcttattgaacatcaaagaattcatactggagaaaaaccctaccagtgtgaggaatgtggaaaagccttcagccaccgaatatctctcacacgacataagagaattcatactgaagatagaccctatgaatgtgatcagtgtgggaaggccttcagccagagtgcacacctcgcccaacatgaaagaattcacactggagagaagccatatacatgcaaaacatgtggtaaggcctttagtcagcgcacatctcttattctacatgaaagaagtcatactggagagaaaccctatgaatgtaatgaatgtgggaaggcatttagcagtggctcagaccttattcgacatcagagaagtcattcttcagagaaaccctatgaatgtagtaaatgtgggaaggcatatagtcggagttcatccctgattcgacatcagaatacacattctgaagaaaaagcctaaggttgttttaaatctataaaatcaacgaatgaggctatcaaacatatggcaaatatgtatttgtctataatgtaaattttgtgtatatgggaccatttgatgatatgtcccactttgaaagccaaagagcaaaagtcattggtgattttgacctcaggatttgaaattaactgaaggaaactcagaagtttggtcagtcattgtgaatgaagatcatttttcatttgataagaattactggcgtgagctctaattatatggccacattcagttcttatcaaagaaataacccagacttaatcttgaatgatacgattatgcacaatataagtaaa

SEQ ID NO: 241004 - DNA, 646 bp, Homo sapiens
ttaaaggcatgtgccacctcacccggtcccattcatactttcagtacaaatttcaaagtacagttcactactgtggtcaacaaataagaaattggcttatacagttgtcaccgaaaaggtatatttgctacggtatataaatgtgaggatgtttacatatgagcacttctcatgaaaatatcgtctgtcttcattccattagaaactaactcaggatttggtttgtaacaatgtaatcagggctggccctttatttgcctttattatcaataaagaaaggattaaattttaaaagttaataatacttagtgaaataatacttagtaaataatacttatttacttagtagacagtagtgcctttcagctttatgtactgcttcaaagtaattgctttcgtttgtataacaccagttattactatcaaatgcatcttactcttttaatttatgctgtgatgtggttcagaagtgtcatcaccataacaatgaatcccatagtggcttctgaatccagggttattggaggagaaatgtttcaagaatgaagttaaggacagcccttcctcattatcctggataaactgagataaggaaattcaatatccttgactgcatcagtttctaggcacagtagcttgttgtccc

SEQ ID NO: 241005 - DNA, 463 bp, Homo sapiens
agaggcacaaggaagaggggtaggaacttccttcaaatgtgattttaataactagtcaagtgtgtccaactgtagaaaatcaccaagtgacaatctgtctacctgacagtgatcacaatgaattacaagacttttgaatagctatacagattagaataaagcaggaccaaataaaatatcttttgttggtaaaacttttgacttagagctaagaaactttaaaaaaaattctcttttgctttgatgtagaaagtttaaattacagaatgtgtaaagtgttttataagctttttgtgaaagaagcattattctaaaagctttatttgaacatctgttgaagaatgggtggtggtttgtaaatcagtttgctatatattattatatagtttccatatatgtaagatgactgtatcttaattaatagtcctatcattaaaatcagaacttcagtgatcttgaaaat

SEQ ID NO: 241006 - DNA, 278 bp, Homo sapiens
cactttgggaggctgaggcaggaggattggttgagtccaggagttcaagcctagacaacatagggagaacccatatcttaaaaaaaaaattctttatggttttcaataggctgttttcatctacaatgcaatgatgagttaaagttttccattaaaaatttttttaccaataactctccaaaagaattgaaatagaataacgtataactccaagtcagtggggatgaggggtggaaataaagagaaattgatcactccagtataaggcagggaagaag

SEQ ID NO: 241007 - DNA, 754 bp, Homo sapiens
gaaagatctgtgggtacgtatgggtgtcctgccatctgaatgaataattcaggaacatggcccaatttcaccttccatgtctggtctggcaaacgtggagatgcttgggcagggaatttaactgggtttttctgacttctcgtggagtgccaaagattgagctgagggaaatcagggatgccagaatgctatgaaagctcaaatccactcaatcctgcaggattcaaagacatgaagtagcagcactgtatgcaagggaggctacttatctgctgccacattataggggagctgaggataacaagccgggtgggcagattatccatttatttttgtctttcgaaagactagcatagggggcatcatttagtgttcaatttcctgtgtcctcaggagagcacactggtacatacccccagccaggctggggggtcatcccagggggtttctggttgtgagaaagaatccatcctggttgcccacaaacaaacatgtgaaatacaaaccatgtgacctggataaacagaacatggtgaggaagtaggcagtgctcatctgaacaacaaaaccgcacccttctggaatacaaagacaccagatggtggttttctctggccaggatattcttcacaccatggacagacctgaagcgctgcttctccaaggaatgagaagataagagaatccatctttcaaagaaaacaatgaatttctctctctctctctcttttttttttttgagacagagccttgc

SEQ ID NO: 241008 - DNA, 441 bp, Homo sapiens
agaagctgaggacacacagggtaagtgatagcccaagctgggaggaacctggacactgggtctgagagcctccttcagagaagctatttgtggcatcttggtgatttaaagattctcccaaatcttattaaaaatgaatggatcagctgggtgctgtggctcacacctgtggtttcagcacttcaggaggctgaggcaggtggatcacttgaggtcaggagttcgagaccagcctggccatcagggtgaaacccccgtcttgaaaaaaaaaaaaattagctggttgtggtgatgcacgcctgtaatcccagctacttgggaggctgagtgaggagaatctctgggacccaggaggtggaggttgtagtgaaccgagattgtgccactgcactccagcctgggcaacagagcaatactctgtctcaaaataaatacataaat

SEQ ID NO: 241009 - DNA, 314 bp, Homo sapiens
ccttgtggtcgtcggatctccctgtgatctctcccgccctggggagaatagcccaaaactttgttcttaaaaaaaaaaaaaaaagaaaagcaaaaaaagaaaaaaaaaaaaagattttagtattttatatatatattttttcttatttaaatgatacagtcattgtagggaaaaaaaaacaactttgagaaactacagagaattgaagttaaaaacaaaaacatgccaccattcagagcgacagcttacaacttcttttgtatatccatggtgtgagactgagaacagtacagtgatcgaccaacgggatctcg

SEQ ID NO: 241010 - DNA, 359 bp, Homo sapiens
gcattccagcctggaatagagtgagactccatcttaaaaaaaaaaaagtatgttaacaagaatttaatatttataagcattataaagattttaggcccagggtaatggctcatgcctgtaatcccagcactttgggaggcccagggaggtggatcacttgagttcaggagtttgagaccagcctggtcaacacggtgaaaccctgtctctactaaaaatacaaaaattagccaggcgtggggtgctcatgtgtaaccccagctactcgggagcctgaggaaggagaatcatttgaacccgggaggcagaggttgcagtgagctgagatcacgccactgtactccagcctggggatagag

SEQ ID NO: 241011 - DNA, 316 bp, Homo sapiens
cttttgtatatccatggtgtgagactgagaacagtacagttttaaattttacaaaaattatacttcatggtctgatttctcaggtacagttaactatggtcagtctctgtgtgatcaagtattatctgtgtcatcatttttaagtgctgtttaacagtcatatagctgtcacaactttggctgtaagattacggaggtcctgcagccaattaagctgactgaattcctttccttatgggggtccagtgtgcaatggctgtaaacagcagcttccttggtagtgtatgcggcctgtttgttgtataggttgctctaa

SEQ ID NO: 241012 - DNA, 4884 bp, Homo sapiens
  misc_feature (4368)..(4368): n is a, c, g, or t
gatattttgctacaggagatcaagacagagacaacagaggcattactaagcgttgaaagctcatagtgaggcccaatacatttttgttcaatggacaaacggattcatactgtccaagagtccaagaacctgcatgtagggaggagtcatattccttatgaagttggtcactgactctcctgcaatgtcatataactaagaattctcttccacatccttgcttaatgactggaaatggccatttcactgtggccctccaatcaaccctttcccatgagctatgtaatattttaccaccttctaagattgaaactgcccactaataacttcagcctgaagctatttcataattaaaaactgttaagtatttggtattggtgacagtgcctttatctttttccctcttccatattcctagtgcttttacacacctaagtgccaccaagatagaaatgatttgctcaacagtgctctggacataaaagaattcttcgatcacaaaaatggaactcccttttcatgcttctacagtccagccagccaatctgaagatgtcattcttataaaaaacgtgatgttacagactgcagagttaaagaaaagcagacattgacagtttctgatgagcataaacagtaagtgcagtcacaggccaaacttcttgctaggaacagcaagactgggaagaggtcttaaatttagtgatactgttattattctatattctcaatatagtaacacatgcatcttgctgtgtcaaatgctttctgggccatcattaaaaggacattaaaaacgtttttcttctaatgaatgcagtataccacaggacttcaattcactgaatgacaaaatatagagaaataaacttgctacaattaatggggccaaaagggtggttcgaatttcttgataaagcttccaggtgaacatctgacgtgttagtagtcttcttttggtagtgccacattccccaaggtattaaaatgttatgctccaaaagggtatattcttttagattttattcaacccaattaggtctgaggactgaatcacactgaaaccattaacttcatttgaaactcaaaacatttttgaaatcagatgaaggccaagttctccaacctctcttaggaacataagttaaattgaacaagggacttttaaaaatgaaataaaaacaaaattaaataaaaatgaaataaatagataatgattttggaaattcatactagaattaagtttagtctaattatattttaatatgaaacaatgaaggttttctgcctccttgccaacctagaaaaattgacaaaaataagaatacctaaaagtatacatggttcttagcataaccacaaaattattatagtgacagattaaataaggttgcagatagattcatagactttaactggctaaaaaaatacatttaaaaaccttttctgtacttacctacatgaggaatggagtatactgttggtagaaaaatcatttacctaactactgtatacgcacaagggactaatttttttcctccactaaaactcttatatgtagttgtgtacaaattaagtcagaaaatttcctcatggctcacacctgtcactttatgctaactagcaaggctggaatattaacatacctaaaatcaagcagaagaaatggcactgcactaataaaaaggaggtgcaaaaccttaagtggaataggtgcatgaagtttatttaaagactaacatcccaacttgggaaactcctaataaattctaaactcttccgaattttagaaccttgatatttctttacaccttttataaaagatgcctcttgactagggctaagcaagcagtgtgtacacaaacagaattgtgtgcaagtatacacacaccaaatgcactaataatgaagaagagagaacaaaatgaatttcaaatgccgaattcgggaacctcctcaaactattgcctttttcaaatggctggaccaacgattaaacttcagccaagtttttttcttaaggtcttccatatcattaaaaacaaggcatgccaactctgactttataaatctaaaattcagtgatctgcacagtttctgagcttgaagtattgaattgtgactcatctatttttttttcccattttccttctgaggtagagttaccaatccaattttatcaggaccacagatattttgagctaaaccccatgatcttttcatacagtaaaaataatttttatgaaaaaagaaagcaggcttcccaggccatggcacatagatatatttacaatttttaatgtaataattaaaaatggtattgtttatattttaaaaaacagcccagctgtattattctgtcaccaagaattattaattgaggatgctgtcaatgctgaattttatagttcagccttcacaatcccatccatgatgaagagttgattctcttacggtatacaatatactctcacaactttcagccttctcttaaagacatgccccaaatgagcaggatggatataaagaatgtaattcattcaaacaactcctccctgttctgccccctcccctcacattcccctcttctcaaaaacatctgaagtatgaaagttgtctttaaatagtaaaagcaccacaatctattaacaccacatattatctttaaacttaaatattttagtgatgtcttggacatcaaaataatttcttaaggtggactcttgagtatgtgggtccagcccaggtctgcagtttgtgcagacatagaaaaaagaggaactttaaatattcagaaaaagttaacaggctagctttaaaatactgctggaaattaaatttcttcagagttggcaagcatgggctattgatcaaagtatgaattaaacggatttacatcattaagaaaaaacaaatccgtgttattgtgctgtgaaatttccatgatgcctttcaaataggctgctcacaatttttttataattccaaatcactcgatttttgatggaaaaaagaatacagatggactgtgttttacctatgtgaaagtcaccaatccatttaaaataaaatccaagagggcatatacagtctaatcaagtcatcattttcctgattaataagaactacactttacacaaaatactttatcagcagctgttttcatcaaaaaatcaagtcagtttcacagttgaaaaagttacacattaaaatattttacaattcattatatattcaccaggttcccattttctaatgggcttttaatataaagcagaatagaagggaaaatctcaaagttgattactttgacactaagttttacataggacactaagaaccacaaaaagcttaggttctattgtaaaatagcaaccaaattccattcttcttttaaaaatccaattagaaacatcttttttaaaaaaacaaattccacaataagagtaacagatttcaaattaacagtagtctaaaaatcttcaaaataaatggttttgtatagctgagaatatggtagaaagtgaaagcataattttccaacagtcatttcttactacagtgtgtttaaaattatttttattacttttagactttttctcaaaataattattcaaggaaatatttcttaagtggcccaataaaactgtagagccaatagtcagttacaccatattcaaggacaaggatagtcagctatagataggaactgtctaaaccacgagaactgatctctgatactgaagtacccagaagtggctatattatcactgacttgaaacagatcttagtcacccatgtagcatttaattcaatgtttggttctttgcctcatttctttcttaggtcacaatctatagtctttatagaatttgtctacatttcttctaatagaattaatttggttgtagtaacttttgaaaataaatgtaaatggtgaaatcggccatgtggtttgtgcattttaatggtggagaggtcctgggagaaggaggggagacaactatctggactgatagataaaaatgcaaaagtggtataaattttgtgcaaggaggctcacagcatttttggcactcgggtaaaacacagttctctgttaaatcttcagtttctaccatcaaactttcagatttgtaccattttactgagttttcctataatttaaccctgatattgaaaaggctgggatgttagtatgtatcaactgcctatatctaaacaacacaaaatgttaataagttttaataagttatgaaatcttctacaactgcaaaataatctttctggtttcctgcttaaaacagagtttaaattctgcttaactatcgcaagacagtttgcagaagtaagttcccttaatcttcanatttacttttcttgttggcaatattatatacatgctttagtgaaatacctaaatttccaataattatgccctttaagggatctaaaatagccagatattaagagtattggtattagagtcccttgttcactactcaagacttcaactataggtaacagatttcataaatgaatatttttaaagtgatgctgttttactagagtatacaatgttcactctttataaagttgttttccaataatatgcctaatctaaaaaactgtcaataattattgcacttttttgatgtggcacctggacatctgctaaagctaatttcctaggacattaatcattcatttcaaatacagagtaaaatatcagattctagaatgacgactagcagtagcctctacatcttgggttaatgtttttcaaaatgtttaagaatgtgtcctgtgctcaaatagtatttaataaagttggagagtgagctctgactacttgggaatgagacatatcttaaaatggtttaat

SEQ ID NO: 241013 - DNA, 4341 bp, Homo sapiens
  misc_feature (3825)..(3825): n is a, c, g, or t
atttttctttttttttttaataaacagcgtgatgttacagactgcagagttaaagaaaagcagacattgacagtttctgatgagcataaacagtaagtgcagtcacaggccaaacttcttgctaggaacagcaagactgggaagaggtcttaaatttagtgatactgttattattctatattctcaatatagtaacacatgcatcttgctgtgtcaaatgctttctgggccatcattaaaaggacattaaaaacgtttttcttctaatgaatgcagtataccacaggacttcaattcactgaatgacaaaatatagagaaataaacttgctacaattaatggggccaaaagggtggttcgaatttcttgataaagcttccaggtgaacatctgacgtgttagtagtcttcttttggtagtgccacattccccaaggtattaaaatgttatgctccaaaagggtatattcttttagattttattcaacccaattaggtctgaggactgaatcacactgaaaccattaacttcatttgaaactcaaaacatttttgaaatcagatgaaggccaagttctccaacctctcttaggaacataagttaaattgaacaagggacttttaaaaatgaaataaaaacaaaattaaataaaaatgaaataaatagataatgattttggaaattcatactagaattaagtttagtctaattatattttaatatgaaacaatgaaggttttctgcctccttgccaacctagaaaaattgacaaaaataagaatacctaaaagtatacatggttcttagcataaccacaaaattattatagtgacagattaaataaggttgcagatagattcatagactttaactggctaaaaaaatacatttaaaaaccttttctgtacttacctacatgaggaatggagtatactgttggtagaaaaatcatttacctaactactgtatacgcacaagggactaatttttttcctccactaaaactcttatatgtagttgtgtacaaattaagtcagaaaatttcctcatggctcacacctgtcactttatgctaactagcaaggctggaatattaacatacctaaaatcaagcagaagaaatggcactgcactaataaaaaggaggtgcaaaaccttaagtggaataggtgcatgaagtttatttaaagactaacatcccaacttgggaaactcctaataaattctaaactcttccgaattttagaaccttgatatttctttacaccttttataaaagatgcctcttgactagggctaagcaagcagtgtgtacacaaacagaattgtgtgcaagtatacacacaccaaatgcactaataatgaagaagagagaacaaaatgaatttcaaatgccgaattcgggaacctcctcaaactattgcctttttcaaatggctggaccaacgattaaacttcagccaagtttttttcttaaggtcttccatatcattaaaaacaaggcatgccaactctgactttataaatctaaaattcagtgatctgcacagtttctgagcttgaagtattgaattgtgactcatctatttttttttcccattttccttctgaggtagagttaccaatccaattttatcaggaccacagatattttgagctaaaccccatgatcttttcatacagtaaaaataatttttatgaaaaaagaaagcaggcttcccaggccatggcacatagatatatttacaatttttaatgtaataattaaaaatggtattgtttatattttaaaaaacagcccagctgtattattctgtcaccaagaattattaattgaggatgctgtcaatgctgaattttatagttcagccttcacaatcccatccatgatgaagagttgattctcttacggtatacaatatactctcacaactttcagccttctcttaaagacatgccccaaatgagcaggatggatataaagaatgtaattcattcaaacaactcctccctgttctgccccctcccctcacattcccctcttctcaaaaacatctgaagtatgaaagttgtctttaaatagtaaaagcaccacaatctattaacaccacatattatctttaaacttaaatattttagtgatgtcttggacatcaaaataatttcttaaggtggactcttgagtatgtgggtccagcccaggtctgcagtttgtgcagacatagaaaaaagaggaactttaaatattcagaaaaagttaacaggctagctttaaaatactgctggaaattaaatttcttcagagttggcaagcatgggctattgatcaaagtatgaattaaacggatttacatcattaagaaaaaacaaatccgtgttattgtgctgtgaaatttccatgatgcctttcaaataggctgctcacaatttttttataattccaaatcactcgatttttgatggaaaaaagaatacagatggactgtgttttacctatgtgaaagtcaccaatccatttaaaataaaatccaagagggcatatacagtctaatcaagtcatcattttcctgattaataagaactacactttacacaaaatactttatcagcagctgttttcatcaaaaaatcaagtcagtttcacagttgaaaaagttacacattaaaatattttacaattcattatatattcaccaggttcccattttctaatgggcttttaatataaagcagaatagaagggaaaatctcaaagttgattactttgacactaagttttacataggacactaagaaccacaaaaagcttaggttctattgtaaaatagcaaccaaattccattcttcttttaaaaatccaattagaaacatcttttttaaaaaaacaaattccacaataagagtaacagatttcaaattaacagtagtctaaaaatcttcaaaataaatggttttgtatagctgagaatatggtagaaagtgaaagcataattttccaacagtcatttcttactacagtgtgtttaaaattatttttattacttttagactttttctcaaaataattattcaaggaaatatttcttaagtggcccaataaaactgtagagccaatagtcagttacaccatattcaaggacaaggatagtcagctatagataggaactgtctaaaccacgagaactgatctctgatactgaagtacccagaagtggctatattatcactgacttgaaacagatcttagtcacccatgtagcatttaattcaatgtttggttctttgcctcatttctttcttaggtcacaatctatagtctttatagaatttgtctacatttcttctaatagaattaatttggttgtagtaacttttgaaaataaatgtaaatggtgaaatcggccatgtggtttgtgcattttaatggtggagaggtcctgggagaaggaggggagacaactatctggactgatagataaaaatgcaaaagtggtataaattttgtgcaaggaggctcacagcatttttggcactcgggtaaaacacagttctctgttaaatcttcagtttctaccatcaaactttcagatttgtaccattttactgagttttcctataatttaaccctgatattgaaaaggctgggatgttagtatgtatcaactgcctatatctaaacaacacaaaatgttaataagttttaataagttatgaaatcttctacaactgcaaaataatctttctggtttcctgcttaaaacagagtttaaattctgcttaactatcgcaagacagtttgcagaagtaagttcccttaatcttcanatttacttttcttgttggcaatattatatacatgctttagtgaaatacctaaatttccaataattatgccctttaagggatctaaaatagccagatattaagagtattggtattagagtcccttgttcactactcaagacttcaactataggtaacagatttcataaatgaatatttttaaagtgatgctgttttactagagtatacaatgttcactctttataaagttgttttccaataatatgcctaatctaaaaaactgtcaataattattgcacttttttgatgtggcacctggacatctgctaaagctaatttcctaggacattaatcattcatttcaaatacagagtaaaatatcagattctagaatgacgactagcagtagcctctacatcttgggttaatgtttttcaaaatgtttaagaatgtgtcctgtgctcaaatagtatttaataaagttggagagtgagctctgactacttgggaatgagacatatcttaaaatggtttaat

SEQ ID NO: 241014 - DNA, 1495 bp, Homo sapiens
  misc_feature (297)..(297): n is a, c, g, or t
tgccctgcgagaatgtatctcatcctttgctggagcaggtttgcaggcacagtggagagaggagagaagaaatgaagggacacttatgcagaaccatgagtggccagagaggaggagaaggagggtgagaggagcaaagaagccatgacaacttcataattctgagtggactgggcagtggccagaaattctggtggtggatatgctgcctttccaacaggtgaatatgaaagaataagtcaaaccctgttcaggacgctgttaattccaaatgtgaactttttgagtcattctttncatgtggaattcaaaggagaatgtaaacaaattttcaggagggacgtgcaatatccctgaaagataacaaagttcgtaacacttatttacatacaacattctctagttattgattaaacagatctctacagacttgcatgaggcaacatttcttaggcttgtttgctacaatatctttaaaaatacttgattacacatcactttagcttatttagatggacttttcaccaagctctgaactgggatttcattttgttgcattcatcctgctcacgagacacaggacagcctttcctgcctcagggaagaagagagagacagactacagtgatggagacccactagatgtgcacaagaggctgccatccagtactggagaggaccgagccgtgatgctggggtttgccatgatgggcttctcagtcctaatgttcttcttgctcggaacaaccattctaaagccttttatgctcagcattcagagagaagaatcgacctgcactgccatccacacagatatcatggacgactggctggactgtgccttcacctgtggtgtgcactgccacggtcaggggaagtacccatgtcttcaggtgtttgtgaacctcagccatccaggtcagaaagctctcctacattataatgaagaggctgtccagataaatcccaagtgcttttacacacctaagtgccaccaagatagaaatgatttgctcaacagtgctctggacataaaagaattcttcgatcacaaaaatggaactcccttttcatgcttctacagtccagccagccaatctgaagatgtcattcttataaaaaagtatgaccaaatggctatcttccactgtttattttggccttcactgactctgctaggtggtgccctgattgttggcatggtgagattaacacaacacctgtccttactgtgtgaaaaatatagcactgtagtcagagatgaggtaggtggaaaagtaccttatatagaacagcatcagttcaaactgtgcattatgaggaggagcaaaggaagagcagagaaatcttaagacggtggccaaattaaagtgctggccttcagatgtctgtgatttctgcaactgaggacctaattatgcctgtctgcaaactaataatgtaaaaggtaataattaaagtatcatattttcatgtgggaaaaaatttaaaagcc

SEQ ID NO: 241015 - DNA, 5862 bp, Homo sapiens
  misc_feature (297)..(297): n is a, c, g, or t
  misc_feature (5346)..(5346): n is a, c, g, or t
tgccctgcgagaatgtatctcatcctttgctggagcaggtttgcaggcacagtggagagaggagagaagaaatgaagggacacttatgcagaaccatgagtggccagagaggaggagaaggagggtgagaggagcaaagaagccatgacaacttcataattctgagtggactgggcagtggccagaaattctggtggtggatatgctgcctttccaacaggtgaatatgaaagaataagtcaaaccctgttcaggacgctgttaattccaaatgtgaactttttgagtcattctttncatgtggaattcaaaggagaatgtaaacaaattttcaggagggacgtgcaatatccctgaaagataacaaagttcgtaacacttatttacatacaacattctctagttattgattaaacagatctctacagacttgcatgaggcaacatttcttaggcttgtttgctacaatatctttaaaaatacttgattacacatcactttagcttatttagatggacttttcaccaagctctgaactgggatttcattttgttgcattcatcctgctcacgagacacaggtaggcagcaaatgagattatccctccagtccccatggattggaaatgttcccccttctttatgagctcactgcagtatctccttctccctttccccaaaggacagcctttcctgcctcagggaagaagagagagacagactacagtgatggagacccactagatgtgcacaagaggctgccatccagtactggagaggaccgagccgtgatgctggggtttgccatgatgggcttctcagtcctaatgttcttcttgctcggaacaaccattctaaagccttttatgctcagcattcagagagaagaatcgacctgcactgccatccacacagatatcatggacgactggctggactgtgccttcacctgtggtgtgcactgccacggtcaggggaagtacccatgtcttcaggtgtttgtgaacctcagccatccaggtcagaaagctctcctacattataatgaagaggctgtccagataaatcccaagtgcttttacacacctaagtgccaccaagatagaaatgatttgctcaacagtgctctggacataaaagaattcttcgatcacaaaaatggaactcccttttcatgcttctacagtccagccagccaatctgaagatgtcattcttataaaaaagtatgaccaaatggctatcttccactgtttattttggccttcactgactctgctaggtggtgccctgattgttggcatggtgagattaacacaacacctgtccttactgtgtgaaaaatatagcactgtagtcagagatgaggtaggtggaaaagtaccttatatagaacagcatcagttcaaactgtgcattatgaggaggagcaaaggaagagcagagaaatcttaagacggtggccaaattaaagtgctggccttcagatgtctgtgatttctgcaactgaggacctaattatgcctgtctgcaaactaataatgtaaaagcgtgatgttacagactgcagagttaaagaaaagcagacattgacagtttctgatgagcataaacagtaagtgcagtcacaggccaaacttcttgctaggaacagcaagactgggaagaggtcttaaatttagtgatactgttattattctatattctcaatatagtaacacatgcatcttgctgtgtcaaatgctttctgggccatcattaaaaggacattaaaaacgtttttcttctaatgaatgcagtataccacaggacttcaattcactgaatgacaaaatatagagaaataaacttgctacaattaatggggccaaaagggtggttcgaatttcttgataaagcttccaggtgaacatctgacgtgttagtagtcttcttttggtagtgccacattccccaaggtattaaaatgttatgctccaaaagggtatattcttttagattttattcaacccaattaggtctgaggactgaatcacactgaaaccattaacttcatttgaaactcaaaacatttttgaaatcagatgaaggccaagttctccaacctctcttaggaacataagttaaattgaacaagggacttttaaaaatgaaataaaaacaaaattaaataaaaatgaaataaatagataatgattttggaaattcatactagaattaagtttagtctaattatattttaatatgaaacaatgaaggttttctgcctccttgccaacctagaaaaattgacaaaaataagaatacctaaaagtatacatggttcttagcataaccacaaaattattatagtgacagattaaataaggttgcagatagattcatagactttaactggctaaaaaaatacatttaaaaaccttttctgtacttacctacatgaggaatggagtatactgttggtagaaaaatcatttacctaactactgtatacgcacaagggactaatttttttcctccactaaaactcttatatgtagttgtgtacaaattaagtcagaaaatttcctcatggctcacacctgtcactttatgctaactagcaaggctggaatattaacatacctaaaatcaagcagaagaaatggcactgcactaataaaaaggaggtgcaaaaccttaagtggaataggtgcatgaagtttatttaaagactaacatcccaacttgggaaactcctaataaattctaaactcttccgaattttagaaccttgatatttctttacaccttttataaaagatgcctcttgactagggctaagcaagcagtgtgtacacaaacagaattgtgtgcaagtatacacacaccaaatgcactaataatgaagaagagagaacaaaatgaatttcaaatgccgaattcgggaacctcctcaaactattgcctttttcaaatggctggaccaacgattaaacttcagccaagtttttttcttaaggtcttccatatcattaaaaacaaggcatgccaactctgactttataaatctaaaattcagtgatctgcacagtttctgagcttgaagtattgaattgtgactcatctatttttttttcccattttccttctgaggtagagttaccaatccaattttatcaggaccacagatattttgagctaaaccccatgatcttttcatacagtaaaaataatttttatgaaaaaagaaagcaggcttcccaggccatggcacatagatatatttacaatttttaatgtaataattaaaaatggtattgtttatattttaaaaaacagcccagctgtattattctgtcaccaagaattattaattgaggatgctgtcaatgctgaattttatagttcagccttcacaatcccatccatgatgaagagttgattctcttacggtatacaatatactctcacaactttcagccttctcttaaagacatgccccaaatgagcaggatggatataaagaatgtaattcattcaaacaactcctccctgttctgccccctcccctcacattcccctcttctcaaaaacatctgaagtatgaaagttgtctttaaatagtaaaagcaccacaatctattaacaccacatattatctttaaacttaaatattttagtgatgtcttggacatcaaaataatttcttaaggtggactcttgagtatgtgggtccagcccaggtctgcagtttgtgcagacatagaaaaaagaggaactttaaatattcagaaaaagttaacaggctagctttaaaatactgctggaaattaaatttcttcagagttggcaagcatgggctattgatcaaagtatgaattaaacggatttacatcattaagaaaaaacaaatccgtgttattgtgctgtgaaatttccatgatgcctttcaaataggctgctcacaatttttttataattccaaatcactcgatttttgatggaaaaaagaatacagatggactgtgttttacctatgtgaaagtcaccaatccatttaaaataaaatccaagagggcatatacagtctaatcaagtcatcattttcctgattaataagaactacactttacacaaaatactttatcagcagctgttttcatcaaaaaatcaagtcagtttcacagttgaaaaagttacacattaaaatattttacaattcattatatattcaccaggttcccattttctaatgggcttttaatataaagcagaatagaagggaaaatctcaaagttgattactttgacactaagttttacataggacactaagaaccacaaaaagcttaggttctattgtaaaatagcaaccaaattccattcttcttttaaaaatccaattagaaacatcttttttaaaaaaacaaattccacaataagagtaacagatttcaaattaacagtagtctaaaaatcttcaaaataaatggttttgtatagctgagaatatggtagaaagtgaaagcataattttccaacagtcatttcttactacagtgtgtttaaaattatttttattacttttagactttttctcaaaataattattcaaggaaatatttcttaagtggcccaataaaactgtagagccaatagtcagttacaccatattcaaggacaaggatagtcagctatagataggaactgtctaaaccacgagaactgatctctgatactgaagtacccagaagtggctatattatcactgacttgaaacagatcttagtcacccatgtagcatttaattcaatgtttggttctttgcctcatttctttcttaggtcacaatctatagtctttatagaatttgtctacatttcttctaatagaattaatttggttgtagtaacttttgaaaataaatgtaaatggtgaaatcggccatgtggtttgtgcattttaatggtggagaggtcctgggagaaggaggggagacaactatctggactgatagataaaaatgcaaaagtggtataaattttgtgcaaggaggctcacagcatttttggcactcgggtaaaacacagttctctgttaaatcttcagtttctaccatcaaactttcagatttgtaccattttactgagttttcctataatttaaccctgatattgaaaaggctgggatgttagtatgtatcaactgcctatatctaaacaacacaaaatgttaataagttttaataagttatgaaatcttctacaactgcaaaataatctttctggtttcctgcttaaaacagagtttaaattctgcttaactatcgcaagacagtttgcagaagtaagttcccttaatcttcanatttacttttcttgttggcaatattatatacatgctttagtgaaatacctaaatttccaataattatgccctttaagggatctaaaatagccagatattaagagtattggtattagagtcccttgttcactactcaagacttcaactataggtaacagatttcataaatgaatatttttaaagtgatgctgttttactagagtatacaatgttcactctttataaagttgttttccaataatatgcctaatctaaaaaactgtcaataattattgcacttttttgatgtggcacctggacatctgctaaagctaatttcctaggacattaatcattcatttcaaatacagagtaaaatatcagattctagaatgacgactagcagtagcctctacatcttgggttaatgtttttcaaaatgtttaagaatgtgtcctgtgctcaaatagtatttaataaagttggagagtgagctctgactacttgggaatgagacatatcttaaaatggtttaat

SEQ ID NO: 241016 - DNA, 5837 bp, Homo sapiens
  misc_feature (5321)..(5321): n is a, c, g, or t
taggctagtacgaggctggtttaaatcggccgagggttcctggttctccaagcaggaactgagagcaagggtcaggaggcgacaggtccaagtacagtagacactcaaagtgaaccctcagatatgaaagagccagatgaagaaaagaatgaccaacagggagaggcattggactcattgcagaagagaaagaacaagaaaaagaaaaagaagaggaaaaaatccccagtacccatagaaacccttaaagatgtttaaaaagagttaacttatcagaacacagatttaagtgaaattaaggaagaagagcaggtaaagtctactgacagaaagtcagcagtggaagcccaaaacgaggtgactgaaaatccaaaacagaaaattgcagcagaaagcagtgaaaatgttgattgtccagagaatcctaaaatgaagttggatggaaaacttgaccaagaaggcaatgatgtaaaaacagcagctgaggaggtactagctggtagagacacattagattttgaggatgtcacagttcaatcatcaggcccgagggctggtggtgaagaattagatgaaggtgttgcaaaagataatgctaaaatagatggtgccacttaaagcaatcctgaagaaccagagagcgaagatgcagatcactgcaccgtacccaaaaatgaaagtccctcacaggacattagtgatgcctgtgaagcagaaagtacagagaggtgtgggatgtcagaacatccaagtcagaccatcaggaaagctttagacagcaatagcctaaaaaaccatgacttgttggcaccaggaggagagccgggggacttcaatccagaaagcagagaagataccagaggagggaacgagaagggcaaaagcaaagaagaccgtaccatgtcctaagctgaggcaggcggcaggcgtggtgcacaggaagtctgagtgtgaggggctcttttctctccactgccaatgacagcctttcctgcctcagggaagaagagagagacagactacagtgatggagacccactagatgtgcacaagaggctgccatccagtactggagaggaccgagccgtgatgctggggtttgccatgatgggcttctcagtcctaatgttcttcttgctcggaacaaccattctaaagccttttatgctcagcattcagagagaagaatcgacctgcactgccatccacacagatatcatggacgactggctggactgtgccttcacctgtggtgtgcactgccacggtcaggggaagtacccatgtcttcaggtgtttgtgaacctcagccatccaggtcagaaagctctcctacattataatgaagaggctgtccagataaatcccaagtgcttttacacacctaagtgccaccaagatagaaatgatttgctcaacagtgctctggacataaaagaattcttcgatcacaaaaatggaactcccttttcatgcttctacagtccagccagccaatctgaagatgtcattcttataaaaaacgtgatgttacagactgcagagttaaagaaaagcagacattgacagtttctgatgagcataaacagtaagtgcagtcacaggccaaacttcttgctaggaacagcaagactgggaagaggtcttaaatttagtgatactgttattattctatattctcaatatagtaacacatgcatcttgctgtgtcaaatgctttctgggccatcattaaaaggacattaaaaacgtttttcttctaatgaatgcagtataccacaggacttcaattcactgaatgacaaaatatagagaaataaacttgctacaattaatggggccaaaagggtggttcgaatttcttgataaagcttccaggtgaacatctgacgtgttagtagtcttcttttggtagtgccacattccccaaggtattaaaatgttatgctccaaaagggtatattcttttagattttattcaacccaattaggtctgaggactgaatcacactgaaaccattaacttcatttgaaactcaaaacatttttgaaatcagatgaaggccaagttctccaacctctcttaggaacataagttaaattgaacaagggacttttaaaaatgaaataaaaacaaaattaaataaaaatgaaataaatagataatgattttggaaattcatactagaattaagtttagtctaattatattttaatatgaaacaatgaaggttttctgcctccttgccaacctagaaaaattgacaaaaataagaatacctaaaagtatacatggttcttagcataaccacaaaattattatagtgacagattaaataaggttgcagatagattcatagactttaactggctaaaaaaatacatttaaaaaccttttctgtacttacctacatgaggaatggagtatactgttggtagaaaaatcatttacctaactactgtatacgcacaagggactaatttttttcctccactaaaactcttatatgtagttgtgtacaaattaagtcagaaaatttcctcatggctcacacctgtcactttatgctaactagcaaggctggaatattaacatacctaaaatcaagcagaagaaatggcactgcactaataaaaaggaggtgcaaaaccttaagtggaataggtgcatgaagtttatttaaagactaacatcccaacttgggaaactcctaataaattctaaactcttccgaattttagaaccttgatatttctttacaccttttataaaagatgcctcttgactagggctaagcaagcagtgtgtacacaaacagaattgtgtgcaagtatacacacaccaaatgcactaataatgaagaagagagaacaaaatgaatttcaaatgccgaattcgggaacctcctcaaactattgcctttttcaaatggctggaccaacgattaaacttcagccaagtttttttcttaaggtcttccatatcattaaaaacaaggcatgccaactctgactttataaatctaaaattcagtgatctgcacagtttctgagcttgaagtattgaattgtgactcatctatttttttttcccattttccttctgaggtagagttaccaatccaattttatcaggaccacagatattttgagctaaaccccatgatcttttcatacagtaaaaataatttttatgaaaaaagaaagcaggcttcccaggccatggcacatagatatatttacaatttttaatgtaataattaaaaatggtattgtttatattttaaaaaacagcccagctgtattattctgtcaccaagaattattaattgaggatgctgtcaatgctgaattttatagttcagccttcacaatcccatccatgatgaagagttgattctcttacggtatacaatatactctcacaactttcagccttctcttaaagacatgccccaaatgagcaggatggatataaagaatgtaattcattcaaacaactcctccctgttctgccccctcccctcacattcccctcttctcaaaaacatctgaagtatgaaagttgtctttaaatagtaaaagcaccacaatctattaacaccacatattatctttaaacttaaatattttagtgatgtcttggacatcaaaataatttcttaaggtggactcttgagtatgtgggtccagcccaggtctgcagtttgtgcagacatagaaaaaagaggaactttaaatattcagaaaaagttaacaggctagctttaaaatactgctggaaattaaatttcttcagagttggcaagcatgggctattgatcaaagtatgaattaaacggatttacatcattaagaaaaaacaaatccgtgttattgtgctgtgaaatttccatgatgcctttcaaataggctgctcacaatttttttataattccaaatcactcgatttttgatggaaaaaagaatacagatggactgtgttttacctatgtgaaagtcaccaatccatttaaaataaaatccaagagggcatatacagtctaatcaagtcatcattttcctgattaataagaactacactttacacaaaatactttatcagcagctgttttcatcaaaaaatcaagtcagtttcacagttgaaaaagttacacattaaaatattttacaattcattatatattcaccaggttcccattttctaatgggcttttaatataaagcagaatagaagggaaaatctcaaagttgattactttgacactaagttttacataggacactaagaaccacaaaaagcttaggttctattgtaaaatagcaaccaaattccattcttcttttaaaaatccaattagaaacatcttttttaaaaaaacaaattccacaataagagtaacagatttcaaattaacagtagtctaaaaatcttcaaaataaatggttttgtatagctgagaatatggtagaaagtgaaagcataattttccaacagtcatttcttactacagtgtgtttaaaattatttttattacttttagactttttctcaaaataattattcaaggaaatatttcttaagtggcccaataaaactgtagagccaatagtcagttacaccatattcaaggacaaggatagtcagctatagataggaactgtctaaaccacgagaactgatctctgatactgaagtacccagaagtggctatattatcactgacttgaaacagatcttagtcacccatgtagcatttaattcaatgtttggttctttgcctcatttctttcttaggtcacaatctatagtctttatagaatttgtctacatttcttctaatagaattaatttggttgtagtaacttttgaaaataaatgtaaatggtgaaatcggccatgtggtttgtgcattttaatggtggagaggtcctgggagaaggaggggagacaactatctggactgatagataaaaatgcaaaagtggtataaattttgtgcaaggaggctcacagcatttttggcactcgggtaaaacacagttctctgttaaatcttcagtttctaccatcaaactttcagatttgtaccattttactgagttttcctataatttaaccctgatattgaaaaggctgggatgttagtatgtatcaactgcctatatctaaacaacacaaaatgttaataagttttaataagttatgaaatcttctacaactgcaaaataatctttctggtttcctgcttaaaacagagtttaaattctgcttaactatcgcaagacagtttgcagaagtaagttcccttaatcttcanatttacttttcttgttggcaatattatatacatgctttagtgaaatacctaaatttccaataattatgccctttaagggatctaaaatagccagatattaagagtattggtattagagtcccttgttcactactcaagacttcaactataggtaacagatttcataaatgaatatttttaaagtgatgctgttttactagagtatacaatgttcactctttataaagttgttttccaataatatgcctaatctaaaaaactgtcaataattattgcacttttttgatgtggcacctggacatctgctaaagctaatttcctaggacattaatcattcatttcaaatacagagtaaaatatcagattctagaatgacgactagcagtagcctctacatcttgggttaatgtttttcaaaatgtttaagaatgtgtcctgtgctcaaatagtatttaataaagttggagagtgagctctgactacttgggaatgagacatatcttaaaatggtttaat

SEQ ID NO: 241017 - DNA, 6226 bp, Homo sapiens
  misc_feature (5710)..(5710): n is a, c, g, or t
tgagagcgcttctctccctgaaaacacagcacaggttgagtcaaatgaggtcatgggtgcaccagatgacaggaccagaactccccttgagccatccaactgttggagtgacttagatggtgggagccacacagagaatgtgggagaggcagcggtgactcaggttggagagcaggcagacacagtggcctcatgtcctttagggcatagtgatgacacagtttatcatgatgacagatgtatggtagaggtcccccaacagttagagacaagcatagggcatagtttagagaaagaattcaccaaccaggaagcagctgagcccaaggaggttccagtgcagagtacagaagcaggtagggatcacaacgaagaagagggtgaagaaaaaggattaagggatgagaaaccaatcaagacagaagttcctggttctccaagcaggaactgagagcaagggtcaggaggcgacaggtccaagtacagtagacactcaaagtgaaccctcagatatgaaagagccagatgaagaaaagaatgaccaacagggagaggcattggactcattgcagaagagaaagaacaagaaaaagaaaaagaagaggaaaaaatccccagtacccatagaaacccttaaagatgtttaaaaagagttaacttatcagaacacagatttaagtgaaattaaggaagaagagcaggtaaagtctactgacagaaagtcagcagtggaagcccaaaacgaggtgactgaaaatccaaaacagaaaattgcagcagaaagcagtgaaaatgttgattgtccagagaatcctaaaatgaagttggatggaaaacttgaccaagaaggcaatgatgtaaaaacagcagctgaggaggtactagctggtagagacacattagattttgaggatgtcacagttcaatcatcaggcccgagggctggtggtgaagaattagatgaaggtgttgcaaaagataatgctaaaatagatggtgccacttaaagcaatcctgaagaaccagagagcgaagatgcagatcactgcaccgtacccaaaaatgaaagtccctcacaggacattagtgatgcctgtgaagcagaaagtacagagaggtgtgggatgtcagaacatccaagtcagaccatcaggaaagctttagacagcaatagcctaaaaaaccatgacttgttggcaccaggaggagagccgggggacttcaatccagaaagcagagaagataccagaggagggaacgagaagggcaaaagcaaagaagaccgtaccatgtcctaagctgaggcaggcggcaggcgtggtgcacaggaagtctgagtgtgaggggctcttttctctccactgccaatgacagcctttcctgcctcagggaagaagagagagacagactacagtgatggagacccactagatgtgcacaagaggctgccatccagtactggagaggaccgagccgtgatgctggggtttgccatgatgggcttctcagtcctaatgttcttcttgctcggaacaaccattctaaagccttttatgctcagcattcagagagaagaatcgacctgcactgccatccacacagatatcatggacgactggctggactgtgccttcacctgtggtgtgcactgccacggtcaggggaagtacccatgtcttcaggtgtttgtgaacctcagccatccaggtcagaaagctctcctacattataatgaagaggctgtccagataaatcccaagtgcttttacacacctaagtgccaccaagatagaaatgatttgctcaacagtgctctggacataaaagaattcttcgatcacaaaaatggaactcccttttcatgcttctacagtccagccagccaatctgaagatgtcattcttataaaaaacgtgatgttacagactgcagagttaaagaaaagcagacattgacagtttctgatgagcataaacagtaagtgcagtcacaggccaaacttcttgctaggaacagcaagactgggaagaggtcttaaatttagtgatactgttattattctatattctcaatatagtaacacatgcatcttgctgtgtcaaatgctttctgggccatcattaaaaggacattaaaaacgtttttcttctaatgaatgcagtataccacaggacttcaattcactgaatgacaaaatatagagaaataaacttgctacaattaatggggccaaaagggtggttcgaatttcttgataaagcttccaggtgaacatctgacgtgttagtagtcttcttttggtagtgccacattccccaaggtattaaaatgttatgctccaaaagggtatattcttttagattttattcaacccaattaggtctgaggactgaatcacactgaaaccattaacttcatttgaaactcaaaacatttttgaaatcagatgaaggccaagttctccaacctctcttaggaacataagttaaattgaacaagggacttttaaaaatgaaataaaaacaaaattaaataaaaatgaaataaatagataatgattttggaaattcatactagaattaagtttagtctaattatattttaatatgaaacaatgaaggttttctgcctccttgccaacctagaaaaattgacaaaaataagaatacctaaaagtatacatggttcttagcataaccacaaaattattatagtgacagattaaataaggttgcagatagattcatagactttaactggctaaaaaaatacatttaaaaaccttttctgtacttacctacatgaggaatggagtatactgttggtagaaaaatcatttacctaactactgtatacgcacaagggactaatttttttcctccactaaaactcttatatgtagttgtgtacaaattaagtcagaaaatttcctcatggctcacacctgtcactttatgctaactagcaaggctggaatattaacatacctaaaatcaagcagaagaaatggcactgcactaataaaaaggaggtgcaaaaccttaagtggaataggtgcatgaagtttatttaaagactaacatcccaacttgggaaactcctaataaattctaaactcttccgaattttagaaccttgatatttctttacaccttttataaaagatgcctcttgactagggctaagcaagcagtgtgtacacaaacagaattgtgtgcaagtatacacacaccaaatgcactaataatgaagaagagagaacaaaatgaatttcaaatgccgaattcgggaacctcctcaaactattgcctttttcaaatggctggaccaacgattaaacttcagccaagtttttttcttaaggtcttccatatcattaaaaacaaggcatgccaactctgactttataaatctaaaattcagtgatctgcacagtttctgagcttgaagtattgaattgtgactcatctatttttttttcccattttccttctgaggtagagttaccaatccaattttatcaggaccacagatattttgagctaaaccccatgatcttttcatacagtaaaaataatttttatgaaaaaagaaagcaggcttcccaggccatggcacatagatatatttacaatttttaatgtaataattaaaaatggtattgtttatattttaaaaaacagcccagctgtattattctgtcaccaagaattattaattgaggatgctgtcaatgctgaattttatagttcagccttcacaatcccatccatgatgaagagttgattctcttacggtatacaatatactctcacaactttcagccttctcttaaagacatgccccaaatgagcaggatggatataaagaatgtaattcattcaaacaactcctccctgttctgccccctcccctcacattcccctcttctcaaaaacatctgaagtatgaaagttgtctttaaatagtaaaagcaccacaatctattaacaccacatattatctttaaacttaaatattttagtgatgtcttggacatcaaaataatttcttaaggtggactcttgagtatgtgggtccagcccaggtctgcagtttgtgcagacatagaaaaaagaggaactttaaatattcagaaaaagttaacaggctagctttaaaatactgctggaaattaaatttcttcagagttggcaagcatgggctattgatcaaagtatgaattaaacggatttacatcattaagaaaaaacaaatccgtgttattgtgctgtgaaatttccatgatgcctttcaaataggctgctcacaatttttttataattccaaatcactcgatttttgatggaaaaaagaatacagatggactgtgttttacctatgtgaaagtcaccaatccatttaaaataaaatccaagagggcatatacagtctaatcaagtcatcattttcctgattaataagaactacactttacacaaaatactttatcagcagctgttttcatcaaaaaatcaagtcagtttcacagttgaaaaagttacacattaaaatattttacaattcattatatattcaccaggttcccattttctaatgggcttttaatataaagcagaatagaagggaaaatctcaaagttgattactttgacactaagttttacataggacactaagaaccacaaaaagcttaggttctattgtaaaatagcaaccaaattccattcttcttttaaaaatccaattagaaacatcttttttaaaaaaacaaattccacaataagagtaacagatttcaaattaacagtagtctaaaaatcttcaaaataaatggttttgtatagctgagaatatggtagaaagtgaaagcataattttccaacagtcatttcttactacagtgtgtttaaaattatttttattacttttagactttttctcaaaataattattcaaggaaatatttcttaagtggcccaataaaactgtagagccaatagtcagttacaccatattcaaggacaaggatagtcagctatagataggaactgtctaaaccacgagaactgatctctgatactgaagtacccagaagtggctatattatcactgacttgaaacagatcttagtcacccatgtagcatttaattcaatgtttggttctttgcctcatttctttcttaggtcacaatctatagtctttatagaatttgtctacatttcttctaatagaattaatttggttgtagtaacttttgaaaataaatgtaaatggtgaaatcggccatgtggtttgtgcattttaatggtggagaggtcctgggagaaggaggggagacaactatctggactgatagataaaaatgcaaaagtggtataaattttgtgcaaggaggctcacagcatttttggcactcgggtaaaacacagttctctgttaaatcttcagtttctaccatcaaactttcagatttgtaccattttactgagttttcctataatttaaccctgatattgaaaaggctgggatgttagtatgtatcaactgcctatatctaaacaacacaaaatgttaataagttttaataagttatgaaatcttctacaactgcaaaataatctttctggtttcctgcttaaaacagagtttaaattctgcttaactatcgcaagacagtttgcagaagtaagttcccttaatcttcanatttacttttcttgttggcaatattatatacatgctttagtgaaatacctaaatttccaataattatgccctttaagggatctaaaatagccagatattaagagtattggtattagagtcccttgttcactactcaagacttcaactataggtaacagatttcataaatgaatatttttaaagtgatgctgttttactagagtatacaatgttcactctttataaagttgttttccaataatatgcctaatctaaaaaactgtcaataattattgcacttttttgatgtggcacctggacatctgctaaagctaatttcctaggacattaatcattcatttcaaatacagagtaaaatatcagattctagaatgacgactagcagtagcctctacatcttgggttaatgtttttcaaaatgtttaagaatgtgtcctgtgctcaaatagtatttaataaagttggagagtgagctctgactacttgggaatgagacatatcttaaaatggtttaat

SEQ ID NO: 241018 - DNA, 1596 bp, Homo sapiens
  misc_feature (297)..(297): n is a, c, g, or t
tgccctgcgagaatgtatctcatcctttgctggagcaggtttgcaggcacagtggagagaggagagaagaaatgaagggacacttatgcagaaccatgagtggccagagaggaggagaaggagggtgagaggagcaaagaagccatgacaacttcataattctgagtggactgggcagtggccagaaattctggtggtggatatgctgcctttccaacaggtgaatatgaaagaataagtcaaaccctgttcaggacgctgttaattccaaatgtgaactttttgagtcattctttncatgtggaattcaaaggagaatgtaaacaaattttcaggagggacgtgcaatatccctgaaagataacaaagttcgtaacacttatttacatacaacattctctagttattgattaaacagatctctacagacttgcatgaggcaacatttcttaggcttgtttgctacaatatctttaaaaatacttgattacacatcactttagcttatttagatggacttttcaccaagctctgaactgggatttcattttgttgcattcatcctgctcacgagacacaggtaggcagcaaatgagattatccctccagtccccatggattggaaatgttcccccttctttatgagctcactgcagtatctccttctccctttccccaaaggacagcctttcctgcctcagggaagaagagagagacagactacagtgatggagacccactagatgtgcacaagaggctgccatccagtactggagaggaccgagccgtgatgctggggtttgccatgatgggcttctcagtcctaatgttcttcttgctcggaacaaccattctaaagccttttatgctcagcattcagagagaagaatcgacctgcactgccatccacacagatatcatggacgactggctggactgtgccttcacctgtggtgtgcactgccacggtcaggggaagtacccatgtcttcaggtgtttgtgaacctcagccatccaggtcagaaagctctcctacattataatgaagaggctgtccagataaatcccaagtgcttttacacacctaagtgccaccaagatagaaatgatttgctcaacagtgctctggacataaaagaattcttcgatcacaaaaatggaactcccttttcatgcttctacagtccagccagccaatctgaagatgtcattcttataaaaaagtatgaccaaatggctatcttccactgtttattttggccttcactgactctgctaggtggtgccctgattgttggcatggtgagattaacacaacacctgtccttactgtgtgaaaaatatagcactgtagtcagagatgaggtaggtggaaaagtaccttatatagaacagcatcagttcaaactgtgcattatgaggaggagcaaaggaagagcagagaaatcttaagacggtggccaaattaaagtgctggccttcagatgtctgtgatttctgcaactgaggacctaattatgcctgtctgcaaactaataatgtaaaaggtaataattaaagtatcatattttcatgtgggaaaaaatttaaaagcc

SEQ ID NO: 241019 - DNA, 1895 bp, Homo sapiens
taggctagtacgaggctggtttaaatcggccgagggttcctggttctccaagcaggaactgagagcaagggtcaggaggcgacaggtccaagtacagtagacactcaaagtgaaccctcagatatgaaagagccagatgaagaaaagaatgaccaacagggagaggcattggactcattgcagaagagaaagaacaagaaaaagaaaaagaagaggaaaaaatccccagtacccatagaaacccttaaagatgtttaaaaagagttaacttatcagaacacagatttaagtgaaattaaggaagaagagcaggtaaagtctactgacagaaagtcagcagtggaagcccaaaacgaggtgactgaaaatccaaaacagaaaattgcagcagaaagcagtgaaaatgttgattgtccagagaatcctaaaatgaagttggatggaaaacttgaccaagaaggcaatgatgtaaaaacagcagctgaggaggtactagctggtagagacacattagattttgaggatgtcacagttcaatcatcaggcccgagggctggtggtgaagaattagatgaaggtgttgcaaaagataatgctaaaatagatggtgccacttaaagcaatcctgaagaaccagagagcgaagatgcagatcactgcaccgtacccaaaaatgaaagtccctcacaggacattagtgatgcctgtgaagcagaaagtacagagaggtgtgggatgtcagaacatccaagtcagaccatcaggaaagctttagacagcaatagcctaaaaaaccatgacttgttggcaccaggaggagagccgggggacttcaatccagaaagcagagaagataccagaggagggaacgagaagggcaaaagcaaagaagaccgtaccatgtcctaagctgaggcaggcggcaggcgtggtgcacaggaagtctgagtgtgaggggctcttttctctccactgccaatgacagcctttcctgcctcagggaagaagagagagacagactacagtgatggagacccactagatgtgcacaagaggctgccatccagtactggagaggaccgagccgtgatgctggggtttgccatgatgggcttctcagtcctaatgttcttcttgctcggaacaaccattctaaagccttttatgctcagcattcagagagaagaatcgacctgcactgccatccacacagatatcatggacgactggctggactgtgccttcacctgtggtgtgcactgccacggtcaggggaagtacccatgtcttcaggtgtttgtgaacctcagccatccaggtcagaaagctctcctacattataatgaagaggctgtccagataaatcccaagtgcttttacacacctaagtgccaccaagatagaaatgatttgctcaacagtgctctggacataaaagaattcttcgatcacaaaaatggaactcccttttcatgcttctacagtccagccagccaatctgaagatgtcattcttataaaaaagtatgaccaaatggctatcttccactgtttattttggccttcactgactctgctaggtggtgccctgattgttggcatggtgagattaacacaacacctgtccttactgtgtgaaaaatatagcactgtagtcagagatgaggtaggtggaaaagtaccttatatagaacagcatcagttcaaactgtgcattatgaggaggagcaaaggaagagcagagaaatcttaagacggtggccaaattaaagtgctggccttcagatgtctgtgatttctgcaactgaggacctaattatgcctgtctgcaaactaataatgtaaaaggtaataattaaagtatcatattttcatgtgggaaaaaatttaaaagcc

SEQ ID NO: 241020 - DNA, 462 bp, Homo sapiens
tgagggtggcctaatttacaaaaccggccaggctgcctaacccctagattccagcccagagtgttgccataaattgctgtcaagacatgcctctatgtcccatgtttgccagtgagaaaagggttcatattctaagttcttcaagtctctctcactgcctcaatgtgaagtcaatggaaaacagtcaaatacaccaaaaattaacttcaaatggatatctgctatgaattccaacttggttggacacctctccaggccaactgttgtgaaaatgcattgttgctttaaaaaacactgtgagagatggctgggcgtggtggcttacttgaggtcaggagtttgagaacagcccggccaatatggtgagaccccagtctctatgaaaaatataaaaattgagccagatgtggtggcatgcacttgtagtccacgctacttgggaggctgaggtaggagtatcac

SEQ ID NO: 241021 - DNA, 477 bp, Homo sapiens
tgagggtggcctaatttacaaaaccggccaggctgcctaacccctagattccagcccagagtgttgccataaattgctgtcaagacatgcctctatgtcccatgtttgccagtgagaaaagggttcatattctaagttcttcaagtctctctcactgcctcaatgtgaagtcaatggaaaacagtcaaatacaccaaaaattaacttcaaatggatatctgctatgaattccaacttggttggacacctctccaggccaactgttgtgaaaatgcattgttgctttaaaaaacactgtgagagatggctgggcgtggtggcttacttgaggtcaggagtttgagaacagcccggccaatatggtgagaccccagtctctcaagtagctaggattacaggtgcccaacaccatgcccgtttaatttttgcatttttagtagagatggggtttcacatcttggccggctggtcttgctg

SEQ ID NO: 241022 - DNA, 521 bp, Homo sapiens
cgctagtataatcctatattgtagcccacaggggtgcagttagagaataggagactgtcagtatagactccatccagtcacacataaaaataaggcctcgccaatcaagcaggaaatagagggaggcgctcacatcacaacctgaacagatggccactttaaaaaaacctactcatcttgagtaattttaagggaaataggctatttaaaacaataacttataaagtcagcccttaattatagatacatttggaagtaagtggtagcatgaataatgtagttttcttcttatgaatatatctgatattttgggaatttttagcatttcaaataaagtagttacactataaagagttgttcttaattattgagtgggattgtacttaatcttttatgctgaatttccttctcacaagatgtcactcctcctgctagaagacagatttcttccttggctgacaggctgaattaagcaaaagtattttctatttcaagatcaaataaagttgatgctggtttac

SEQ ID NO: 241023 - DNA, 677 bp, Homo sapiens
agattatatctgtaccaaaataattagggtctttttatattttttcttttaactagtatctttaaaaaatcaataccaactcagttttctatgtagactcagttaataccggtattatggaaaagctgaatcaagtgtgcaaatgagctttttcaaggtgatatccatgttttcagtattgtactcctgggaagaagatcaaagcctataggaaggtcagtgctggaagcttctctgaagcattgttgctggagtggagtagtggttcctggactggacttctgagactctacatgtctttggaggcagtcattgggatcatgagctattttcggtggctgtagtagtaacgcattctttccgtaaggctctgatggatattttataaggttttaattttaaaatgagaagatgaatcattttgaattaatgcatcttagtagataagagctttcaatacctggagtccacggggacagagccataaaagattcatagtagtacgatgtcgtgacatgtacccatatctttcctcgtactcagattcagcactcacttcctaactctcagttctagcaaagaaacctggaggttagaaactggagatatgcttgaagagaaagtttgagaaatcctagtgctttcatatgataatgaaatttcctatttggaaagca

SEQ ID NO: 241024 - DNA, 363 bp, Homo sapiens
taatttgttacagctgtgataggaaacaaaagcacaatgccttgagagctctacatggcctatccctttcctaattctccaactttactttattctcatgtcttcaggcttttaaccatgctattcactattcactacattgatctcatcttggacacacattatatttttctgggaatccaccttaacctccccgtgtaatttagttttctatatacatattcttatagcatcttgttctcatatttcattgaattaattattcactcatcatttatctattcatcaaatatatattaatttcctattattggctaagcatgggagttataatggtgttcaaaacaaaacaaaacaaaaaac

SEQ ID NO: 241025 - DNA, 379 bp, Homo sapiens
tcatttcttttttaatcaagtaaacttttttcttcttcacttcgtttttttacctttactagttcggaagatatacactctatttttactcttttattgctgtcaaatacaaattttcacattagtttaagaaaacggaagttaaataatcttactttcttctcaaacaatacacatatctcggaacacatagacagaaagtccccccaggagtggggagggatagcactgggagatatacctaatgctagatgacgagttagtgggtgcagcacaccagcatggcacatgtatacatatgtaactaacctgcacaatgtgcacatgtaccctaaaacttaaagtataataaaaaataaataaataaataaataaaaat

SEQ ID NO: 241026 - DNA, 296 bp, Homo sapiens
cagggattaaggttctacctaccagtttcccattgtctagttaacgcctaaataattccagcatgtttccacccaactacaagtctcgattctccttctgggtactcctgaaagagtaaacgttcccacccaaactgaagaccaaggaacccactgttgcaggaatcatgtgaccctgagtacacacagctccccagggagaaggccacagggcaagctctcaactctggacagaaatgaggacacccaggaactccatgcttaagcgtttctatgcccagcctggatctgggagt

SEQ ID NO: 241027 - DNA, 284 bp, Homo sapiens
ccttcaaatttttcttcagtagctttacttttgcttttctttaagttttactttcccttggagtttatatgaaggaaatggaatgaggtctgggatttgcttcagaaccgcccagtggggcgagctagtaggggatgcaggtaagggtctaggtgagaccggcttgggtgtgagctaactgttattgaagctacgtgttgggcacagggaggtttattagattactctgttttgccatatgtttgaaaatttccattaaaatgtcttcctcaattctctccaga

SEQ ID NO: 241028 - DNA, 485 bp, Homo sapiens
tacgtgatatttatagaatactaaacccaacatgagtagaaatacaagcgtttcaagtgttcatggtaacttcaccaggaaagactgtttacagggcacaagtctcaatcaattttaaaagattgaaatccaaagtatgttctctgccaccaatagaataagaaattaataccaataagacatctgttaagaattggaaattaaaccttaaaattctgacttatgggttattcaggggaaaaatgaggtaaaatatatttcaaaccaaattataatgaaaatacagcatatcacatatgtgggatgtagctgaaagagtgcctaatggaaaattttatagttttaaataatctgctaggaaagaaagttacctaaaaagataaaatagaaagtaagtagaaagaagaaataataaaattaagagtagaaatcagaaagccaaaagcgagttctttggagagataaacgcttgttagactgatcaa

SEQ ID NO: 241029 - DNA, 425 bp, Homo sapiens
aataaaacttgctgctgctcactttttgggtccatgctgcgtttgtaagatgtaacgctcattgtgaaggtctgcggcttcactcccaaagccggtgagaccataaacccactggaaggaacgagcaacttcagatgcaccacctgtaagagctgtaacactcacagcgagggtctgcaacttcactcctgaagtcagtgagtccacgaacccaccactaggagtttcttctactggtggaagaaactccggacgggtccgaacatcagaaggaacaaacttcagatacaccgtcttcaagaactgtaacacacaccgtcagggtccacagctttagtcttgaaatcagtgagaccaagaacctgcaaagtctggacacaatttcattgtagaggattttaatttaaaataaaaaataacttaca

SEQ ID NO: 241030 - DNA, 495 bp, Homo sapiens
gtaggctcacctttgccatttcttaatattgcattctccaaattgctaatctctatccagtctcttgaactagacttggcacatggagattccgctcagaaagtgctcttcacacttctacctgcttgactaaccccagattatctttcaagactttaatctgatcttgtgtcttagagaagcccccatacctggtagagcatgtaccatcttacatgcttaaataactccacatttatttgtgtttattactgctgtgttataaatatacatttgttggtctctctcttggattattttgtttctttgtcctgtaactaccactgaaagggtgcaatacagctttcttgaaatgtgtattgaacggatgaatgtataaatctataatctcagaactttgggaggccaaggaggatggatcacatgaggataggaacttgagaacagcctgggcaacatagtaagaccctgtctctactaaaaataaaaaagaaa

SEQ ID NO: 241031 - DNA, 365 bp, Homo sapiens
aacatctaagggcctccctttattttaattttttattaaaatttcagattattatgtttaatttcaaacaaagaataatacaatggaccaggcacagtggctcatgactgtcatcccagcactttgggaggccaaggtggaaggatcgcttgaggccagggattcaagaccagcttggacagaatggtgagatctcatctctacttaaaaaaaaaaatgctggtcatggttgtgtgcacctgttgtcccagttacttacgaggctgaggcaggaggatggcttgagcccagaggttgagggtgcagtgagctatgattgcgccaccgcactccagcctcggtgagagagcgggacactgtctcca

SEQ ID NO: 241032 - DNA, 2214 bp, Homo sapiens
  misc_feature (483)..(483): n is a, c, g, or t
  misc_feature (1719)..(1719): n is a, c, g, or t
ttgtggtgcttataggcatgttgttgtttctcaggtagattgaaagctttgttccattataggatctttgaggatcgtacctctttttcacctttgcctactgaaaaactgtggcaaacttttcaagtgtccaaatcaatggctctgtgtcttctaagttttctagctcatcatcatctgtagtggatttcagcagactttgaagttcctagctggtaagggtttctctttgcttttcggtgtgttccttaacgtcatcctcagtcatttcagacagcgttccccaccaactttttttgcaacatttcacatattcttaataactgcattaatagtagggaagtccttgaaatcattgactcccttaccccatgatggcttgtaacatgtattggctgtcctgggctttagggcatctgtagccttcccaataagcacaattgtatttgtaattgtgaagctcttcaataaaaccactgtggnacattcaaggttagcatcaagactccatgaattcacccaaggatgtaagtcacttgaatgcacttgatgccttgatctagtgacgcagcagtgatgtagttttaggaggcagaaatatcacttgcatgttcttttaggcaaaacagagattggagagatggcctggagtgttgtcaattctgaggaagaccttgagtggcagtcccttctctttgaggtattccatcacatcaggagtgaagcattgctagaagaaagccttcttatgttcttgccaggacacaggccagcaagttttgcttttgtcctaaagaacctggtgattgctcagtagacgaagcctcgcttgttctcatgaactaatgcatggcctgacagcaccagaaaaaggtggtctttccaggccttgaaccccagtacctgcactcatgtatgaaggtaccattgggcatcttctagaacatgcctgattcatgacaatagaagatttactctggaaggtagtgtcttttttctgttttatgagctcttctaggaatgctgttgtttccctggcatcagccgatgccaattctcctgtggtcttcaagttcttgggctgcactgtgttgcatagttagcctagccagaacttactggcttcaaactccttcctcttgctctcctcagccccctcacagtgatgcttacagaggctaagtgttttttgttttcttttctttctttccttcttttttttttttcttttttttgagacggagtgttgctctgtcgcccaggctggagtacagtggcgtgatcttggctcactgcaacccccacctcccgggttcaagtgattctcctgcctcagccttctgagtagctgggattacatgtgcgcgccaccacacccagctgtcttttgagtagagactgggtttcaccatgttggtcaggctgatctcgaactcctgaccttgtgatccacccgccttggcctcccaaagtgctgggattacaggagtgagccactgcgcttggcctggctaagtgttttttcaagtatgatgttaccatcagtagggctgtggttctgtgacgtgtcctctagccacacacttaatgcttatccttagtttatcatgaactagagggatcatttttgccactgtaggggcagctctaacactttgaggaacttcagcttctctctgctttagtgtgtgatttcttggtttgttcttaccttatgangaactttccaaggtgatacaccacttttcaaaacatcttaggtttgtattttcttattgagagataccactttttgtcccctgctagccttttagggataggtttgaccacttgattccttcttaggagccattttttaacattttttatttttttatatatgacatctcaagggtctctgaatgaacaaaacagtcttcaaaagccagaacaatggccagatgtggtggctcacatctgtaatcccaccgctttgggaggctgaggcaggtggatcatgaggtcaggagttggagactagcctgaccaacatggtgaaatcgcatctctactaaaaatacaaaaattagtcgggcatggtggcgcgtacctgtaatcccagctactcaggaggctgaggcaggggaatcacttgagcctgagaggtggaggttgcagtgagctgagatcatgccactgcactccagcctgggcaacagggcgagactctgtctc

SEQ ID NO: 241033 - DNA, 297 bp, Homo sapiens
attcagaggggtacatgtatgggtttggtacataggtatattgcgtaatgggagggtttgggcttctggtgaacccatcacccaaatagtgaacatactcaatagtttttcaacccttgcccgcctttgcctctacccccttttggagtccccagtggccattgttcatttttatgtgtacccattgatcagctcccacttataagtgagaacatgaggtatttgattttctgcttctgagttattttaatttcagtaactattaggataatgatctccagttgcaggcatgttgtt

SEQ ID NO: 241034 - DNA, 541 bp, Homo sapiens
aaatattctaccattcacaaaatctcgtttaagtgttgtgaaatacaaacaccagggaatcaagtcccatttgttgtggttcctgcattcgatgactccagatgtgccaccaccgagctagtcttatgacaacctagaaggcaaattgggatggccctatatttgtcactgagagcagaagggttgagaacttagatcctgacaggaggcccacctttattggagaaatggctctgcaacttaacccaacatgtcctccatgacgaaggacaccagcttctcctagagagtacctgaccattgaagttggcagcttgaaagcagtaggatatgaatgcagattccagtccgtcctcgtgggttccagtttgcctgtttccccaacttcacagacatctctctttcccaaatgccttctctgaggatttcaggcttcagcaccaaacacagatgcgatggcctcacacagaagtggctttcaagtcgttagaaacaaatattgttggttaacctggcgaagccatcttggacagaagaaatt

SEQ ID NO: 241035 - DNA, 3938 bp, Homo sapiens
accgagaagaagatatttaccagtttgcttactgctacccatatacatacactcgcttccaacattaccttgacagcctgcaaaagagaaacatggattacttctttcgggagcagctgggccagagtgtgcaacaacgaaagcttgacctcctgacgataaccagccctgacaatctccgggaaggggcagagcagaaggtggtattcatcacaggacgagtccacccaggggaaacaccctcatcatttgtgtgccaagggatcattgacttccttgtaagccagcaccctattgcctgtgtcctccgggaatacctggtcttcaagatcgcaccaatgctcaatcctgatggagtctacctgggcaattacaggtgttctctgatgggatttgatctgaatcgtcactggctggatccctctccatgggtccatcctaccctgcatggagtgaaacaactcatcgtccagatgtacaacgacccaaaaacaagcctggagttttatattgacatccatgcccactccaccatgatgaatggcttcatgtatggcaacatctttgaggatgaggaacggttccagaggcaggccatttttcccaagctcctctgccagaatgctgaggacttctcctattccagcacaccctttaaccgggacgctgtgaaagcaggaactggccgtcgcttcctcggtggactcctggaccacacttcctattgctacaccctagaggtctccttctacagctacatcatcagtggcaccacggctgctgtgccctacactgaagaagcctgtatccttagtccccacccagccttgggccagccctcatccagccgagagtatccaagtctgacaggtcaggaattaggcccccagctcaggtaagggctgagactctcaggtgaggatggaggtgcttcttcttctggtggcgtctttggattgtccagtttgcctcagcccttagtatgatactcctaccccaattgccatgctccaaatctttcccaggccagccggacccatggcctgcccatatcttactctgcttccatctctctcccctctcttctctcatgatgcagtgagtctcctgccatctaagctatgcaagtccacaggctggatgaccatccccagggttgctgaggaagagcttgatgatcttgactccttctaaccctgaacatacaaaaacatatgttctcttttcatcttttgtctaacctatcctctcccactttctcttccctctactcactatttccccttctacttacttttctcacccttgttccctctccttctatgccctcctcctccctcctcacctgtcctgtgcttctctttccttacttctttttccccctcctcccctcctttctgtcctctctctcatcccatcctccttttctttctctcctctttgcctgtcttctgtcttccttgtctttcccctctcatcctctgtgcatctttctctctgcctttgcatttcctttgacaaattccttttcctcttagtttcttcataaaatttctctgaaaactccaaagccttccatgatgaaattagaagttattttctagtttgcctaattttttaaggattaggtagtaactctagtttcccgagtgttgattttaatatcaaggtcactgcatcagagctgtaacagatcgtggcagattctgctttccttgatcctttgttttcgggttgatctatgtctcctttcctaacacttagttttctcagagaagtggagggaggaggaaggaactttagatgaaatgaactctgtatttctgcaaattccccctccctggaggtagaagtgctcttttagcattttttcaacccttggtgagtgtttatggaattcctctgtgcagggaaacatcttttctgaacgtggcatgacttagggctagtcccaccagccaactgcaacttagtggctctgtttgtatgtgtgtttgggagggttgggggtatggtgtccaggtaccttgccaggaacatcggaagtagggcaatggccctagaaggaggggctgtcagggggtaggccaggtgttagagcaatgttccacatcctgttggacacagagatattatgattggaactgagagttccctatgtacagtcatcaagactgagggtcatcttgcagtctgctttaatacccacctgactcagcaaggccaagggagtaggctctgctctgaggaagagggtctgtgggttccaaagtcctggccacctgttatgtgccacattgcccctcttcatgccccatacacaccttagatgatgcatatggcctatgccttctccagaatctgctaactcctataacacatgcatatgcttcattccacattgtacttgctttgctctcccataatattatggcaaagggacagagagctgcctggaataagagtttgagcttgtgcactaaaggggattctgcaacccttattcatagtgagatgagggtccctccagaggaggcctgcccttagtttgttgttttttgctgtccaatctgacaggctctcctaccttttcttagcacttctgacatgcttctgtcttagaagaaaatgtgtttcttagtagaaagcccacccttggttcaggcccaaggtttccacccctcaacagccaacactcatttatcaaaagtaaacacagcattagtacataccaggaatcataaaaggcacctagggtaaaatactgaataaaaaggcatgattcctgactcacagaactttcagtctacttggggagacagaaaagggaagagataattacaatgtatgtgataaattctggtggaggaattccagaaggctctgggacattttcatttgacaagtatatattgagtgcctgtcataggtcaggtaaagttctaggcacagggaatgtaacagagaacatactaaagacaagaatgtctttacatgggggaaagagggaactcacacgcagtcctaggagtcagggaagatttcccaggaaaagagacatctaaactgagattttttgtttgtttgtttttgagatggagtctcactctgttacccaggctagagtgtagtggcatgatctcagctcactgcaacttctgcctcctgggttcaagcgattcccctgcctcagcctcctgagtagctgggattacaggtgtgcgccaccatgtccggctaatttttgtatttttagcagagatggggttttaccatgttggtcaggctggtctcaaacttctgacctcgtgatccacctgcttcggcctcccaaagtgctgagattacaggtgtaagccactgagcccggcctaaactgagtttttaatatgaactagtcaaactgggtgagggtgttgttgaagggaggatgtggtagacagaggggggagtacagaaggtatgggcagaagctgtaagtggtcccttagggctgaaggacttcagactcaatgataagtctgaagtggaaagatgtaagaagtttgatcttgaatgtagacaatggaaggacagattcgagggggccagtattgtagacagggacatgcattaggaggctgttataaaaatccaggtgagaaataatccaggccaagaccagagtggtggctgtagaatacttagaatgtggaactgagaagacttggtaattgactatttgggagtggcgacagggaatgggagctcgtgattggaaggggttaaggtgagtagagaggctatgcacaagctgagcaggtcgtgatactgatggacctaccctgccttgttctgtcctctagaggatgagaagaggaaacaaactgcaccagggaagctcaggccgattcaatgcatgcaagggtgatttaacctgggttctgtttgaaatactt

SEQ ID NO: 241036 - DNA, 381 bp, Homo sapiens
tcttcgcgctccgcgtcaaatctctccagctctgttctcgcatcccgggtttagatcccgcagagttaagtatcccgcgtgtgaagggatgaactgagactcccagagggcataactgatggaggcacgaagatgtctgctcttcagctttgccaagtatggtgtaaggggctttggggaatccagacagacctggacttcacacgcccgtcatttatttcactactagtgaaatgctggcgtagttacgcctaagttctctgagactgtccctcatctctaaaaccacccctcctctggtgaactaaggatggcgataacactttatgtaaagtgcctggccagatactcaataaatgttaattttccaagcttaaaaat

SEQ ID NO: 241037 - DNA, 393 bp, Homo sapiens
cccccccccccgatactcaaaataatcttgaaaaagaacaaagttggaagtcttcacttactgatctcaaaatttaacacaaaactacagtaaccaacagtatggtactggcataaaaattagcatataaaccaatggaatagaataaagagcctagaagtaaatctttacacatatagtcagatttttgacaggggtgccaagaccattcagtggagaaaatagggtcctttcaacaaatggtgttgggaaaactggatatctacatacaaaaaaaagttggacccttacaccatatacaaatattaacttaaaatccatcaagaactagctccatccactaaggttggaagaaaaaagagagctagaatcattaaactctttaaaaaagaa

SEQ ID NO: 241038 - DNA, 310 bp, Homo sapiens
ggcaatccttgagcatcttttcatatttaaaagtgaggctttatggccaggcatggtggtttactcctataatcctagcactttgggaggacaaggcagggggatcccttgatcctaggagtttgtgaccagccccatctctacaactctaccaaaaaacaaaaacaaaaaaaacaaaaaggtagccaggggatggagtgcacttgcagtcccaactacttgggaggccaaggcaggaggatcacttgagcccagaattttcaataccagcctggccaacacagtaagaccctgtctctacaaaaaatta

SEQ ID NO: 241039 - DNA, 943 bp, Homo sapiens
ctataccacggctaactgaaaccacagaaagttaaaaccatagataagggggaactattgtgtgcttcagtcactcctgagggcttcactgtggaaacacagtgtaagataataccatttttcaacaactacagaattaatggatttaagcattgatcatcaaaggatgcaaatactataaaaagagacaaatatgtgcctcataatggaagaatacaacctcacctatgaattatttttgctaccccctaaaaaaaattaaatctgaatctgatcaagcttccagaaaagccaatttataggaaatacaaaagacagaggaacatgtttgtagttgacaaaattcagaccctgaataactctgcagacacaatgccccatttcttcaacaagtaagttgcaagaaatagtgaggaagtggaggggaatctacagaataaaacattttttaaagctaaattaattgcaatgtgtggatcctatttggatcccaatttagacaaaaagactataaagaaaatcctaggacatcctaaacaattgtaaattggaacattgacacactatttgatgaaataaaagagttgttattcattttaaaactaaaatagtaataagtagtcataacaaggaccctgattgttcaaaacaaatattaaactgtggtcagtaggtatgtttaggaaggtagaaatatgtgttactcctctcagagaggtttccatacccggtaattaaaatgtaataactgttgaaaggaatctgtatgatatagtacaaaaagcacttggaattagaccaaattgttaaacagtgcagtgggaagttgcttgacatccacttaaaatcctattaagtaaaatgtctagcataggcagggaggaagcgtgatgcatgtccattaaatgtctgtgttcatcctctttcctctctgtaaaaaaaa

SEQ ID NO: 241040 - DNA, 541 bp, Homo sapiens
tgagccctagttgtttcatttattaaattcttgagaaggttcagtgccattaatacctaaacccaggcacatgttctctcgtcacctcacccttaatagcagaactgtttgttaacaacatgattaggcatcggagatggatgttggtgaatcatattttcctgaccgttgccacactccatccagtgtttgtcagggcccagactggaaggacctccatttagcccgttcagaggataccgaaaatgttcctgcgctccagagcccttccaggcgaacgtcatgtggcctcctgggacaatcactagattagcagaggtcctaggtttgccatcttactcccatcactcgctagctgtgtaacggggcaaatcatttaatttctgactctcagtgttttcatctgtaaaatagggataatgcataccttttctactatacgaagttgttaccaaatgagattttggcggggaaggtgatttgtgaattataataatacatcaagagtattttccaaataaatgaccaaatccccagggta

SEQ ID NO: 241041 - DNA, 2299 bp, Homo sapiens
  misc_feature (227)..(227): n is a, c, g, or t
  misc_feature (292)..(292): n is a, c, g, or t
  misc_feature (429)..(429): n is a, c, g, or t
  misc_feature (670)..(670): n is a, c, g, or t
  misc_feature (1315)..(1315): n is a, c, g, or t
  misc_feature (1420)..(1420): n is a, c, g, or t
aatttattacctcacagtttctgcacatcagaagcctggacataacataattgagttccctgctcagagttttacaaggctgaagtcaaaatgttggccagggcttcagtctgatttgagactgtggtcctcttgcaagttcactggttgttggcagaatacggttccttgcagttgccggactgaactcccatttgcttcccagccatcagttagggatcactctnaattactagagtctgcccctcttcctagggagtgagtagcatagctatttctttctttcaaaacnagctagagaaaactctacatttaaagggttccctgaatatgcctggcccatctaggaaaatcttgattaccccaaaataaactgattggagtccttaattacatatgcagaatccttttgtcattgccatgtaacanaatataaccgtggaagtgatatccagtcattttcacaggttctgcccttattcagaatagggaattaagtaagatgtgttcatcaggaggcagaaatattataattctacctaccacacatagaaatgcttttaaaagaccaaaaagagccttcaaacttaacacccagataatatcacaagagagaatttatgtgacttagttccaaagtgattcaccaaatagacatgaatacataatngaaatcaatagatgaagattaagttgcagactgaacaagttttttgggctttgggggtttttggtggtttgggtttgtttatggtttttcgttttttatatgcaagctttttctcatggatttcacactctggaaatttggaaagaaaacataatcactccaatgtcatacctttttgcatataaaacagttgtttttcaatgttaggaaaatccttgcctgaatgttgctttggaaaaaaaaaatctgtcttttaaaatgacccttgcaatttaacaaaatgcagatgtaattagagaaggctaacttgccctttggaacctaaaacccctaggctccttcagataaaaataagtacaaaagagaattctgatgatgatcgcatgaaggtgttagaaattcctctgtgcaaaagactaagtataaaactggaaaaattatcacaagcatttcagggcgcaggaaatcatcagtggcatacaatgaattgagaaatatttatttttgaaaaactgcatgaacttcagtaaaagcaactatactgtggcctccttgcctgaggctgctctgtctacactgccctcagcttggttagtgagaacagtagttttatcactgtggaactggctgcaaaaaccagctggnttactgctattgggacagatgatttcaccgaggtgtaaagatccatggctctcctggccaaaagtgatggaggccgttgggaattaacaagcagaacctacagcnttgctagctcaaggtttgatccctgatcacagcgactggcacaggaatcatggcagctaatcagcaccctgatcagtgacaccatgttgaagagactggccaacaccatggcaccacagggggcatgattcacaggaaggcctgaatccctggcaggattttccacaaagttccagtgcttactggagcctcctggcctaggaacaactgaaaggtcaggattaagttctggtgctcacttaagtcttccccagactaggaaacaacagcaaaacagtaatatagttccagggcagcatttaatatccagtacccactagaagttttcaccagacttggaaacaacaacacggcaacagtttacttctggagcagcatttaagtttttgcatttgttgtaagtcttccccaaaccaaaaaacaatgacgaagcaattagttagttctagtgcagtgttttagtttcagagctcattataagtcctccccagagcaggaagcaacaacagacctgtgtttaagtaccaatactaagaagtgaaggtcaaccccaccaaagaatacctgcaaaaatggaaagatatgactgtatcctcaaatgtgctggcgtcaatgcaaagatgcacggattgtgaaaactcagggaaataggacaccgataaaagtaaccaagaaaactccagcaatgaaccgagaagcattgaagacctagaaaaagtctgacagataggtcagaataatgctcttaaagaagttcagacaatcataaaaagaaacaggtagaaactaaataaaatttggaaaacaattcaggaacaaagtgagacatttgacaaagaaatagaaacaagtttaaaaaactaaatagaaattctaatt

SEQ ID NO: 241042 - DNA, 419 bp, Homo sapiens
ttgggcaaaacacaaaacctccctgagcctctcagtttctcacccactagtaccacctcactaagcatgttaggaggagtcaatgtgatagcctatgcaaagtgcctggaatagtgcctggcacacaagaggtattcaatacctgccagctgttgttgtttttctgcaaatgaagtgtaaaccccttgaggacagagatgagtgtccatagctgttatctgccacagagccttccttccacataacatatgctcgagggtttgctgacctactttgaagaaaggggcaacacgaggggaatatagttttattgtgtagggtaatttcctccaggaaagaaaaaaacagtgaatctgtgaaacttggtacagattgttaaaaaaaaactcactttgtaaaataaaagtattttcaactgc

SEQ ID NO: 241043 - DNA, 4679 bp, Homo sapiens
  misc_feature (2415)..(2415): n is a, c, g, or t
gactcagtgcatcaaaggctggagaaagaatcaccctagaactgagtgccacaggcttcggaagctgcacaagactgcaacacggtgacagcttctatttctaacagcaaacctaaaaagctcaggaaccaaaataaaacggatagaaatgaaaccactcagagtatgacgacagtactcaaagcaactcacgagcatttccccacgctgtcttccaaaatgtgaaaaatgtgatttttttttaatggccacattggagaactgctatgagcagacctcatttatataacccttcccagcacctcatgtatcatcattattaaaaaacactatggggatcatgctttcacataactttgtcttatttgttatctacatagcctaagcaaatagtaaatgatggagaatgaaaataattgtcaatgtttagggggaaaaaaatacctgcatttcaaattttttaaaaaaaccataaaatctatcttttaaaaaaggaaggagtaagctggaatccacaattgttagaaacccaaaagtgatacagaggggaggcaaaaaaaaaaaaaaatactatattctccacactgaaacaatgtatctttctcaacagcccagtttcatctgtagctgtattttccccactgaaatgccaccattaatcataacaacagatgagtaaaaatcaattaatattccttcagcatctcttaggtgtcttcaatcctgtgcgctgtcatccctttaaagaggaaggaaaagatccacagccaggaaacagactcagaaactcaaacccaggtctctggaccccacagggaagtgaggcacagccaagagcaatctgtgtccattactggcctcaaatgaccacatggaaacactgtgtgcagagccagccccccaagcccgtggcggtcctccttggagatgatggggtctggggagaggtcagagtcaggctcacgtgaacttcagaaagccactgcccaggatatgggtggaccgcaagtctaccatgggctgtcccagctccaaagacgtcagaaccccacagcgattgttattcccaaagccctttacgcttggctccacagcacacggcagagaaaatcgacagaaggaaggatgttcacaggtgtccacccctacctatgccccagtgacctggaaataaaatccatcaagagcaccggggtcagccagctggggtacgctggagagtatgggtggcagagggaaccccgctgtggattgatcatttgacactgtgttcagcataccttttaaaaaaatgttggtaccatgtaaaaatataacctaaataacaagtacatttttaatgctgagatggagaatttagcacctataatccttccagagatgcacaccacgcaaccacgtgagtcccctctggctctgaattccgagagcagctaccaacacaggcctccgctgcctgcactcagcacacctatcggaaagcgccagtgctggcatgggctttccctccctggcggctgctcctcctgcacccccatgcccaggcactccggccagaaacaagggaggagtctggggactgatcctccccctctcacctcccacatctacccaggtaccacaccctgccatctgtctcctgctgccctctgtcactgcaggagcccctggagagcacatcacccctcactaggctgcagccacagcccctctcagaaaaccctgctgtctgctttccagtgcagccctgtctaatcaccctccatgtatcctccccatggctcttcccccatagcctcaggttggagcacccagctttcgcctgcagaagcccctccatgcccccgacacagcaccccatgaacaactcacctggcaccgctactctctccagcctggtctctcactagccccctcaagcctggggctgtagcctttccaagccattggcagccaaaggacccccttccccagctgctgtgtgtggccctggccatgctccttgtctgtaaggccattctaacacctcgcctcctgccagcccctacgcccagtttattccatgtcaggaggtatggcctccatcccctgatggcccactcctccttacatgcccagccttgcgtcctcaccactcccccacagctcagacaggcctgccctgcccctgggcttgggcatccccacggtttccctgccagtgggcatccccacagttccttcgcctccagaggcccagcacccagttctgcctcggccccaggcacatggaccttcccttgggtcttagtgtctctttctcagacttgccttttcttggtggtttgatggtcacccacccaacctccttccctgaaagtctggtgcaggaaggggtaaaaacacatatacaaaggtcaccagcaagccagccancaccagctctggagaaaacacggacagaaagacgtatgcccaccattcactcattcgcaagccgggagaacttacttacttccttgcctgcttgagaaacagccgccgcaccagagactgggtttcatagtgtctgaattctcaaggaatgtggatggaggacagtgaatctctaactggctgctgcacttctcacacttacagcttgctcattcgcactttaaagtcaaacctcgagtcccctcatgccagcagtcaccttctccccgatcttttacagtaactggggaaaggcagcccagagaacaggccagggcagaggtcaggctgcaaaacatgcttccctaaggacgtccaggctggagggggcccggcagcaggtgggtctttctttcagggtcttcctccaccaaattcaggactattccagaaagaggcagtgagtccctggatggggaaaccgctcctcctgagccttccccacagattggatcggagtggaaggtgcccccaggtgacagcacctagcaaggctgatgcaggccttctgcctggcccacaggagagccccagccccactccccagaccacagacgaccaaggctcctgtgtacgggggaagtaatcatagtgccgtgcttggcacttggtcattttagcaactaggtgttttagaaggaagcacaaggacctaggaactgggttgagctctgtcaggccttgcctctcagttaggatctgttgggtagatgggctcattgccactaaccagactcgtcttccagggagccttcctgatttaccaggctgcgtgagggccctcctctgtgcctgtctggtgtccctgcctaccttggccactgtctgcagacatcacagagagttgaaggggcctggcttgggcctgtgtgagcccccagcacctggggcctatccatagcaagtgtcggggaaactgctgcatgttactgcgtcccatctgcacggcctggctatgaggggccctcagctcagcactcagtgagaccaactcaacactgaaatggtggagtcagggtggcccgtgcgtccagcattcccattaccatactacagagcacggggctgaggaaacaggcacttgccaccatcaccatcatgacaagtagcctctcaagacaggaggtagagagcatctggtcccacgacccttactacactcttcccttgtcctgcagcccaactccctgctctaaacacaaagtaggacatcctcttcttctgagctacctgggtcctggctcccctgcaacttcctttcctgcctgagcagccctgagcagacagtgctgtgtctttcatgatcatcatcacgtggcccaacagaccaggtctgcagacaagtccactgccaagcaagtctcggagcacagttctgggccccagagtcagcccagtccagcccagccccatcagggcctctggacagcctgagagcaaggcctcgtgctgtccctctccgaggaaggatttgcctcaggcctggttctgagaagtaaacagggtaatgttctgaagcagtggacttcaaaccaaacccccacaaaataaatgtttaaaactacatatctatttgcacatttttaagttgatatgaaaaatttctcatcataagtctaaatacttgtagaggatgtaatttccaacatactgtaaatattaacatttaaaaataaaactgttaatgtttctcttttaaatggatccaatggtatctaaataccacggcgattagagattcgccatcatccatttttaaattacataatcaagctcttctttaaccattggaaatttaacagtgttccttttttcctccacaaactctgatctccctcagagatgtttatactatcacagtgtattttatgcttgaaagccttatactgattatcctattatatactatagggccaaaaaatacaaaaatcaatgttttaattttttttaatttcctgtgatttcctgtgatcataaagctctgtcagaagttttctcctggactgaattattataacaattactataagtatacaattgatcaataagacagaaatatattgcaaaattgtataagaaataacctttaaaaataaacttaattaggccaggcgcagtggttcacgcctgtaatcccagcactttgggaggccgaggtgggcagatcacctgaggtcagcagttcaagaccagcctggtcaactggtgaaaccccatctctactt

SEQ ID NO: 241044 - DNA, 2799 bp, Homo sapiens
  misc_feature (535)..(535): n is a, c, g, or t
tctgacgctctcacccaccccacccaagatcagacacagccaggaaaggacccaagagaaaatccttcaaggtggcctgaggtcccatccctccctcagacccatgtggtcccaggccaggctgcctgggacacagtaaataccactgtgtgcaaaaatcgaagtacaaaaccacaagactaaacaaaacaaacccagagagcggccgctctccacccactcctccttacatgcccagccttgcgtcctcaccactcccccacagctcagacaggcctgccctgcccctgggcttgggcatccccacggtttccctgccagtgggcatccccacagttccttcgcctccagaggcccagcacccagttctgcctcggccccaggcacatggaccttcccttgggtcttagtgtctctttctcagacttgccttttcttggtggtttgatggtcacccacccaacctccttccctgaaagtctggtgcaggaaggggtaaaaacacatatacaaaggtcaccagcaagccagccancaccagctctggagaaaacacggacagaaagacgtatgcccaccattcactcattcgcaagccgggagaacttacttacttccttgcctgcttgagaaacagccgccgcaccagagactgggtttcatagtgtctgaattctcaaggaatgtggatggaggacagtgaatctctaactggctgctgcacttctcacacttacagcttgctcattcgcactttaaagtcaaacctcgagtcccctcatgccagcagtcaccttctccccgatcttttacagtaactggggaaaggcagcccagagaacaggccagggcagaggtcaggctgcaaaacatgcttccctaaggacgtccaggctggagggggcccggcagcaggtgggtctttctttcagggtcttcctccaccaaattcaggactattccagaaagaggcagtgagtccctggatggggaaaccgctcctcctgagccttccccacagattggatcggagtggaaggtgcccccaggtgacagcacctagcaaggctgatgcaggccttctgcctggcccacaggagagccccagccccactccccagaccacagacgaccaaggctcctgtgtacgggggaagtaatcatagtgccgtgcttggcacttggtcattttagcaactaggtgttttagaaggaagcacaaggacctaggaactgggttgagctctgtcaggccttgcctctcagttaggatctgttgggtagatgggctcattgccactaaccagactcgtcttccagggagccttcctgatttaccaggctgcgtgagggccctcctctgtgcctgtctggtgtccctgcctaccttggccactgtctgcagacatcacagagagttgaaggggcctggcttgggcctgtgtgagcccccagcacctggggcctatccatagcaagtgtcggggaaactgctgcatgttactgcgtcccatctgcacggcctggctatgaggggccctcagctcagcactcagtgagaccaactcaacactgaaatggtggagtcagggtggcccgtgcgtccagcattcccattaccatactacagagcacggggctgaggaaacaggcacttgccaccatcaccatcatgacaagtagcctctcaagacaggaggtagagagcatctggtcccacgacccttactacactcttcccttgtcctgcagcccaactccctgctctaaacacaaagtaggacatcctcttcttctgagctacctgggtcctggctcccctgcaacttcctttcctgcctgagcagccctgagcagacagtgctgtgtctttcatgatcatcatcacgtggcccaacagaccaggtctgcagacaagtccactgccaagcaagtctcggagcacagttctgggccccagagtcagcccagtccagcccagccccatcagggcctctggacagcctgagagcaaggcctcgtgctgtccctctccgaggaaggatttgcctcaggcctggttctgagaagtaaacagggtaatgttctgaagcagtggacttcaaaccaaacccccacaaaataaatgtttaaaactacatatctatttgcacatttttaagttgatatgaaaaatttctcatcataagtctaaatacttgtagaggatgtaatttccaacatactgtaaatattaacatttaaaaataaaactgttaatgtttctcttttaaatggatccaatggtatctaaataccacggcgattagagattcgccatcatccatttttaaattacataatcaagctcttctttaaccattggaaatttaacagtgttccttttttcctccacaaactctgatctccctcagagatgtttatactatcacagtgtattttatgcttgaaagccttatactgattatcctattatatactatagggccaaaaaatacaaaaatcaatgttttaattttttttaatttcctgtgatttcctgtgatcataaagctctgtcagaagttttctcctggactgaattattataacaattactataagtatacaattgatcaataagacagaaatatattgcaaaattgtataagaaataacctttaaaaataaacttaattaggccaggcgcagtggttcacgcctgtaatcccagcactttgggaggccgaggtgggcagatcacctgaggtcagcagttcaagaccagcctggtcaactggtgaaaccccatctctactt

SEQ ID NO: 241045 - DNA, 335 bp, Homo sapiens
gtaatctaacaagtgagtaattcgagatagtgatgagttatgaagaacatataatggagcattgggatagaaagtacactgagaatggggctgctttacataagttgttcttaagagatgatgcttgagctgagccatgaataatgacagttgcaagaaaatttagtggaagaccatgtcagacaaaggaaaagcaagtttaaaggccgaacaatggaaatgagcttggtttatatggggacatggcatcctttcaacccattagatatttgctgattcacaatgaccagtcaaaaaactgaaaagataattggagtttttagccttctgaaata

SEQ ID NO: 241046 - DNA, 325 bp, Homo sapiens
gtatgtgtctgaaagtgaattaatatctaggaagggatgaaggcaggtactgctctctgcagagacttcccgcctgaaatgccatagccccagacattggagctgtccaaaaccttggcttgtggagaatttccagaagggggcactgtggacacggttcagcatctgcctcccaaggctggggctccatgtcaaaagaaggtgagacgaccaggcacagcggtcactcctgtaatcctagcactttgggaagccacaaaaggatcacttgaggccaggggttcaagaccacctgggcaacatagcaagagcttctctctacaaa

SEQ ID NO: 241047 - DNA, 467 bp, Homo sapiens
tgcaacaaatatttattgatggccaactgagagtgggcagtatcctcagttccaaaactacaaaggctgaatgcagttgcacataggcaatgggtactgaaaccatcaattacacaaagttataaagtacgtatgggaactcacaaacaggatatttaggagaaggaggtggtgggaagctttcaagacagagaattgaatgttcataagtgtgacatattcagaaattaatttttaaagtaaatttcctcaaatctaatctaaattttaattctgaattcttcaagctgacccttgccaccattgataatagtgtgataaccataaatcccatatttctgatcattcccagttttgagtattctgtctctttgtcaagtcacatgtcccaattttagggctagaaaacatggtcatcacgttgattagaaatgcaatttacagaagatttccctttccgtctgctt

SEQ ID NO: 241048 - DNA, 733 bp, Homo sapiens
agtgcaaaatgttaccaaatctttcctcctgtgttttcaaaaaaccacatttgatgctttctattttatatgcttttacagaaattctctttaaaaatcaaatatatgcttatcattattttaataaaaacctctgctgagtaaatgaattttataggattgggggaaaaagtttgcaatgaatggtggatgatactgctattcaatagggagctcttaaaaatagagcaaatgcataagacattttttacagttttcaatttgtaagaaaatgatttcattagaggggaaaaaagagagagagaaaaccatcagtcaggatgtgggagaatgcaggctcctgatgagaccagcggagaagacaaactaagtgtatggatgcagattaggcctcagaagatgagggtgtaaaagggatttaatggtggggtggattatagaaatccatgtaacaatgttaaataattatagttccagccgagatcaaagcagtgctgattgaacgccctcaagctgttaacatgaagtatcttgaagggaaaaaaacctgcctcaaagattggtcagtctgggcaaacaatgtctgtgatctgtagaagttccaactgtattgaaagcaccaattctagggaatgaaaaatggaggaggcagcctgttagggaatttcttcttctggagctctcgatcttaaaacggactttttagctatttgtagtttgtttgaaaatgcta

SEQ ID NO: 241049 - DNA, 565 bp, Homo sapiens
tgcagccataccagccgaccggcgggggacacacggcgcctcggcccgactcggaggcccttcccgtcggcgccggggcagcgcgcgcccggtgactcacccccgccgccctctccccacccctgctccccgccccgccggcccgcgcggcctcccagcccccaccccaggccacctgccccgccacccgtgcagtctcccctctcgccccgccccctcatctcaggccgctcctcccgggatttttccaccctggggtaggggtgcggtgggccaggggtcaggagatggcgggcggggagcgccgccacgtgcccgggtgcggccccgcccgagcccgccagtgactcagccgcgcggctgtcgaggaacacggactcgaggggcgtcggggactgtgggattcggcgtggacgccagggatgcgcgccgcgctcgggaggagagagaaaaccaaccccctttccgcccgggccgcgctcggtgaccccttgcccctagcccaggctccggaagccgcccagccctcggcggcgggtcggaggaggcggtttcaccgcggccg

SEQ ID NO: 241050 - DNA, 483 bp, Homo sapiens
cagcatacgttccagaagagcatctcaagttaccaaattttttgtaatccttttactagaaaaatcttttttgaagagtttttcttgtgcttgcttcggcagcatatatactgaaattagaaaaagaaaacttttcttttttattatatattttagtgtaagttaagttaaacttctaaaagttgaattatttaatgtaggacttcataaatagtatttgacaatgataaatgtgtatttttgagaatcattaaaatgtatacaatgatattcctttgcagaagtcttaatatgcataatttttaatctaattgtcttctaaatatagttttggtgtatgctggtattttagaagccaccaatttctggactatctgattattaacaaagatgtattttaatgcacaaactcaaatgtttaaaatatatatttactttgtactcaaataaaatcccctattgcaaatcctatacatatttcaa

SEQ ID NO: 241051 - DNA, 614 bp, Homo sapiens
cacagtacattacaatcctggtttttaaaaaagtgaattaaactgacaatttatagttgtgtatttatatagaatgtctttatatgtgttacacaaatacaaaacttgttatttaaatagtaactgctaacatgcacataagttactatgtctgaaaatggtgttctgtaaacaagagatgaatagtctttgtcaagaataattgtgtgcatttttgttatctgatttcctatctgcattttcagtttttaacattataaaaaagaattagtaatatgcaacaatttcttagttctctaagcattgctattattctcctctggaaagtatattcatattagaatttttgaaattgttcttcagatgacaggctatgatattttttccctttaggattaataatcacataattcaggaatttaattcactattaagtgaatattaagttcccttacgtttcatcaatatttgtcataaggtaaattaagtatcagcccccttgtctcttgatctttcacatcctcttctgtacaccacaatctacaatacctgtgttgcttttaaaatatatctatgaaacttagatacttttcccttcaaggggtgcagcttaa

SEQ ID NO: 241052 - DNA, 414 bp, Homo sapiens
ttttaatgttaatgctggtcaattgtgcctaaatttcaaagggaggagggtataaatgagacatgtccaacctcctcttcccatcatagccttaactagatattcgggtttactttgaaatgctcctctccaagaggaggggtccagttcagttgcttgaggggcttagaattacatttttggcttatagtctccaataaatgctgttgagaaaatgggatatccacgtacagaagaatgaaattagacccttatttcttaccatatacaaaaattaactcaaaatcaattaaatacttaaatatgagaactgacactatgaaactgctgaagaaaacataggtgaggcgcttcaggacattggtacgggcaaggctttttgaataagatctcaaaagcacaggcaacaaaagc

SEQ ID NO: 241053 - DNA, 671 bp, Homo sapiens
cgggtaggactggacggtcggatttgtaggcaattctgacaccgagctcccgggctcggttggtagaagatcgctttgggaatcctcctactctacgaggaccaaaaaccaaggacgccaagccatacaaattcagcacagctgactcagagaggtggaaaggaaatcaggacaaaaagccaaaatgtcttctggaggaggatattgccagccagaataactgtgagagatgcaagcatagtcctggaaacaaacagcacaattcctttaaagccctaaaggatgaagatcttcctgtagagaagtatttaatggaaaggcagcctgtaggtgagccagctgccgaccaggtagctatggatgtgatgcacagccccatcctccaactggaaaggaaacacaaagtctcaagtgacagcaaccagacagagactactgcagagaagttgccagaggactctttcctaaaaaacaagcaaaaacaggtttatatagggctacatcctaagaaacaccatttgatgcaccttagagaacagtaggagcagcaggtgttggcagcagagaacaaacctagtctgcaaggcaggaaggaagtgacccagacagtccagcctgaggtcactgcctgggattgtgatatcatgaaagagaaactcagcaagaaaagg

SEQ ID NO: 241054 - DNA, 883 bp, Homo sapiens
cgggtaggactggacggtcggatttgtaggcaattctgacaccgagctcccgggctcggttggtagaagatcgctttgggaatcctcctactctacgaggaccaaaaaccaaggacgccaagccatacaaattcagcacagctgactcagagaggtggaaaggaaatcaggacaaaaagccaaaatgtcttctggaggaggatattgccagccagaataactgtgagagatgcaagcatagtcctggaaacaaacagcacaattcctttaaagccctaaaggatgaagatcttcctgtagagaagtatttaatggaaaggcagcctgtaggtgagccagctgccgaccaggtagctatggatgtgatgcacagccccatcctccaactggaaaggaaacacaaagtctcaagtgacagcaaccagacagagactactgcagagaagttgccagaggactctttcctaaaaaacaagcaaaaacaggtttatataggccctccaccgaagaataaggttttatccaacaatgcaagcagccaaaagccgactcactcaagtgcagaaatacaccaataacagtgagaagccatctgggaagagacaatgcaaaaccaagcacttgatatctcaggacctgaggcaggggttcctgctaacagggaagtgctacgttgagaatgctgatggcaagatacctcttggcacttgttttctccttgggcttatatagaggctatttcccctcaccccaacattccccacctacctgcttttctcaaggatgtaaagcctttcttttactggactcctaacttccctgtcttagaggggaagtcttccttgatggtgataaaattggaaactattaaaatttaagttca

SEQ ID NO: 241055 - DNA, 464 bp, Homo sapiens
agcctcaaaggacgcagcgccttctccattttttttttcccatttgctgagtgagaagtgaactgtctgggcctgggctgcatcttgctaggtgttcagaaagtgcaggcaagttcgacctgaatccgaggctgggtagcagcgtgatagacagccgaggccacagccagcccagctcgcctgcttagccatccataccgtctacctcccttccaggcttgcaccagccagaggcagtgttgagtacgcagcatgggcacatcagcccaggaggatatgagaagccaatggcggagaggaggggagcactgctgatgggcagagcagggtgtgcgtgggccagaggactcttgtggtaatggtacgatccacggagagactcaccagctctccggtgggaatacatggcagtttccacggtctttttattttcattttttattaatacataataattgtacatc

SEQ ID NO: 241056 - DNA, 452 bp, Homo sapiens
gtttttgtttgcctatcataagaataagtgttaaaaataatttagaaaataaggtatttataatagtatcagcatgttcacccaaccactgttaatatttttgtgtattttttccctttacttggtggctactattttttaatgtttttatcatatttgtaattctccggtatgtaaaattatgtattctgctttttttccacttctgtaatatttagggtttttttttacttcagcctcctcctacctagatattttttcattattacacactgtcatttaactattctcctatagtggacctaaaagtttgagacacttgtggtggagaaggaatttttacttgttttttgatcttgagtaatgcagcatgcaaatagtgtgatgcgcattgctttctttcttgggattgtcactttaagagagactcctagaattacatttaggagatc

SEQ ID NO: 241057 - DNA, 394 bp, Homo sapiens
gtcaatgtctccggcagtcaaagcagttatcaagaaagaaccaagttgggcgcaccatctggagaaatcctctggagaaggtttatgttactacatatttttctgtttgcttgtttgcttaggtatttgttattttttttgttctttaaatgtagcagttctgaatttctcaactttaaaggactatgttacttagaaggacttcctttaaaactgagttaggtttcttaatattgtatacattacttaggtcatgtgattagctgctttagacatatgatttgagattctctaagttcccttcattcaaactacttcacagaggcagaagccaggaaggcaagaaggcaggaagacaggaaggtaggaaggcaaacaggcaaaagggaaagga

SEQ ID NO: 241058 - DNA, 284 bp, Homo sapiens
gtagagacaggatttcatcatgttgtccagtctggtcttgaacttctgggctcaagctatctgccctccttggcctcctgaagtgctgggattacaggcatgagccactacgcctggccccaatttttagttttacttcctaaaaatccttcttgcccatactcacttgattgtcttccactttaagttcagaatcatacttctcatctagagcagtgctatggtctgttgacttgtctccctgcctttgacatcccgcattcacctcccttccactcttacac

SEQ ID NO: 241059 - DNA, 400 bp, Homo sapiens
acaggccacacacctgctgggccagggacagggctctgtgtgcccatggccacagcagcagcccttctggacagacccaagccaagctcctgggtagagcatcatcatcactggggtcatcctgggaaagggaaagttttccagaatcacaaatgcttctcacacaaacctcagcagagccccgagcagttggacacactttgcattgtctataaggacagcaaagggcccatggccgctgaccaggatggaggagtcagtgcctcatctcaacgcaccatcctcactctacaggccatgaggtccaggagaggcaggcaatgaaatcctctcttacctttttgtaccacggtatgatgaaaaacaagagaaaataaaggctactagaagagattaagag

SEQ ID NO: 241060 - DNA, 211 bp, Homo sapiens
gtccatataccccgatatattttcaattttttttaaagtaatacattttatgtagtcagaaaagaactttaaaaatcagctaatgggccggacacgatggctcaagcctgtaatcccagcactttgggaggccgcgacgggtggatcatgaggtcaggagatcgagaccatcctggccaacatggggaaaccccgtctctactaaagatac

SEQ ID NO: 241061 - DNA, 423 bp, Homo sapiens
gtatgtggccccgtctggctagtcctgtctagcgcgcccatttcgagcccaagtttccagctcgggtttccgggctcagaattttccaggagtgggttcttgggcagtggctgtgggagcaggaatggcgcagctagagggttactgtttctcggccgccttgagctgtacctttttagtgtcctgcctcctcttctccgccttcagccgggcgctgcgagagccctacatggacgagatcttccacctgcctcaggcgcagcgctactgtgagggccatttctccctttcccagtgggatcccatgattactacattacctggcttgtacctggtgtcagttggagtggtcaaacctgccatttggatctttgcatggtctgaacatgttgtctgctccattgggatgctcagatttgttaa

SEQ ID NO: 241062 - DNA, 501 bp, Homo sapiens
gacaatctcactctgttgcccaggctggagtgcagtggcgaggtaactcactgcaacctgcacctccagtttcaagtgattcttgtgcctcatccctgagtagctgaggcaggagaatcacttgaacccgggaggcagagattgcagtgagccgagatgcaccactgcactccagcttgggcaacaaaagtgaaactctctcaaaaaaaaaaaaaaagaacaaacaaaagaactagtccatatctaggtaacagtgtttgcatattggaaccaatcagtaccaatcaatcatttaaacgcttccttaacttaggcaggtcccttctgtaattaaaaaataataaaacaaaacagacataaacctttggacggctgttatttcatcctccaaagaaataaatttgtcatttggtcaatctagtaaatcagttgatatatgtgagggatgctgatcattataagttctatttaactcttctaaattgaatataaatcatagag

SEQ ID NO: 241063 - DNA, 546 bp, Homo sapiens
tgttttggtaatctggtttgaatctatcaaagatttaaaaacctttgtattcctaccatgctagattcaaaacaacacatgacactttttctctcgtgtgggtttccaggccatgatagcgacaggtctgcgggacgctggcgcccggcccgagcgtcgttgtcactccaagtccacagcctctagagccaaggcaagggacctcaccaggaagggagattcgccccctgtgcccctgggacgtccgagcggaacccatcggcccggctcccggagactcgcggggaggaagggctgtcaggccaggcgcgcatcacgtgaagctgccagttccgggatcaaagacgtaccccgcacgtgggctgggcgccagcctgggacccccgggggccgcgcgcccaccgcccaggagcccaccccagcctccactgggaaaattagcccggagccaacgtgtcgcggatcccacagccgcctggagccctcccaaagccccgcgcccaggcctccccgggcacaggcggcgcccccttcggccgcggccgc

SEQ ID NO: 241064 - DNA, 1011 bp, Homo sapiens
taatcttagaaaaatgttggaagggtaatttttaagtgtagtggtttgaagaacaaaccagaagcgcacaaacctttgtgtattttagaatatatttgtcttcattctgcggagctcttgtgttgtaaaggtgcagaactacgtaaaaatagtgttgggcagacttacatagtacatctgaaatcagatactggtttattcgaccatatttctaagggcatttttccagtaaaattgttttattttttgagtagccttcctatagtggtacatgttacatcagttgcgcatatcttgattttacagaatctgtcttaagtaccaattttggtttttcaaatcaatgtttctgaaatttttgaacactgaaagtggttttaaatgaatattctgaatctagttctttagaatcctctttgaattgtgaaatgcaaaataattgttagcagtttaacctgaaagatctttttacatgataaatgggggaggagaaagactgaaatgaaaatgttgaagaccctgatttgaaattgagtgtaaaggtctagatactgtaagttttagagtagctttagagacaaagctagtatcccacttggtgagatcaagtaacttgtggtttaaaatttaaagtaaccagtggccattttaacttcactaatttctcttggaggagctaatttttaattgctcatgattgtaaaacatacttccggatggtaagggagatgttaagatgatttgtcttgaagaatggtaaactttttctttgtttattgcctgtcataaaaagagggaaagtaaaaaaaaaaaggttcataatcttaaatcagtccaaaaatttgaattttctgtatttctgtttaattcaatgcgttaatctttagcattggtcaatacagccaaaagatgaggaaaacaaagactgatagatactaagataagaaataactgcaaccataaatgtatacaggttatgtgtccatgagccatctcttcagtttgcccata

SEQ ID NO: 241065 - DNA, 478 bp, Homo sapiens
ttttttttttactttaaagtagttactataaagtattaatagaggatagaagtaagagggaaaaggagatatatcttagaagactatttcctgaggactgagaataatcaaggttctttttctacctttaacttaacacttgatgtctcttgacttcatttttagcatgtgaaaaatgaaaagagtgaacgagatgatatgaaatgtttcttccagttcagtcattgtataattttgtaaatgctcctgatattggcctgctaatagaaaccttcccattgtaggaaataaagtactttgtagggcaaaattataaaggcataataattatttacttaaaaatttccccaaggcacttgctcatgtggtttttcttaaatgctctcgtatataatttgtaaaacaagatgttcacgtagaacactgcagttgcctttacataaaatgctctataatctgtgtcatgggattagagtca

SEQ ID NO: 241066 - DNA, 516 bp, Homo sapiens
caatatctaaaaataaattcacctgatattctcaatagaaaaaatggtaatgcagagaaaaatgtatgaaaatatggcaatttgaagaagagagaagagatcaataaaataaataagtatatccttggagacctgtggatgttttttgaaaagtgaatcatgtaagtaattgaagtcccagaagaaaagaaaagaagaggatgagcagaaaaaaatttctgaaaaaatatctgaaagcttaaacactataatgaaagacacacatttacaaactcaagaagtttagtaaaccaaaaacaataaaatcaaagagaactgtgccaagcgacatcattttcaacctgctgaagatcttgacagcagtcagagaaaaaagacacacttattacacagagaggaacaatacattaaatactagcacacttctcatcagagatcattaagcccagaagacagtggaatgagatctttaaagtgctgaaataaaataaatgttgattaaaaaattctatagct

SEQ ID NO: 241067 - DNA, 423 bp, Homo sapiens
gaagcagcaaatgtgtccatctgcaaactctggaaattcttcctgattcctgaatttaaaggaaatgtgaagactggtaatatgagtcccatgatcaaaagaagaggatgagcagaaaaaaatttctgaaaaaatatctgaaagcttaaacactataatgaaagacacacatttacaaactcaagaagtttagtaaaccaaaaacaataaaatcaaagagaactgtgccaagcgacatcattttcaacctgctgaagatcttgacagcagtcagagaaaaaagacacacttattacacagagaggaacaatacattaaatactagcacacttctcatcagagatcattaagcccagaagacagtggaatgagatctttaaagtgctgaaataaaataaatgttgattaaaaaattctatagct

SEQ ID NO: 241068 - DNA, 471 bp, Homo sapiens
ggagctgccacccagcccaggtagtaagactggcaggaagagagcaggacgccgccgcccgagtcccccagctcagccaggtgcgggcgggaggagccccgtccttgcttagccccgcgctggaagcgccgtccgagacactgcacggggcagactggtgggtgtcccggccctggcaccgcggggttgccctagccaaccggagcccagctcccccacgcgggccggacgtttccccagacgttgcgaagtccgactctggttcacagatgccgacctggtcggtctatgcggaccacccttttctccaacgtgaccgccgactattggaagttttttgtgatctgtcaggccctgatggcttaaggaacatagccagatcttcccgagtccgaggctcgttatggttgtccactgatgatctgccatttcgtttatgttacagaataaacagggaaagtgtttgtagtc

SEQ ID NO: 241069 - DNA, 411 bp, Homo sapiens
cgggcctgccacgcccgggacgcacaaatgcttctgggtctgcagaggagcaagctgctggcccacgaggcccttctccccggggcagatggatttcaggcgccccccaccccttgaggagaatatcaaggaaatggacagaagagtatattgcaactatcatctctgcccttggcctcgtgagggtcgctgggctgggacaaagtcctgcctgggcagttgacatcaaaattcgtcgtgccttgcctgctttatgtgggcaaaaggatgaaagaattgcacttctgttgcgcttccactgctagatcataagctccctgaaaacacgttgcatctgtgtctctagcaacttccacaaatgtttggagaataaattaatgtgtggcagggcgcggtccctgtgaactctaa

SEQ ID NO: 241070 - DNA, 416 bp, Homo sapiens
cccggggatgaaggttaacatcgctaacgtaggggcagccatggtcatgcgtcttctcatgtgtgcactgggaaggacaaagtgccacctctgtggcattcctgccaaaaaatacatcatgtgaatttaatcgtgaagttgaaaaatcatgtcaagggcatcctacaaagtaactggctttactctgtttttttttttaagacaaaatccatgatcaagaggcccacataaagactgtgaaagtgattaggtttaagacagaccaagaagatgcatcagtcaatggaccatgtaatcctgtattggattttagagaggggaagagaaaactttggggacaattgatgaaatctgaatatgggctgtggattacataatggcattatatcaatattaaattgtttgactctgaaaac

SEQ ID NO: 241071 - DNA, 332 bp, Homo sapiens
cgtcttaggtgctgtgcacggagctcgactatcctgaatccaccatgattcgacctcatgtcagtcctttggctgccagcccagttcaactccaagctgatgaccagtgtcgaccgccagtcattctgaacatttgaccagttgagctttcaaatgatggcagtcctggctgacattttgggtgaacaatatgagagactgactggttgagcccttcccaaatttctgacccacaacattgtgagaaaaataatcttaagcctctcagtttggggacaatttgttactcagcaatagaaatgaaaatatgatctcagtaggaccatgtgact

SEQ ID NO: 241072 - DNA, 370 bp, Homo sapiens
ggagatggagtttctctttgtcacccaggctggagtgcagtggcgagaccttggctcactgcaacctccacctcccaggttcaagcgattctcctgcctcggcctcctgaatagctgggattacaggcgcccaccaccatgcccggctaattttttgtatttttagtagagacggggttttgccatgttgggcaggctggtctcaaactcctgacctcgtgctccaccgccctttgcctcccaaagtgttggaattacaggcgtgagccaccgtgcccggccgtcacttttaaagggaggtcttttctgaactctggactctgtcagttcacctgtcacatgttcctgggtccccttccattactctctc

SEQ ID NO: 241073 - DNA, 521 bp, Homo sapiens
tcgtgtctggctcggtcgtgtctgggtggatttctttcggtgggtttcgatattgttcttttttcaaagtaagtatttgatatgtttaagagggcggaaattacgaaatggaggcagaatgagatcaaaagctattgagttggcaaagacgtgttgaataaagtgataaatgacaggtactggaataatacattcaaataacttgcagatctgcccgggcggatttcaaagcggtggtgtaacaggcacaaacacgttaagcattaacaactatctctcgcccactccccctccccccggacaagccatttgatgttctagtttgcaattactccacgcaaagtggacgtcctcctgcgcgatctttgggggtgtgtgggacgggggcgggggaggggagggcagaggggtgtgtgctcgcccactggccctgcgggtccagcgttctccgtgcccagacggcgctcccggggagggcggggaggggacagagcctccccggcacgtttctgggcggccgc

SEQ ID NO: 241074 - DNA, 417 bp, Homo sapiens
agtaggtcaaggctgcagttagccataattgtaccactgcactccagcctgggggacagagggagactctgtctctaaaataaattaataaaataaaaataattgtggttggtaaaataagaaagagcagatcaccgaagtcaagtgaagaaattgtttaagagaaaggaagccatccattgtgttaaatactgctgggaggttgtagtggcctgaataaatctctaaagtatcgggtcctaatccttagaatccataaatgttaattataaggaaaaaggatgtttgcagatgtgattaagttaaagctctggatatggaacagttattctagattatcctggggggtggggtgggggcgcctaaatccagtcctaagtatcctcataagagaggacagagggagatgacaaaagg

SEQ ID NO: 241075 - DNA, 469 bp, Homo sapiens
agagtcaggtcaggtgggtgggcgagaggaccagtgtggccaggctgcggaagccagcacaggagacaagggcgggtgctgtgcattacagaggctgctgggggcttgtccatagagcagcagggggcacggaagggcttggggacgcagacacgatcagacttgcatttcatcaggcactctttagctgcctgctgggtggctgggctgtgtgagatgaccctgctttgaccaggttaggaattatgactggtttccagagagaacattggttagtaattggctatggggaagagggggcgttgagccaaccaactggggtccccctgaagtgccagcaaagtgtctggttttctccaggatctgtttcctcagtccctggcaggattggctcccctgcacgccatgtccttgtggtcccttccagacagaaaccaggcatgaataaagtgaataatgacaagcaaaa

SEQ ID NO: 241076 - DNA, 280 bp, Homo sapiens
ttgataaagtgggctaatttaactgtatctgagagaaagaggggacaactggtccaggggactgtcacccaaggattggtgggaaggggagagcaaactgcaaggaagggctccacataaggattcactgtggtcccagaagaaggaaatgaagacttagttggaaaagggcaagttataccttagcctattgaacaggtgtcttgactatttttagacaaacatttgctattattataacttaccttttaaataaacagttgtattattgctaaactag

SEQ ID NO: 241077 - DNA, 512 bp, Homo sapiens
ttttttttttaattagccagccatgatagtgaatgcctgtagtcctagctactcatgaggctgaggcaggaggattgcttgagcgcaggagtttgaggctgcggtgctatgattgtaccaggagtttgaagctggagtactatgattgtaccactgcactccagcccggatgacagcaaaattctgtctcttaaaaaaaaatcaatactggccgggcgcggtggctcccgcctgtagtctcagcactttgggtggccgaggtgggtggatcacgaggtcaggagattgagaccatcctggctaacacagacaaaccccatctctactaaaaatacaaaaaattagccagacgtggtggtgggcgcctgtagtcccagctactcgggaggctgaggcaggagtatggcgtgaacccagaaggcagaggttgcagtgagctgggatcatgcccctgcactccagcctgggtgacagagcgagactccatctcgaaaaaaaaataataataaaac

SEQ ID NO: 241078 - DNA, 320 bp, Homo sapiens
aggtggcatccttgattagctaagtttttgtggatcttgttttgaaaccgggacacttctccctccttcactcagttttatttccttcctagcagttactccttccagaattatcttgtcattattttgcttgtggttggagggaccatccctcactctgcttcatcctggcagagatttttacctgatttgtacccagcacctccttgaaccatgcctggcatctatagaagctcaataaatggggtctccctctgttaccgagcctggagtacagtggtgaaatcctagcttactgcagcctggaacttctgggatca

SEQ ID NO: 241079 - DNA, 319 bp, Homo sapiens
tctctgtgcctcattttttttcatccataaaatggagttggctaattgagggatctcaggcctgtaatcccagcactttgggaggccaaggcgggaggactgcttgaagccaagagttcgaggccagcctaggcaatgtagtgagacccagtctctacaaaaagtagccaggcatgatggtgcatgcctgtggtcccagctactcaggaggcagaggcaggaggattgcttgagcccaggagttccagagtgcagtgagttatgattgtgctactgcattccatcctggaggacagggtgagaccttggctctttaaaa

SEQ ID NO: 241080 - DNA, 295 bp, Homo sapiens
gtcaccagagctcataaaagatgtgtgtgctgtcgcatctatgtgaagtatttccatgacccgagcattgaccacaggactgtgctggaggaaactggatcaaggtaccaagacagatacaggagggtctccagaaaccctagagctgaatggaacccgtctggaaaacatacactggaaactaggccgaggattatccaaagggtggttgaaatcaagggttaaagtttggctcaagataaggaagaatcttctaataattaaaactgaccatccaaaaggtaatgggatgctc

SEQ ID NO: 241081 - DNA, 476 bp, Homo sapiens
taatgaaatcattatctattcaacacttgctaattaagcttccattatggatcctgtcagatatggggcaggcagtaattagataaaaatcccaccctggaggtgttcattttataatggagtagaaagatacataaacaagcaattaaaagagacatttctctgtagtgccagatgacacacagaagagtaagtggtcagttgattctttcagggaaaaaaatagaacacaggattgaggaaagttctacagtgggatattcaaagtagggtttgaagagtgagtaggtgttcagcagatgatgtagatgtagccagaaaagtgcttatttagtgctttagtatgttcgagacctggtggtagtactttacacatattacctcatttaatcttcctgagtctgaggaatgggtctccttttgttgggtgtggaaacagttaaatggcaaggtcactgattacagagacaggatta

SEQ ID NO: 241082 - DNA, 1241 bp, Homo sapiens
ggcagtctggcagtggagctctccccggtctgacagccactccagaggccatgcttcgtttcttgccagatttggctttcagcttcctgttaattctggctttgggccaggcagtccaatttcaagaatatgtctttctccaatttctgggcttagataaggcgccttcaccccagaagttccaacctgtgccttatatcttgaagaaaattttccaggatcgcgaggcagcagcgaccactggggtctcccgagacttatgctacgtaaaggagctgggcgtccgcgggaatgtacttcgctttctcccagaccaaggtttctttctttacccaaagaaaatttcccaagcttcctcctgcctgcagaagctcctctactttaacctgtctgccatcaaagaaagggaacagttgacattggcccagctgggcctggacttggggcccaattcttactataacctgggaccagagctggaactggctctgttcctggttcaggagcctcatgtgtggggccagaccacccctaagccaggtaaaatgtttgtgttgcggtcagtcccatggccacaaggtgctgttcacttcaacctgctggatgtagctaaggattggaatgacaacccccggaaaaatttcgggttattcctggagatactggtcaaagaagatagagactcaggggtgaattttcagcctgaagacacctgtgccagactaagatgctcccttcatgcttccctgctggtggtgactctcaaccctgatcagtgccacccttctcggaaaaggagagcagccatccctgtccccaagctttcttgtaagaacctctgccaccgtcaccagctattcattaacttccgggacctgggttggcacaagtggatcattgcccccaaggggttcatggcaaattactgccatggagagtgtcccttctcactgaccatctctctcaacagctccaattatgctttcatgcaagccctgatgcatgccgttgacccagagatcccccaggctgtgtgtatccccaccaagctgtctcccatttccatgctctaccaggacaataatgacaatgtcattctacgacattatgaagacatggtagtcgatgaatgtgggtgtgggtaggatgtcagaaatgggaatagaaggagtgttcttagggtaaatcttttaataaaactacctatctggtttatgaccacttagatcgaaatgtcaata

SEQ ID NO: 241083 - DNA, 680 bp, Homo sapiens
ggcagtctggcagtggagctctccccggtctgacagccactccagaggccatgcttcgtttcttgccagatttggctttcagcttcctgttaattctggctttgggccaggcagtccaatttcaagaatatgtctttctccaatttctgggcttagataaggcgccttcaccccagaagttccaacctgtgccttatatcttgaagaaaattttccaggatcgcgaggcagcagcgaccactggggtctcccgagacttatgctacgtaaaggagctgggcgtccgcgggaatgtacttcgctttctcccagaccaaggtttctttctttacccaaagaaaatttcccaagcttcctcctgcctgcagaagctcctctactttaacctgtctgccatctctctcaacagctccaattatgctttcatgcaagccctgatgcatgccgttgacccagagatcccccaggctgtgtgtatccccaccaagctgtctcccatttccatgctctaccaggacaataatgacaatgtcattctacgacattatgaagacatggtagtcgatgaatgtgggtgtgggtaggatgtcagaaatgggaatagaaggagtgttcttagggtaaatcttttaataaaactacctatctggtttatgaccacttagatcgaaatgtcaata

SEQ ID NO: 241084 - DNA, 949 bp, Homo sapiens
ggcagtctggcagtggagctctccccggtctgacagccactccagaggccatgcttcgtttcttgccagatttggctttcagcttcctgttaattctggctttgggccaggcagtccaatttcaagaatatgtctttctccaatttctgggcttagataaggcgccttcaccccagaagttccaacctgtgccttatatcttgaagaaaattttccaggatcgcgaggcagcagcgaccactggggtctcccgagacttatgctacgtaaaggagctgggcgtccgcgggaatgtacttcgctttctcccagaccaaggtttctttctttacccaaagaaaatttcccaagcttcctcctgcctgcagaagctcctctactttaacctgtctgccatcaaagaaagggaacagttgacattggcccagctgggcctggacttggggcccaattcttactataacctgggaccagagctggaactggctctgttcctggttcaggagcctcatgtgtggggccagaccacccctaagccaggtaaaatgtttgtgttgcggtcagtcccatggccacaaggtgctgttcacttcaacctgctggatgtagctaaggattggaatgacaacccccggaaaaatttcgggttattcctggagatactggtcaaagaagatagagactcaggggtgaattttcagccctgatgcatgccgttgacccagagatcccccaggctgtgtgtatccccaccaagctgtctcccatttccatgctctaccaggacaataatgacaatgtcattctacgacattatgaagacatggtagtcgatgaatgtgggtgtgggtaggatgtcagaaatgggaatagaaggagtgttcttagggtaaatcttttaataaaactacctatctggtttatgaccacttagatcgaaatgtcaata

SEQ ID NO: 241085 - DNA, 918 bp, Homo sapiens
ggcagtctggcagtggagctctccccggtctgacagccactccagaggccatgcttcgtttcttgccagatttggctttcagcttcctgttaattctggctttgggccaggcagtccaatttcaagaatatgtctttctccaatttctgggcttagataaggcgccttcaccccagaagttccaacctgtgccttatatcttgaagaaaattttccaggatcgcgaggcagcagcgaccactggggtctcccgagacttatgctacgtaaaggagctgggcgtccgcgggaatgtacttcgctttctcccagaccaaggtttctttctttacccaaagaaaatttcccaagcttcctcctgcctgcagaagctcctctactttaacctgtctgccatcaaagaaagggaacagttgacattggcccagctgggcctggacttggggcccaattcttactataacctgggaccagagctggaactggctctgttcctggttcaggagcctcatgtgtggggccagaccacccctaagccaggtaaaatgtttgtgttgcggtcagtcccatggccacaaggtgctgttcacttcaacctgctggatgtagctaaggattggaatgacaacccccggaaaaatttcgggttattcctggagatactggtcaaagaagatagagactcaggggtgaattttcagcctgaagacacctgtgccagactaagatgctcccatttccatgctctaccaggacaataatgacaatgtcattctacgacattatgaagacatggtagtcgatgaatgtgggtgtgggtaggatgtcagaaatgggaatagaaggagtgttcttagggtaaatcttttaataaaactacctatctggtttatgaccacttagatcgaaatgtcaata

SEQ ID NO: 241086 - DNA, 408 bp, Homo sapiens
cgttggtttcaccaggttatttattaaaaacacaggacctagggccagattaggagggctcaaatcctagttcttcttataagctgtgtgatcatgggcaagttattaattctgtgactcagttgtttcatccattggtatggtttggctgtgtcctcacccaaatctcttcttgaattgtaactcccataattcccaagtgtcatgtcccataattcccacatgtcacagcccccacacagagtccctagcagggcactacctagtggagctgtgagaagagggccactgtccttcagacagcagaatgctagatccgacagcttgcaccgtgtgcctggaaaagccacaaacactcgacaccagctcacaaaagcagccagaagggagactatactctgcagagcc

SEQ ID NO: 241087 - DNA, 485 bp, Homo sapiens
tgtggtgagctggctcgcagcaagcccagatcaagtgttagtgagacggtgactctaggtgtgaagcaagtactgcaagtggcccagctgcccagcagggctccagagtttcttctgctgccacagttctcaaaataaatacttcagtatcaaccaggacttaaagcaataggaaaagttgcctgtttattccagatggccctagtaagccaaccgtcttttctgtgcctgcataccacactccagacctcagcaaagatacagcatctgctttgggctgttgagggacgcatcaagtaacctacgagaaaatgctctgagaagagtgaaataccgcacagtggaagtgtgcagggactggaggctcaatgaagaggatacagctatgtccacatcatgtcaactctcactgattgtagagctgttctcccacccaactcagtcctctctccctctacccctaacaggaacatttaactctgaaa

SEQ ID NO: 241088 - DNA, 354 bp, Homo sapiens
cagatgaatggataaagaaaatgtggtacatagacacaacagagcattattggttgttgtggtgatgaaagaagataacataaaaacagaaaaatggcgaagagcacagattccacagcctaatgtcctgagtttaaattcctactctgccatttaccaggctggaagtccaaggtgaagatgttggcagggttggctccttctgaggctgtgaggaaaggatctgttccagacctctctcctttactttgtggatggccgccttgtccctgtgtcctcacctaatcttccctctgtacgtgtgtccaaatttcctctttttataaagatgccactcatattagatttggccca

SEQ ID NO: 241089 - DNA, 552 bp, Homo sapiens
tatccaaaagtgtacattcttattttaccaggttttggaataatctcacatattgctacctattattctggaaaaaaaagaaccatttgattatatagaaataatatgacccataatatcaatttagctcataagctttatcgtatgaggctatatttacagcacggatagacattgatacctgaatgtattttacactagctactataattattgctattccaacaggagttaaagtatttaactgactagcaaccctacatggaggtaatactaaatgatctccagctatattatcaggtttaggctttattttcctgctgacagttggaggcctaacaggaactgttctaactcatcagcagacatcaatcctcatgatatatactgtgctacagcacatttctaacatgttctatcaatagctgcagtcttcaccatcacaggatttattcactgattcccatattttcaggttatacactcaacctgagccaaaatccattttgtatttgtaggtgttagcttgactttctttccacaacattttct

SEQ ID NO: 241090 - DNA, 435 bp, Homo sapiens
taactactgaaactacttagtttagttagagattacaaatggaattatcagcatattcttcactattttgcctattttacccataaaaacacaaaaagaacctttttattatgaaaaattttagctagctgcagtacttcacgcactcccagcaatttgggagactaaagcaagaggactgctttgagcccaggtatttgagaccagcctgggcaacaaagaaaaactctgtctcaaaataaataaataaataaataaataaataaattttaaaaatttaattagctgggcgaggtggcacatgcctgtggtcccagctacttgggaggctgaggtgggaggatcctttgagcccagaaggtcaaggcttcagtgagccatgattgcatcactgcactccagcctcagggacagcctgaccttgtctcaaaaaaa

SEQ ID NO: 241091 - DNA, 395 bp, Homo sapiens
atggtacccacatatttcaagatgaagttcaaattcttgagtttggcatacaagtaagatgaggcttctgttgcctcttaagcttcatgtctcttgttaggtcctccagagcctttcaatacaaccataaggaaggatcaatggttgctcaaatatgtcatggcctctctgccttcttccaagctgcttcctgtttcctgaatgctctctactgtgttggacactgtcccctaaaattcaggtccacctagaaccggtgaatgtaattttatttgaaaataggtttttgcagatataatcaagttaggacaaagtcatacagggttagggtgggccctaaatccaatatgatgggtgtccttataagaaagaaattaggacatagacacagacac

SEQ ID NO: 241092 - DNA, 656 bp, Homo sapiens
gcagggcaggtgaaacagacagacgagcctgctgcagacattctgaaggtaccactgattgagagattactgtgtgccagtcactatgctaacagctttatatgccagatgccatttaagcccctctcctgccctgggagaggagtgtgacctcccttcacctgagtacctgagaatcagaaagtgttaaggctgcccaggactcaaggtctgggtttcaccctctgtttatgctgttatgctgctcctagccatttaagacacacatggggatggaagggaagcctgtagggaaagctttggagaggtgaggacctcactcgcatatgaacctcacatacaacccccacagcctgaaatccgttcgttctcttcctgccacttctgagttgcatgaacaaatctcttaacttctctgagcctcagtccctcacctgtgaaattgattcagctgtagttcttacccctaggcatgtggagaggattcaatgaggtgaggcgtgaaagggtcataccatggtgctaggccgccactgtatatgagcagccgccattgtgttctacaatggaggtccctgttgatggcaggcagagacactcatctggttggccatatgcccagtggatggagctgtggcccctcctaatgctcttca

SEQ ID NO: 241093 - DNA, 372 bp, Homo sapiens
cagaagtccagtgtgtattttgttcccttattatttttgacagcgtctcagaaattttctttttaatagatataaaaatgaaattgtgagtccttggtttactttcttttaattttcttctttttatagttaatataccatctattctatctggcctttttgttgttttgtaaccaatactttaaatttttttcagtaggaatgacttgtgtcacttgaactagaattcctatatttgatggctagggataacacttaccttgtttactgttatactcccagtagttacataactctcattttagggaagtcatttaatttctctgacatttacattcctcctctgtaggctgggcgtggtggctcatacct

SEQ ID NO: 241094 - DNA, 317 bp, Homo sapiens
  misc_feature (14)..(14): n is a, c, g, or t
  misc_feature (58)..(58): n is a, c, g, or t
  misc_feature (89)..(89): n is a, c, g, or t
ggaattcggcacgngaagttaatcattgaaagacacaaccagcgtatcctctggaacnttgaaaataaagataaaacatagtataaatnatgtgttgtttttctttagtcctaagcacagagcaattttgtattagattacaaaatgtctgatgtctcttcaaattcccttcccaaatattttcctcagaagagatgttatctttttcctttccatcagaagaagcgaggcgagtaaccttaacctaacatttgaatgtatttgtcccaaatatattctttaacttcacttcctgaataagattttcctcctgctct

SEQ ID NO: 241095 - DNA, 104 bp, Homo sapiens
tgtgacacattgttactcttacatgttagttgtttaacacctacatgggctcttgcctcagctaaacagtgagttctcaaagatcacattcatgattagcagcc

SEQ ID NO: 241096 - DNA, 321 bp, Homo sapiens
aaactattaattagctttactactctggatttcttggaaagttttcttaaaattactagtgtgtttagtcttccgcggatttttttttaaacaggaattttcctgtttttttaaatttaaaattagaatagttattagctaagtttgttataaatgaataaaattattagagtcatcttggttttgtcaatttcaaaataaaaattcatttatacaaaatttgtgtatatcatccgtccttgggatcattacttgctggatgcattatggcagaaatacactattctcttgactgcttcatttattgttttaaaggacaaa

SEQ ID NO: 241097 - DNA, 481 bp, Homo sapiens
cagtgttctcccaaactcgttttaagcctccccttcactcctctcagatcactaaggagacgggcgtcactctgactgtagacaaaactgtcaattccctatgccactgcttccctgacttcagaccaaagtaagcaaatcgtttggacattgtggtgcagtaatcagataatttggctaaacccagacttgtgttcaaattatcagaactgatacctcaagtctctacttgattctccaaatgcagttgtgcgttctgtctccctttccccctccctcacactctccccgcttgctcattgcctctggtctcttctttgccccctctttcccccatgtacacaatcctttgttttacagataaagtggggctccagtcatttccttccagaaagaaaccattttccagatcccagctgatctagactttgggctgctaattaatggaagttactgaataaataaaatacaacaaatttgc

SEQ ID NO: 241098 - DNA, 478 bp, Homo sapiens
aactttcaaagctgtgcattattctatacacagggtgttcctgtccaacttggcttccataagaacttcaatcaaattcacagaccacattcaaatttgtcaattgtcctaataatagctattataggttcaggatcatacataatgtgtagttgtcatctctctttagttttcttcaacctggaccagttcctgagtcttaccttatttttatgatcttgacatttttaaaaagagcaggttactcactttgtagaaagtccatcaatttgggtttgtttagtatttcttcataattacatgtaagttatacaatttttggccgaattgtataaaaagtgatgctatgttctaatggcatcctatcaggacatatacaatatccatttatcctatgctgttttaacttttataagataatgtctgactcctctattgtaaaattaactattaaatatttggtattaatatgtagtct

SEQ ID NO: 241099 - DNA, 505 bp, Homo sapiens
gtgaataatttaactagttttccagtgtgataaaactgatctagtccaatctctcaccttatgtagacattccttctatgggatatatttccatgggtcccatctgggagtaaagagcacactgttggggtgtgtctgtctgtatgtgtgtgtgtttcatccaacaagtatttattgattggctactatgtgctaggctaaggacacagtgataaaaagacacattccctgcccttactgactttctaatggaaattttgctagcagcaaatgaagtctctaaacttttttcctgtcctctctttattctcaaagttcttttgaaagaaatgcagaatagtgggaagaaataaagaacaatgagagttaaacttctactaaaaatgcccacttttagtttgtaggggttttaaattcagaccagttcagttcaacaaacactgctgagcatctctagcccttggctagatcctgagcaataaaagcaataaaataaaattattat

SEQ ID NO: 241100 - DNA, 448 bp, Homo sapiens
gctcaggatttagggggattgggagccctgtgcccacctgccagctcccatttactcacaccaccctgcaggctggaggcttagccacttctcaggaggagcctagaaaggatattggtcgcccagctgctgaacctgccccagcatccttgagggtcttgaaaatctattttatgctgggcacctgtaatcccagaaatttgggaggccgagacgggtggatcacctgagatcaggagttcgagactagcctggccaaaatggtgaaacccaactctactaaaaatacaaaactagccaggcatgttggagcatgcctataatcccagctactcaagaggctgaggcaggagaattgcttgaacctgggaggcagaggttgcagtgagcgtgagccgagattgcgccgttgcactccagcccgggcaacagagcaagactccatctc

SEQ ID NO: 241101 - DNA, 401 bp, Homo sapiens
ttcagattcctgcaggtagacaccaaggatctcctcagagccagcgctgatctcatccacagagggatcacatgacctcatctgggaaaatataaaccctacccacctgcctgcccatttggaaatgcagactggaggacgctaagttcattcttacctatgtactaacaagtacacaagaagatgctcaatatcattagtccttggggaaatgcaaattagattataatgagattccagtgtacacccactagaaggctattaaaaaggacaataccaactgttggcaacaatgtggagaaatggaacccctcctacgtttctgatgagaatgtaaaatggtgcagatactttggaaaacagtttggcaatttattaaaagattaaataagcataaactt

SEQ ID NO: 241102 - DNA, 425 bp, Homo sapiens
ggtcccatcttaagcggccacacaaacacagccagtttccatttagaagcagctgcatgtctgtggtggtctttactctaggcagctacaccactcagcatctgttttgaggcaaataattatgactgagtcaggattataatccccatgggcttcattatgtccagatttcatttctactcctagtcggtcccttgttagataaaaaccctagggcacatggacctaccaataaaaagatgcattagacagcgggacatcagtagtacagctccctccagaggaaaagggctaatcacttgatagcagttctaacaccaccctcaggggatatctgtgaccaagaatagatgtactcaaagttcagtgagaaagttttgagcctggctgtgtaaaccctggcctagtgttttgggcattattta

SEQ ID NO: 241103 - DNA, 3866 bp, Homo sapiens
cgccaagaccgctgcagccgctggctgagttaaacccatccagagtaatggctgcggccttacccaggaccctgggggagttgcagctgtatagaatattacaaaaagccaatctactttcttattttgatgcctttatccaacaaggtggtgatgatgtccagcaactctgtgaagcaggagaagaggagtttttggaaatcatggcactcgtgggcatggctagcaagccccttcatgttagaaggctgcagaaggctttgagagactgggtcacaaaccctgggcttttcaatcagccactgacttcccttcctgtcagtagcatacccatctataaattaccagagggatcaccaacatggctgggaatatcctgcagtagttatgaaaggagtagcaatgcccgggaacctcatttaaaaatccccaaatgtgctgccaccacctgtgtgcagagcttgggacaggggaagtcagatgtggttgggagcctagcactgcagagtgttggtgagtccagactctggcaaggccaccatgccactgagagcgagcacagcctctccccagcagacctgggctcccccgcgtccccaaaggagagcagtgaggcgctggatgctgctgctgcgctctctgtggctgagtgtgtggagcggatggcccccacactgccaaaaagtgacttgaatgaagtgaaagagctgctaaaaaccaacaagaagttggccaaaatgattggtcacatctttgagatgaacgatgatgatccacacaaagaggaggaaattcggaaatacagtgcaatatatggcagatttgactcaaagaggaaggatgggaaacatctcacacttcatgagctcactgttaatgaagcggctgctcaactctgtgtgaaggataatgccctgctgacaagaagagatgagctttttgccttggctcgacagatttctcgagaagtcacctataaatatacttacagaaccaccaagtcaaaatgtggagaaagagatgaattatccccaaagagaattaaagtggagcagcctgaaaaggtgatggcaaagcagatggagttcctttgcaaccaagctggctatgagagactgcagcatgccgagaggaggttgtctgcagggctttacaggcagagctcagaagagcacagtcctaacggcttgacttccgataactcagatggacaaggagaaagacctttgaatctccgaatgcctaatttacagaacagacaaccccatcattttgtggtggatggggagctgagcagactttaccccagtgaggcaaagtcccactcatcagagagccttgggattttaaaagactaccctcattcagcttttaccttagaaaagaaagtcatcaaaacagagcctgaagattcaagatagctgtgatttctctcaccgttctctggaaatggcatcagatttaaggataatactccatcatagaaataagccttaataaccagtgttgcctcattcagctcaaacagatttcatagccaaagcaaaaggactggtacggtagtctgtggaaaccaggaagataaaacaacagccacaaaagagaaaatcaagagtgttgcaatctataacagtaatattgattcattcacattcctgtgttaagtcattttatatggaaaggcttacaaatcaatattgtaagcattcattatttaagaatgtacaatgtatttgtgtaatttatagaagtaaaatctagatgttgagacctgtttggtctaatagatgtggatacagtttattttacttgaaattttgttgtctactttgtgtgtttaacgtaaatatatgtcagagtttagaatctgcctgcagttgtgaaaaagaaagcttaagtgatgcagttattggcaagattgcaatgattatggaaaaatagaaagcgaatactcagtttaagccaaggaaaatattgtggatttaatatttgataaaactgattttgtttaacaggaaatttttagcattcagtcatataacatctggttatcaatgcacgtttacacaataaatacttgagtggaggaaagttaaaaagatgagcaatagagtagaaaatatatcttaaactagttgacctagattgtattaatagctacttaagatgtttcaaagataggaagctattgcttggacagagaacttgaaataagtggacccatgtataaaagctttgacttaaacattgatatttcagaatgtgttaaatagattaagacacagtaagttaaccctacatgttataaagatggcgactgttaacaaaggctgtaacagattaagtactattttatatccagaaagtcttctctatgtagagaagtcagagagactagatgctttcactagggaatgtcttcccacccagccatcacaaatgtggacaatcactgcatccacatctgtaggcatatttctatggaagtttaattgacagctatattcattatttattttacaatttcatttttctacacctttgagatttatgaatgcagttttttcttaaaatttattttaacttgacagtatgtttttagttcccccaatttaattaatggaccatgtgcatatatatgggagtgtgcttacatgttaataatttacttgcatacttatgagaatttcacattggaattcataatggtaaaacaacatacatctgccaatatacgttttttctgttggtttaagagaagataactgacagctttacctacttcctacagatgcatctaaacccagatattactgagaagagtgtattgactctgagtgtaagagagtatgtgtttttttgtttttagttctgctctagatcataattgtaaaaaatattaagtcataatctgttacactaaaatttgtcagccaaatgttagatgaaatgtctgcactgtagtctcagatcactgtcacgtatataaattgcttcttcattttaatttgtagaagtactttacagtaggaaacgccagtaaacaacttttatactgttaaaaggcttttttccccttcctaaatgttttaattgtaccatagtgttttgctcactgaagaagcttcttatggaccttgcaactttgttgctagcttgaggttgattattgtggttgtattgttcactgtgtgtagaaatagtatgagtacgatttcaatagactgttcagtttttaatattagccatagcactggttagtatatctcagtagtttcatgaaacgtttcctgtattctaatctattttgaaacattttgtttttttttaattgtgtcttacagtcaagtttgtagattttcataagccacaattttaaaagatgcagtaatcttccaacttccaatatttatccattcgttgtggacccacagattgcatctttaaattcataataagtttccttaactatcttatgtttctagtctttcaagcttagtgataaggtggaagcacaagaaaaatttcagtagaatacagtttttattttgtaaacactaatgtattaaacttgctatacattaaagcaaataatatatatttttatttgaattgtatatgtgaattggaagttataattagttgattttttcattttgttagaggtattttcactgaacaaggtcaattggttacctcagtattacagccaatatagtccaagggaccatttctccccgagtctcttacactttattgtgcgatgtccacgtttttgtgactcttcaagctgttggtgaggtgggacgaatgcacttgcttcctgtggcaataaagattttctgtgcctcacaaaaaaaaaagtt

SEQ ID NO: 241104 - DNA, 3663 bp, Homo sapiens
cgccaagaccgctgcagccgctggctgagttaaacccatccagagtaatggctgcggccttacccaggaccctgggggagttgcagctgtatagaatattacaaaaagccaatctactttcttattttgatgcctttatccaacaaggtggtgatgatgtccagcaactctgtgaagcaggagaagaggagtttttggaaatcatggcactcgtgggcatggctagcaagccccttcatgttagaaggctgcagaaggctttgagagactgggtcacaaaccctgggcttttcaatcagccactgacttcccttcctgtcagtagcatacccatctataaattaccagagggatcaccaacatggctgggaatatcctgcagtagttatgaaaggagtagcaatgcccgggaacctcatttaaaaatccccaaatgtgctgccaccacctgtgtgcagagcttgggacaggggaagtcagatgtggttgggagcctagcactgcagagtgttggtgagtccagactctggcaaggccaccatgccactgagagcgagcacagcctctccccagcagacctgggctcccccgcgtccccaaaggagagcagtgaggcgctggatgctgctgctgcgctctctgtggctgagtgtgtggagcggatggcccccacactgccaaaaagtgacttgaatgaagtgaaagagctgctaaaaaccaacaagaagttggccaaaatgattggtcacatctttgagatgaacgatgatgatccacacaaagaggaggaaattcggaaatacagtgcaatatatggcagatttgactcaaagaggaaggatgggaaacatctcacacttcatgagctcactgttaatgaagcggctgctcaactctgtgtgaaggataatgccctgctgacaagaagagatgagctttttgccttggctcgacagatttctcgagaagtcacctataaatatacttacagaaccaccaagtcaaaatgtggagaaagagatgaattatccccaaagagaattaaagtggaggatgggtttccagatttccaggattctgtgcaaacactcttccagcaggctagagctaagagtgaagaacttgcagctcttagttcacagcagcctgaaaaggtgatggcaaagcagatggagttcctttgcaaccaagctggctatgagagactgcagcatgccgagaggaggttgtctgcagggctttacaggcagagctcagaagagcacagtcctaacggcttgacttccgataactcagatggacaaggagaaagacctttgaatctccgaatgcctaatttacagaacagacaaccccatcattttgtggtggatggggagctgagcagactttaccccagtgaggcaaagtcccactcatcagagagccttgggattttaaaagactaccctcattcagcttttaccttagaaaagaaagtcatcaaaacagagcctgaagattcaagatagctgtgatttctctcaccgttctctggaaatggcatcagatttaaggataatactccatcatagaaataagccttaataaccagtgttgcctcattcagctcaaacagatttcatagccaaagcaaaaggactggtacggtagtctgtggaaaccaggaagataaaacaacagccacaaaagagaaaatcaagagtgttgcaatctataacagtaatattgattcattcacattcctgtgttaagtcattttatatggaaaggcttacaaatcaatattgtaagcattcattatttaagaatgtacaatgtatttgtgtaatttatagaagtaaaatctagatgttgagacctgtttggtctaatagatgtggatacagtttattttacttgaaattttgttgtctactttgtgtgtttaacgtaaatatatgtcagagtttagaatctgcctgcagttgtgaaaaagaaagcttaagtgatgcagttattggcaagattgcaatgattatggaaaaatagaaagcgaatactcagtttaagccaaggaaaatattgtggatttaatatttgataaaactgattttgtttaacaggaaatttttagcattcagtcatataacatctggttatcaatgcacgtttacacaataaatacttgagtggaggaaagttaaaaagatgagcaatagagtagaaaatatatcttaaactagttgacctagattgtattaatagctacttaagatgtttcaaagataggaagctattgcttggacagagaacttgaaataagtggacccatgtataaaagctttgacttaaacattgatatttcagaatgtgttaaatagattaagacacagtaagttaaccctacatgttataaagatggcgactgttaacaaaggctgtaacagattaagtactattttatatccagaaagtcttctctatgtagagaagtcagagagactagatgctttcactagggaatgtcttcccacccagccatcacaaatgtggacaatcactgcatccacatctgtaggcatatttctatggaagtttaattgacagctatattcattatttattttacaatttcatttttctacacctttgagatttatgaatgcagttttttcttaaaatttattttaacttgacagtatgtttttagttcccccaatttaattaatggaccatgtgcatatatatgggagtgtgcttacatgttaataatttacttgcatacttatgagaatttcacattggaattcataatggtaaaacaacatacatctgccaatatacgttttttctgttggtttaagagaagataactgacagctttacctacttcctacagatgcatctaaacccagatattactgagaagagtgtattgactctgagtgtaagagagtatgtgtttttttgtttttagttctgctctagatcataattgtaaaaaatattaagtcataatctgttacactaaaatttgtcagccaaatgttagatgaaatgtctgcactgtagtctcagatcactgtcacgtatataaattgcttcttcattttaatttgtagaagtactttacagtaggaaacgccagtaaacaacttttatactgttaaaaggcttttttccccttcctaaatgttttaattgtaccatagtgttttgctcactgaagaagcttcttatggaccttgcaactttgttgctagcttgaggttgattattgtggttgtattgttcactgtgtgtagaaatagtatgagtacgatttcaatagactgttcagtttttaatattagccatagcactggttagtatatctcagtagtttcatgaaacgtttcctgtattctaatctattttgaaacattttgtttttttttaattgtgtcttacagtcaagtttgtagattttcataagccacaattttaaaagatgcagtaatcttccaacttccaatatttatccattcgttgtggacccacagattgcatctttaaattcataataagttcctaacacttgtactggttcaagctaggctggggtcgccaaattgccacacgtttcgtgccccattttacgcctttcacagccatatatcagacggcagggacacacctacg

SEQ ID NO: 241105 - DNA, 2720 bp, Homo sapiens
ccctcgcgacgtgtatccctcgcgaacgtgtatccctacggctgacttccgataactcagatggacaaggagaaagacctttgaatctccgaatgcctaatttacagaacagacaaccccatcattttgtggtggatggggagctgagcagactttaccccagtgaggcaaagtcccactcatcagagagccttgggattttaaaagactaccctcattcagcttttaccttagaaaagaaagtcatcaaaacagagcctgaagattcaagatagctgtgatttctctcaccgttctctggaaatggcatcagatttaaggataatactccatcatagaaataagccttaataaccagtgttgcctcattcagctcaaacagatttcatagccaaagcaaaaggactggtacggtagtctgtggaaaccaggaagataaaacaacagccacaaaagagaaaatcaagagtgttgcaatctataacagtaatattgattcattcacattcctgtgttaagtcattttatatggaaaggcttacaaatcaatattgtaagcattcattatttaagaatgtacaatgtatttgtgtaatttatagaagtaaaatctagatgttgagacctgtttggtctaatagatgtggatacagtttattttacttgaaattttgttgtctactttgtgtgtttaacgtaaatatatgtcagagtttagaatctgcctgcagttgtgaaaaagaaagcttaagtgatgcagttattggcaagattgcaatgattatggaaaaatagaaagcgaatactcagtttaagccaaggaaaatattgtggatttaatatttgataaaactgattttgtttaacaggaaatttttagcattcagtcatataacatctggttatcaatgcacgtttacacaataaatacttgagtggaggaaagttaaaaagatgagcaatagagtagaaaatatatcttaaactagttgacctagattgtattaatagctacttaagatgtttcaaagataggaagctattgcttggacagagaacttgaaataagtggacccatgtataaaagctttgacttaaacattgatatttcagaatgtgttaaatagattaagacacagtaagttaaccctacatgttataaagatggcgactgttaacaaaggctgtaacagattaagtactattttatatccagaaagtcttctctatgtagagaagtcagagagactagatgctttcactagggaatgtcttcccacccagccatcacaaatgtggacaatcactgcatccacatctgtaggcatatttctatggaagtttaattgacagctatattcattatttattttacaatttcatttttctacacctttgagatttatgaatgcagttttttcttaaaatttattttaacttgacagtatgtttttagttcccccaatttaattaatggaccatgtgcatatatatgggagtgtgcttacatgttaataatttacttgcatacttatgagaatttcacattggaattcataatggtaaaacaacatacatctgccaatatacgttttttctgttggtttaagagaagataactgacagctttacctacttcctacagatgcatctaaacccagatattactgagaagagtgtattgactctgagtgtaagagagtatgtgtttttttgtttttagttctgctctagatcataattgtaaaaaatattaagtcataatctgttacactaaaatttgtcagccaaatgttagatgaaatgtctgcactgtagtctcagatcactgtcacgtatataaattgcttcttcattttaatttgtagaagtactttacagtaggaaacgccagtaaacaacttttatactgttaaaaggcttttttccccttcctaaatgttttaattgtaccatagtgttttgctcactgaagaagcttcttatggaccttgcaactttgttgctagcttgaggttgattattgtggttgtattgttcactgtgtgtagaaatagtatgagtacgatttcaatagactgttcagtttttaatattagccatagcactggttagtatatctcagtagtttcatgaaacgtttcctgtattctaatctattttgaaacattttgtttttttttaattgtgtcttacagtcaagtttgtagattttcataagccacaattttaaaagatgcagtaatcttccaacttccaatatttatccattcgttgtggacccacagattgcatctttaaattcataataagtttccttaactatcttatgtttctagtctttcaagcttagtgataaggtggaagcacaagaaaaatttcagtagaatacagtttttattttgtaaacactaatgtattaaacttgctatacattaaagcaaataatatatatttttatttgaattgtatatgtgaattggaagttataattagttgattttttcattttgttagaggtattttcactgaacaaggtcaattggttacctcagtattacagccaatatagtccaagggaccatttctccccgagtctcttacactttattgtgcgatgtccacgtttttgtgactcttcaagctgttggtgaggtgggacgaatgcacttgcttcctgtggcaataaagattttctgtgcctcacaaaaaaaaaagtt

SEQ ID NO: 241106 - DNA, 2621 bp, Homo sapiens
agtttgggggtttgttttaaaactttgtttgatttttgtagtccattgattaaaatatcaactcactttgtttccatttttatgtagagagccttgggattttaaaagactaccctcattcagcttttaccttagaaaagaaagtcatcaaaacagagcctgaagattcaagatagctgtgatttctctcaccgttctctggaaatggcatcagatttaaggataatactccatcatagaaataagccttaataaccagtgttgcctcattcagctcaaacagatttcatagccaaagcaaaaggactggtacggtagtctgtggaaaccaggaagataaaacaacagccacaaaagagaaaatcaagagtgttgcaatctataacagtaatattgattcattcacattcctgtgttaagtcattttatatggaaaggcttacaaatcaatattgtaagcattcattatttaagaatgtacaatgtatttgtgtaatttatagaagtaaaatctagatgttgagacctgtttggtctaatagatgtggatacagtttattttacttgaaattttgttgtctactttgtgtgtttaacgtaaatatatgtcagagtttagaatctgcctgcagttgtgaaaaagaaagcttaagtgatgcagttattggcaagattgcaatgattatggaaaaatagaaagcgaatactcagtttaagccaaggaaaatattgtggatttaatatttgataaaactgattttgtttaacaggaaatttttagcattcagtcatataacatctggttatcaatgcacgtttacacaataaatacttgagtggaggaaagttaaaaagatgagcaatagagtagaaaatatatcttaaactagttgacctagattgtattaatagctacttaagatgtttcaaagataggaagctattgcttggacagagaacttgaaataagtggacccatgtataaaagctttgacttaaacattgatatttcagaatgtgttaaatagattaagacacagtaagttaaccctacatgttataaagatggcgactgttaacaaaggctgtaacagattaagtactattttatatccagaaagtcttctctatgtagagaagtcagagagactagatgctttcactagggaatgtcttcccacccagccatcacaaatgtggacaatcactgcatccacatctgtaggcatatttctatggaagtttaattgacagctatattcattatttattttacaatttcatttttctacacctttgagatttatgaatgcagttttttcttaaaatttattttaacttgacagtatgtttttagttcccccaatttaattaatggaccatgtgcatatatatgggagtgtgcttacatgttaataatttacttgcatacttatgagaatttcacattggaattcataatggtaaaacaacatacatctgccaatatacgttttttctgttggtttaagagaagataactgacagctttacctacttcctacagatgcatctaaacccagatattactgagaagagtgtattgactctgagtgtaagagagtatgtgtttttttgtttttagttctgctctagatcataattgtaaaaaatattaagtcataatctgttacactaaaatttgtcagccaaatgttagatgaaatgtctgcactgtagtctcagatcactgtcacgtatataaattgcttcttcattttaatttgtagaagtactttacagtaggaaacgccagtaaacaacttttatactgttaaaaggcttttttccccttcctaaatgttttaattgtaccatagtgttttgctcactgaagaagcttcttatggaccttgcaactttgttgctagcttgaggttgattattgtggttgtattgttcactgtgtgtagaaatagtatgagtacgatttcaatagactgttcagtttttaatattagccatagcactggttagtatatctcagtagtttcatgaaacgtttcctgtattctaatctattttgaaacattttgtttttttttaattgtgtcttacagtcaagtttgtagattttcataagccacaattttaaaagatgcagtaatcttccaacttccaatatttatccattcgttgtggacccacagattgcatctttaaattcataataagtttccttaactatcttatgtttctagtctttcaagcttagtgataaggtggaagcacaagaaaaatttcagtagaatacagtttttattttgtaaacactaatgtattaaacttgctatacattaaagcaaataatatatatttttatttgaattgtatatgtgaattggaagttataattagttgattttttcattttgttagaggtattttcactgaacaaggtcaattggttacctcagtattacagccaatatagtccaagggaccatttctccccgagtctcttacactttattgtgcgatgtccacgtttttgtgactcttcaagctgttggtgaggtgggacgaatgcacttgcttcctgtggcaataaagattttctgtgcctcacaaaaaaaaaagtt

SEQ ID NO: 241107 - DNA, 962 bp, Homo sapiens
cgccaagaccgctgcagccgctggctgagttaaacccatccagagtaatggctgcggccttacccaggaccctgggggagttgcagctgtatagaatattacaaaaagccaatctactttcttattttgatgcctttatccaacaaggtggtgatgatgtccagcaactctgtgaagcaggagaagaggagtttttggaaatcatggcactcgtgggcatggctagcaagccccttcatgttagaaggctgcagaaggctttgagagactgggtcacaaaccctgggcttttcaatcagccactgacttcccttcctgtcagtagcatacccatctataaattaccagagggatcaccaacatggctgggaatatcctgcagtagttatgaaaggagtagcaatgcccgggaacctcatttaaaaatccccaaatgtgctgccaccacctgtgtgcagagcttgggacaggggaagtcagatgtggttgggagcctagcactgcagagtgttggtgagtccagactctggcaaggccaccatgccactgagagcgagcacagcctctccccagcagacctgggctcccccgcgtccccaaaggagagcagtgaggcgctggatgctgctgctgcgctctctgtggctgagtgtgtggagcggatggcccccacactgccaaaaagtgacttgaatgaagtgaaagagctgctaaaaaccaacaagaagttggccgaaattcggaaatacagtgcaatatatggcagatttgactcaaagaggaaggatgggaaacatctcacacttcatgagctcactgttaatgaagcggctgctcaactctgtgtgaaggataatgccctgctgacaagaagagatgagctttttgccttggctcgacagatttctcggcacgcccccatcacacaccttttggacccgcccattcacaatgtgcttacg

SEQ ID NO: 241108 - DNA, 767 bp, Homo sapiens
attaagagtttgctttattttcaagtttttgataatattttattatttacaaactctaaatataaaggacttcttatttgacccacaggatgggtttccagatttccaggattctgtgcaaacactcttccagcaggctagagctaagagtgaagaacttgcagctcttagttcacagtaacataaactcccagttattactccatgatagtatctgaaggttaaaaaataaatgactacttcaactagcttcagttttaagtatctgaggcctgactttttatttccgtttgttttttaaaacgtcatctgagccacagctgtatcaacatgagagcaataacaacttggtttgattcagtttatgaacggaatctgatatggtgctacttatttattcttgtagttttgtaggaagtgagacagattctctgctcaagaaaacttaaacagtttgataatcaggaaaaccagccatgttgaccatggctgtgtgtaatgcaactctgagataaaataatactagttctcaataaaatattaatagtcaacattgtaattattgttaaatcttttaaattcatatttattgaaaaactattaaatgaatatgtggcttcaggtgcttttgccattaagttatttaattttgtctgtatactgaaattaaaattttaaaatgctttctgcaaacatcatcttttagaaagcactgtaaacttttattcctattgaacagcttctttgtaataagttgcttttgatca

SEQ ID NO: 241109 - DNA, 326 bp, Homo sapiens
ttatttaaattcttcagtgctcgttgactctcctcacttttttcctaaggagtgttcaggcaaaatttatttttaagaaaaaccatggtatgtttttaatattatgcatatttcttttttcttttcattaggagaaagacctttgaatctccgaatgcctaatttacagaacagacaaccccatcattttgtggtggatggggagctgagcagactttaccccagtgaggcaaagtcccactcatcaggtgagaacgtgctatatgatgagagggtaacacttgaataaaagcatctttaaattctgttctatttcctcccccatc

SEQ ID NO: 241110 - DNA, 3956 bp, Homo sapiens
cgccaagaccgctgcagccgctggctgagttaaacccatccagagtaatggctgcggccttacccaggaccctgggggagttgcagctgtatagaatattacaaaaagccaatctactttcttattttgatgcctttatccaacaaggtggtgatgatgtccagcaactctgtgaagcaggagaagaggagtttttggaaatcatggcactcgtgggcatggctagcaagccccttcatgttagaaggctgcagaaggctttgagagactgggtcacaaaccctgggcttttcaatcagccactgacttcccttcctgtcagtagcatacccatctataaattaccagagggatcaccaacatggctgggaatatcctgcagtagttatgaaaggagtagcaatgcccgggaacctcatttaaaaatccccaaatgtgctgccaccacctgtgtgcagagcttgggacaggggaagtcagatgtggttgggagcctagcactgcagagtgttggtgagtccagactctggcaaggccaccatgccactgagagcgagcacagcctctccccagcagacctgggctcccccgcgtccccaaaggagagcagtgaggcgctggatgctgctgctgcgctctctgtggctgagtgtgtggagcggatggcccccacactgccaaaaagtgacttgaatgaagtgaaagagctgctaaaaaccaacaagaagttggccaaaatgattggtcacatctttgagatgaacgatgatgatccacacaaagaggaggaaattcggaaatacagtgcaatatatggcagatttgactcaaagaggaaggatgggaaacatctcacacttcatgagctcactgttaatgaagcggctgctcaactctgtgtgaaggataatgccctgctgacaagaagagatgagctttttgccttggctcgacagatttctcgagaagtcacctataaatatacttacagaaccaccaagtcaaaatgtggagaaagagatgaattatccccaaagagaattaaagtggaggatgggtttccagatttccaggattctgtgcaaacactcttccagcaggctagagctaagagtgaagaacttgcagctcttagttcacagcagcctgaaaaggtgatggcaaagcagatggagttcctttgcaaccaagctggctatgagagactgcagcatgccgagaggaggttgtctgcagggctttacaggcagagctcagaagagcacagtcctaacggcttgacttccgataactcagatggacaaggagaaagacctttgaatctccgaatgcctaatttacagaacagacaaccccatcattttgtggtggatggggagctgagcagactttaccccagtgaggcaaagtcccactcatcagagagccttgggattttaaaagactaccctcattcagcttttaccttagaaaagaaagtcatcaaaacagagcctgaagattcaagatagctgtgatttctctcaccgttctctggaaatggcatcagatttaaggataatactccatcatagaaataagccttaataaccagtgttgcctcattcagctcaaacagatttcatagccaaagcaaaaggactggtacggtagtctgtggaaaccaggaagataaaacaacagccacaaaagagaaaatcaagagtgttgcaatctataacagtaatattgattcattcacattcctgtgttaagtcattttatatggaaaggcttacaaatcaatattgtaagcattcattatttaagaatgtacaatgtatttgtgtaatttatagaagtaaaatctagatgttgagacctgtttggtctaatagatgtggatacagtttattttacttgaaattttgttgtctactttgtgtgtttaacgtaaatatatgtcagagtttagaatctgcctgcagttgtgaaaaagaaagcttaagtgatgcagttattggcaagattgcaatgattatggaaaaatagaaagcgaatactcagtttaagccaaggaaaatattgtggatttaatatttgataaaactgattttgtttaacaggaaatttttagcattcagtcatataacatctggttatcaatgcacgtttacacaataaatacttgagtggaggaaagttaaaaagatgagcaatagagtagaaaatatatcttaaactagttgacctagattgtattaatagctacttaagatgtttcaaagataggaagctattgcttggacagagaacttgaaataagtggacccatgtataaaagctttgacttaaacattgatatttcagaatgtgttaaatagattaagacacagtaagttaaccctacatgttataaagatggcgactgttaacaaaggctgtaacagattaagtactattttatatccagaaagtcttctctatgtagagaagtcagagagactagatgctttcactagggaatgtcttcccacccagccatcacaaatgtggacaatcactgcatccacatctgtaggcatatttctatggaagtttaattgacagctatattcattatttattttacaatttcatttttctacacctttgagatttatgaatgcagttttttcttaaaatttattttaacttgacagtatgtttttagttcccccaatttaattaatggaccatgtgcatatatatgggagtgtgcttacatgttaataatttacttgcatacttatgagaatttcacattggaattcataatggtaaaacaacatacatctgccaatatacgttttttctgttggtttaagagaagataactgacagctttacctacttcctacagatgcatctaaacccagatattactgagaagagtgtattgactctgagtgtaagagagtatgtgtttttttgtttttagttctgctctagatcataattgtaaaaaatattaagtcataatctgttacactaaaatttgtcagccaaatgttagatgaaatgtctgcactgtagtctcagatcactgtcacgtatataaattgcttcttcattttaatttgtagaagtactttacagtaggaaacgccagtaaacaacttttatactgttaaaaggcttttttccccttcctaaatgttttaattgtaccatagtgttttgctcactgaagaagcttcttatggaccttgcaactttgttgctagcttgaggttgattattgtggttgtattgttcactgtgtgtagaaatagtatgagtacgatttcaatagactgttcagtttttaatattagccatagcactggttagtatatctcagtagtttcatgaaacgtttcctgtattctaatctattttgaaacattttgtttttttttaattgtgtcttacagtcaagtttgtagattttcataagccacaattttaaaagatgcagtaatcttccaacttccaatatttatccattcgttgtggacccacagattgcatctttaaattcataataagtttccttaactatcttatgtttctagtctttcaagcttagtgataaggtggaagcacaagaaaaatttcagtagaatacagtttttattttgtaaacactaatgtattaaacttgctatacattaaagcaaataatatatatttttatttgaattgtatatgtgaattggaagttataattagttgattttttcattttgttagaggtattttcactgaacaaggtcaattggttacctcagtattacagccaatatagtccaagggaccatttctccccgagtctcttacactttattgtgcgatgtccacgtttttgtgactcttcaagctgttggtgaggtgggacgaatgcacttgcttcctgtggcaataaagattttctgtgcctcacaaaaaaaaaagtt

SEQ ID NO: 241111 - DNA, 3904 bp, Homo sapiens
cgccaagaccgctgcagccgctggctgagttaaacccatccagagtaatggctgcggccttacccaggaccctgggggagttgcagctgtatagaatattacaaaaagccaatctactttcttattttgatgcctttatccaacaaggtggtgatgatgtccagcaactctgtgaagcaggagaagaggagtttttggaaatcatggcactcgtgggcatggctagcaagccccttcatgttagaaggctgcagaaggctttgagagactgggtcacaaaccctgggcttttcaatcagccactgacttcccttcctgtcagtagcatacccatctataaattaccagagggatcaccaacatggctgggaatatcctgcagtagttatgaaaggagtagcaatgcccgggaacctcatttaaaaatccccaaatgtgctgccaccacctgtgtgcagagcttgggacaggggaagtcagatgtggttgggagcctagcactgcagagtgttggtgagtccagactctggcaaggccaccatgccactgagagcgagcacagcctctccccagcagacctgggctcccccgcgtccccaaaggagagcagtgaggcgctggatgctgctgctgcgctctctgtggctgagtgtgtggagcggatggcccccacactgccaaaaagtgacttgaatgaagtgaaagagctgctaaaaaccaacaagaagttggccaaaatgattggtcacatctttgagatgaacgatgatgatccacacaaagaggaggaaattcggaaatacagtgcaatatatggcagatttgactcaaagaggaaggatgggaaacatctcacacttcatgagctcactgttaatgaagcggctgctcaactctgtgtgaaggataatgccctgctgacaagaagagatgagctttttgccttggctcgacagatttctcgagaagtcacctataaatatacttacagaaccaccaagatgggtttccagatttccaggattctgtgcaaacactcttccagcaggctagagctaagagtgaagaacttgcagctcttagttcacagcagcctgaaaaggtgatggcaaagcagatggagttcctttgcaaccaagctggctatgagagactgcagcatgccgagaggaggttgtctgcagggctttacaggcagagctcagaagagcacagtcctaacggcttgacttccgataactcagatggacaaggagaaagacctttgaatctccgaatgcctaatttacagaacagacaaccccatcattttgtggtggatggggagctgagcagactttaccccagtgaggcaaagtcccactcatcagagagccttgggattttaaaagactaccctcattcagcttttaccttagaaaagaaagtcatcaaaacagagcctgaagattcaagatagctgtgatttctctcaccgttctctggaaatggcatcagatttaaggataatactccatcatagaaataagccttaataaccagtgttgcctcattcagctcaaacagatttcatagccaaagcaaaaggactggtacggtagtctgtggaaaccaggaagataaaacaacagccacaaaagagaaaatcaagagtgttgcaatctataacagtaatattgattcattcacattcctgtgttaagtcattttatatggaaaggcttacaaatcaatattgtaagcattcattatttaagaatgtacaatgtatttgtgtaatttatagaagtaaaatctagatgttgagacctgtttggtctaatagatgtggatacagtttattttacttgaaattttgttgtctactttgtgtgtttaacgtaaatatatgtcagagtttagaatctgcctgcagttgtgaaaaagaaagcttaagtgatgcagttattggcaagattgcaatgattatggaaaaatagaaagcgaatactcagtttaagccaaggaaaatattgtggatttaatatttgataaaactgattttgtttaacaggaaatttttagcattcagtcatataacatctggttatcaatgcacgtttacacaataaatacttgagtggaggaaagttaaaaagatgagcaatagagtagaaaatatatcttaaactagttgacctagattgtattaatagctacttaagatgtttcaaagataggaagctattgcttggacagagaacttgaaataagtggacccatgtataaaagctttgacttaaacattgatatttcagaatgtgttaaatagattaagacacagtaagttaaccctacatgttataaagatggcgactgttaacaaaggctgtaacagattaagtactattttatatccagaaagtcttctctatgtagagaagtcagagagactagatgctttcactagggaatgtcttcccacccagccatcacaaatgtggacaatcactgcatccacatctgtaggcatatttctatggaagtttaattgacagctatattcattatttattttacaatttcatttttctacacctttgagatttatgaatgcagttttttcttaaaatttattttaacttgacagtatgtttttagttcccccaatttaattaatggaccatgtgcatatatatgggagtgtgcttacatgttaataatttacttgcatacttatgagaatttcacattggaattcataatggtaaaacaacatacatctgccaatatacgttttttctgttggtttaagagaagataactgacagctttacctacttcctacagatgcatctaaacccagatattactgagaagagtgtattgactctgagtgtaagagagtatgtgtttttttgtttttagttctgctctagatcataattgtaaaaaatattaagtcataatctgttacactaaaatttgtcagccaaatgttagatgaaatgtctgcactgtagtctcagatcactgtcacgtatataaattgcttcttcattttaatttgtagaagtactttacagtaggaaacgccagtaaacaacttttatactgttaaaaggcttttttccccttcctaaatgttttaattgtaccatagtgttttgctcactgaagaagcttcttatggaccttgcaactttgttgctagcttgaggttgattattgtggttgtattgttcactgtgtgtagaaatagtatgagtacgatttcaatagactgttcagtttttaatattagccatagcactggttagtatatctcagtagtttcatgaaacgtttcctgtattctaatctattttgaaacattttgtttttttttaattgtgtcttacagtcaagtttgtagattttcataagccacaattttaaaagatgcagtaatcttccaacttccaatatttatccattcgttgtggacccacagattgcatctttaaattcataataagtttccttaactatcttatgtttctagtctttcaagcttagtgataaggtggaagcacaagaaaaatttcagtagaatacagtttttattttgtaaacactaatgtattaaacttgctatacattaaagcaaataatatatatttttatttgaattgtatatgtgaattggaagttataattagttgattttttcattttgttagaggtattttcactgaacaaggtcaattggttacctcagtattacagccaatatagtccaagggaccatttctccccgagtctcttacactttattgtgcgatgtccacgtttttgtgactcttcaagctgttggtgaggtgggacgaatgcacttgcttcctgtggcaataaagattttctgtgcctcacaaaaaaaaaagtt

SEQ ID NO: 241112 - DNA, 3710 bp, Homo sapiens
cgccaagaccgctgcagccgctggctgagttaaacccatccagagtaatggctgcggccttacccaggaccctgggggagttgcagctgtatagaatattacaaaaagccaatctactttcttattttgatgcctttatccaacaaggtggtgatgatgtccagcaactctgtgaagcaggagaagaggagtttttggaaatcatggcactcgtgggcatggctagcaagccccttcatgttagaaggctgcagaaggctttgagagactgggtcacaaaccctgggcttttcaatcagccactgacttcccttcctgtcagtagcatacccatctataaattaccagagggatcaccaacatggctgggaatatcctgcagtagttatgaaaggagtagcaatgcccgggaacctcatttaaaaatccccaaatgtgctgccaccacctgtgtgcagagcttgggacaggggaagtcagatgtggttgggagcctagcactgcagagtgttggtgagtccagactctggcaaggccaccatgccactgagagcgagcacagcctctccccagcagacctgggctcccccgcgtccccaaaggagagcagtgaggcgctggatgctgctgctgcgctctctgtggctgagtgtgtggagcggatggcccccacactgccaaaaagtgacttgaatgaagtgaaagagctgctaaaaaccaacaagaagttggccaaaatgattggtcacatctttgagatgaacgatgatgatccacacaaagaggaggaaattcggaaatacagtgcaatatatggcagatttgactcaaagaggaaggatgggaaacatctcacacttcatgaggatgggtttccagatttccaggattctgtgcaaacactcttccagcaggctagagctaagagtgaagaacttgcagctcttagttcacagagactgcagcatgccgagaggaggttgtctgcagggctttacaggcagagctcagaagagcacagtcctaacggcttgacttccgataactcagatggacaaggagaaagacctttgaatctccgaatgcctaatttacagaacagacaaccccatcattttgtggtggatggggagctgagcagactttaccccagtgaggcaaagtcccactcatcagagagccttgggattttaaaagactaccctcattcagcttttaccttagaaaagaaagtcatcaaaacagagcctgaagattcaagatagctgtgatttctctcaccgttctctggaaatggcatcagatttaaggataatactccatcatagaaataagccttaataaccagtgttgcctcattcagctcaaacagatttcatagccaaagcaaaaggactggtacggtagtctgtggaaaccaggaagataaaacaacagccacaaaagagaaaatcaagagtgttgcaatctataacagtaatattgattcattcacattcctgtgttaagtcattttatatggaaaggcttacaaatcaatattgtaagcattcattatttaagaatgtacaatgtatttgtgtaatttatagaagtaaaatctagatgttgagacctgtttggtctaatagatgtggatacagtttattttacttgaaattttgttgtctactttgtgtgtttaacgtaaatatatgtcagagtttagaatctgcctgcagttgtgaaaaagaaagcttaagtgatgcagttattggcaagattgcaatgattatggaaaaatagaaagcgaatactcagtttaagccaaggaaaatattgtggatttaatatttgataaaactgattttgtttaacaggaaatttttagcattcagtcatataacatctggttatcaatgcacgtttacacaataaatacttgagtggaggaaagttaaaaagatgagcaatagagtagaaaatatatcttaaactagttgacctagattgtattaatagctacttaagatgtttcaaagataggaagctattgcttggacagagaacttgaaataagtggacccatgtataaaagctttgacttaaacattgatatttcagaatgtgttaaatagattaagacacagtaagttaaccctacatgttataaagatggcgactgttaacaaaggctgtaacagattaagtactattttatatccagaaagtcttctctatgtagagaagtcagagagactagatgctttcactagggaatgtcttcccacccagccatcacaaatgtggacaatcactgcatccacatctgtaggcatatttctatggaagtttaattgacagctatattcattatttattttacaatttcatttttctacacctttgagatttatgaatgcagttttttcttaaaatttattttaacttgacagtatgtttttagttcccccaatttaattaatggaccatgtgcatatatatgggagtgtgcttacatgttaataatttacttgcatacttatgagaatttcacattggaattcataatggtaaaacaacatacatctgccaatatacgttttttctgttggtttaagagaagataactgacagctttacctacttcctacagatgcatctaaacccagatattactgagaagagtgtattgactctgagtgtaagagagtatgtgtttttttgtttttagttctgctctagatcataattgtaaaaaatattaagtcataatctgttacactaaaatttgtcagccaaatgttagatgaaatgtctgcactgtagtctcagatcactgtcacgtatataaattgcttcttcattttaatttgtagaagtactttacagtaggaaacgccagtaaacaacttttatactgttaaaaggcttttttccccttcctaaatgttttaattgtaccatagtgttttgctcactgaagaagcttcttatggaccttgcaactttgttgctagcttgaggttgattattgtggttgtattgttcactgtgtgtagaaatagtatgagtacgatttcaatagactgttcagtttttaatattagccatagcactggttagtatatctcagtagtttcatgaaacgtttcctgtattctaatctattttgaaacattttgtttttttttaattgtgtcttacagtcaagtttgtagattttcataagccacaattttaaaagatgcagtaatcttccaacttccaatatttatccattcgttgtggacccacagattgcatctttaaattcataataagtttccttaactatcttatgtttctagtctttcaagcttagtgataaggtggaagcacaagaaaaatttcagtagaatacagtttttattttgtaaacactaatgtattaaacttgctatacattaaagcaaataatatatatttttatttgaattgtatatgtgaattggaagttataattagttgattttttcattttgttagaggtattttcactgaacaaggtcaattggttacctcagtattacagccaatatagtccaagggaccatttctccccgagtctcttacactttattgtgcgatgtccacgtttttgtgactcttcaagctgttggtgaggtgggacgaatgcacttgcttcctgtggcaataaagattttctgtgcctcacaaaaaaaaaagtt

SEQ ID NO: 241113 - DNA, 437 bp, Homo sapiens
gcagtgagctatgattgtgccactgtactccagtgtgggtgacagagcgagaccccatctgtattagttcattctcacattgctattaataactacctcagactaggtaatttataaagaaaagaggtttagttggctcacagttctataggctgtataggaagcatggctggggaggcctcaggaaacttacaagcatggtggaaggtgaagagaaagctggcacatcctacatgcctggatcaggaggaagacagcggcaagggggagttgctacacactttcacacaaacatatctcctgagaactctatcatgagagcagcaaggtagaagtctgccctcatgattcagtcatctcccaccaggtccctcctccaacaattccacatgagatttgggtagggatacagagccaaaccatatcaccatctatca

SEQ ID NO: 241114 - DNA, 599 bp, Homo sapiens
gtccttgcagctgaaggagaaatgaatgcttccaaatccctgaagtcagcctccatggtgctggctgagtctcccatagctctccagctgcgctacctgcagaccttgagcacggtagccaccgagaagaattctacgattgtgtttcctctgcccatgaatatactagagggcattggtggcgtcagctatgataaccacaagaagcttccaaataaagcctgaggtcctcttgcggtagtcagctattgcatagagagtggtgtctattcctatggagaagccagtagttagaaacggtgagaattccaacactgttcatgtaacagtaactccatagatggaagagcattggcaggaaaaagctctagaggctatacagagaagaaaaaaagagcaaaaatgagacctgtatattacttttatttttaggaccataatcaactttgtaatattcttatataattaattagtggtggtctccgactttatagcaggaactttctggtagtatgagaagaaatcattgggtgactatgactaatgtttcagaattactttttaattgttttaaaaagcactccagataatttatagag

SEQ ID NO: 241115 - DNA, 482 bp, Homo sapiens
ttaggggttgggaattaagtctgtcatcagtgagcattctgacttggggcaaatcattctttgatgttccttttatctataaaacgagggagcctaacaggttgatcgctaatgaccctttcagatataaaatccagtgaatcaatgaagtgtgtcttcttagtacttcttaataacgtttggaagatacgttattaagaaagaagatagaaattaaatattcctgtttttcgctctttgaaattactttttttctattatggtgacataatagctgagacttaatacttattcgtatacagtttgcttacagtgagtttcagtgtatataataacttactgaaatgaaatatccttcaggatctaccactgatttgagacctgaaatgttctttatttttcatgtgccttaagggtttttcttgtacaaaaaaaaaaagcacatttaaaattataacgtattattttattattatttattt

SEQ ID NO: 241116 - DNA, 1947 bp, Homo sapiens
  misc_feature (918)..(918): n is a, c, g, or t
tcaaacatgtgacaacattaagcaccctggtagaggcaagatttgccaggcggctctcacatacccctgcctcccacaatactacccccgcctcccatgatatgatgagatgacaaggcactttacctctgcattatactccacaaaacccgtaatcccagacaatcatgagaaaacatcagacaaacccagatcagcagacattctacaaaacaccgagtccttcccaacactgtccacggaatgaaaaacaaggaaaatctaagaaatggtcacagacgagagaagactacaagaggcatgatgactgaatgcaagggtctcactctgctgtccaagctggagtgtggtggtgccatcatgactcactgcagccttggcctcccgggctcaggcgatcctcctgcctcagcctccagagtctctgggactacaggagtctcgctctttcgctgaggctggcttgcaatggcacgacctcggctcactgcgacctctgccttctgagttcaagcgattctcctgcctcagcctcccaagtagctgggattacaggagaaaagactgcagaaccacacaaggctcacgctgcccagggagaacgtcatctcagttcccatatgagtcccgatgaaaatatgacagagaaattctgtcctggaccacgagcatcttttcatcttcgtatcctagcagccagcaggcacttggtgaagaggctgctcaacgaatatacagtgacggttttacgggacaagagttacctgaggaacaactaaatctgccccatcaagcaattcttgacagagtgttgtcaccacacagaatcctcagtttgaaactaacacaaactgaaatgtgcaaaactgaatctgtttctttggggagcacaaaccagtagagcttctatgtgataanggaagatgctgcagtttgaccgagtttgccaaggagaagatgtccctgggacactgagctacttttttacacatacaggtcaagggtccacgtgtggtccttactgggcgccccctattctgccccgtgtgggaagcatgtgacttgatgctgtacatgtaaaacatggtttctgctcttaagaagtttacaggccagcagggaatggtaaaatgcgtgaggaagaacccctaggctgggcgcggtggctcacacctgtaatcccagtactttgggaggccgaggccagtgcatcacctgaggtcaggagttcaagaccagcctggccaacatgctgaaaccctgtctctactaaaaatacaagaattagccgggcgtggtggcacgtgcctattaccccagctactcaggaggctgaggctggagaattgcttgaacccaggagaaggaggtttcagtgagccgagatcgtgccactgcactcaggctgggcaacaagagcaaaactccgtctcaaaaaaaaaaaaagaaagaaagaaagaaaaaaaaaacccccgcaactccaggtggattggcactgactactgagcacaccatacatgtgcaaaggaagaaaaagggctgtgatgaagtgaggcaagctggggcctcaactggctgcatctggaatttcaacagcaagacaagaatggactagacagaccagtgttctcacccactgtttccatgatcactctcacaacagaaaaataaaattgacaagaaaaattactcaagaataaggctgggtatggtggctcgcgcctgtaatgctggcattctgggaggccgaggcaggaggatcacttgaggccaggggtttcagaccagcccgggcaacaaagcaaatccctgtctctacaaaaaaataaatttaagttagccaagcgtggtggagtgcatctgtagtctaagatacttgggaggtcaacgcaggaggatcacctcaggccaggagttcaagaccagcctgggcaactccatctctac

SEQ ID NO: 241117 - DNA, 1940 bp, Homo sapiens
  misc_feature (918)..(918): n is a, c, g, or t
tcaaacatgtgacaacattaagcaccctggtagaggcaagatttgccaggcggctctcacatacccctgcctcccacaatactacccccgcctcccatgatatgatgagatgacaaggcactttacctctgcattatactccacaaaacccgtaatcccagacaatcatgagaaaacatcagacaaacccagatcagcagacattctacaaaacaccgagtccttcccaacactgtccacggaatgaaaaacaaggaaaatctaagaaatggtcacagacgagagaagactacaagaggcatgatgactgaatgcaagggtctcactctgctgtccaagctggagtgtggtggtgccatcatgactcactgcagccttggcctcccgggctcaggcgatcctcctgcctcagcctccagagtctctgggactacaggagtctcgctctttcgctgaggctggcttgcaatggcacgacctcggctcactgcgacctctgccttctgagttcaagcgattctcctgcctcagcctcccaagtagctgggattacaggagaaaagactgcagaaccacacaaggctcacgctgcccagggagaacgtcatctcagttcccatatgagtcccgatgaaaatatgacagagaaattctgtcctggaccacgagcatcttttcatcttcgtatcctagcagccagcaggcacttggtgaagaggctgctcaacgaatatacagtgacggttttacgggacaagagttacctgaggaacaactaaatctgccccatcaagcaattcttgacagagtgttgtcaccacacagaatcctcagtttgaaactaacacaaactgaaatgtgcaaaactgaatctgtttctttggggagcacaaaccagtagagcttctatgtgataanggaagatgctgcagtttgaccgagtttgccaaggagaagatgtccctgggacactgagctacttttttacacatacaggtcaagggtccacgtgtggtccttactgggcgccccctattctgccccgtgtgggaagcatgtgacttgatgctgtacatgtaaaacatggtttctgctcttaagaagtttacaggccagcagggaatggtaaaatgcgtgaggaagaacccctaggctgggcgcggtggctcacacctgtaatcccagtactttgggaggccgaggccagtgcatcacctgaggtcaggagttcaagaccagcctggccaacatgctgaaaccctgtctctactaaaaatacaagaattagccgggcgtggtggcacgtgcctattaccccagctactcaggaggctgaggctggagaattgcttgaacccaggagaaggaggtttcagtgagccgagatcgtgccactgcactcaggctgggcaacaagagcaaaactccgtctcaaaaaaaaaaaaagaaagaaagaaagaaaaaaaaaacccccgcaactccaggtggattggcactgactactgagcacaccatacatgtgcaaaggaagaaaaagggctgtgatgaagtgaggcaagctggggcctcaactggctgcatctggaatttcaacagcaagacaagaatggactagacagaccagtgttctcacccactgtttccatgatcactctcacaacagaaaaataaaattgacaagaaaaattactcaagaataaggctgggtatgtacaatttcaacttccggagataatgccataccagttttcaaagtaattctatacttcccagcagtatataaacattcaacatgcattatgtacttgccattcattgtatatttaggttatccatgtgtttcccattcttcatcacatcctgttgagctcattcccctctttctgagattcacatttacatagttcattgtctgtactgcagaatctgtgcagtgaata

SEQ ID NO: 241118 - DNA, 487 bp, Homo sapiens
tgttatacccaaataatctggttgcgaaactaaataattcaaatttaagataatttgaatttacggctgttggaacttaaattttcctaagcctcgaagaaatgtgactatgcagcctgcgtcatgctcatgcagctgcaccttttacccttttttttctgtaaataattacgaccaaatggcgccagagataagacctccctcagatcactacccctccttacagagtaataaagtaatcttgctgggaatgtagcaacttgtaaccaactaaatcactgtggcatatgcacctggtcttgcatggaaaatgctgtaaccctactggaacttctccgtctctggaagtgacagatttcactctggaagtgaaatcttaactcctccactttggaaacattgactccattcatctagagtcggtgccttcctgggtggccatacccaagctttgtgctcaaataaactctgtacttgatcgtatttt

SEQ ID NO: 241119 - DNA, 322 bp, Homo sapiens
aggaaaaggagaaattttaaaaatcttgtggtggtacagtcttcctaggtataacacaaaccatggaaatcaaaaagagagagattgatatattaaatttccaaaaacaaaacaaaacaagcaggtttcatggagcccgagtccatgaaagcttcatggaccaacataaacaaagtcaaaagacaaacaatgaattgaaaatcacacataaaaaccaaacgactaatatccttaatttataaagtattctaataaattagtaagaaaagatcaataacataatgaaaaaatggaataaaggtataaacagacaattgacaga

SEQ ID NO: 241120 - DNA, 352 bp, Homo sapiens
cactagttttagaagtttcaatagcattttgttacgcaccaaattctattaaaaaaataaaactgaactaatattttagcaaacatagggttttaaattcatcttaggacactaatataactcttctctcatggccaaaagagaactataatttgaacttaggtggaattaaatagatcatttaatatatttgggggaagaatcaagaaagctaaaattaacagcctcccaaaaagttatccataggctcactctggctttgccagtggaaggctaatgttagtctatatgtattatgttcttggctgtgtggcatgctattgaacttctaaactaggggtccggctcgatc

SEQ ID NO: 241121 - DNA, 1217 bp, Homo sapiens
caataagatttagtaactgctttcagtgagcttggtcttaatatggaaaatggtaaatacattatcacatgattgaaagtaataactcatataaaatgtaagcacttcatatctctcaagtacagctggagggattggtcaaagcttcttcaggaggtggcttttgagttggaaactgaaaggtgggtagaatttggtcaagcagaattaaagaactgaggggaagggaacattccagttagaggaaatattgtgcaccactatggaagtactggccttatatgataaggataaagttaaatttggtaggtgtataacatttgaagacaggagaggagagcagttagattagagacagagattctagaaaggtactgaagcctgaattaggcaatggggatgagataggaattacaggattttacaactgattggtcatgataggggagcagtcaaacttgactccaaagtgccaaacctaattgactgagggaatgctggtactgttagaaagtattagtgaaagaattagtttgggaaggagaaagtagtgatgaggtttttgtttttagctgttttttggatgagttgataagctggtacaaagtcaaggtgaaaatatttggggtgcagctgaggctgcagacttgcaggttggtatagaaattaaagctagttgagatttaagaatgttttattagagttcaagctttaggaaaggccaagattgccaaggattagagtagggtaaagggtcaagccaggaccttaggcaataccacctgcatttagataacagaaggaagtctgaagaggatgattggttttagagattagaccattctgaggatattattttctaatcaaaaagaagagaaaggtctgaatctttaatttgaaataatttcaaatttacagaaaaattacaagaatagtacaaagaactcaatcttcttaccaagattcagtgtttgttaacattttgtcatatttgctttatcatcctaacatattattttaggaaccactaacaaggtgaaaccccatctctactaaaaatacaaaaattagccaggcgtggtggcaggcacctatagtcccagctactcgggaggctgaggcaagagaatagcgtgaactcaggaggcagagcttgcagtgagccgagatcgcgccactgcactccagcctgggtgacagagtgaggctctgtctca

SEQ ID NO: 241122 - DNA, 435 bp, Homo sapiens
gcggcagagaggcctagtctgtaaggcggtctctggcccgggtggggctgggaccggcgggctcccaggaaaactttgtacaattggaagtcagggctcctcccattctggaagccctgtccaaacccgcgcctgggggtatgcgcgtgagtgtacgggggaaggccgggcctggcgggagaaaccaggacaggcgccttgagtcggcaaacggctcccaggactgtgctgagcaccgcgaggggacctgaggcaggccccggagaagcccatcgtgccattaattgattctttggaaacattccactggggttgctgaggtcctggcagccggtgaaaaatcaaaggcctctgctgatggaatcccagtcaagaaataatggaatgacgttattgtatgttgaaggttttcataataaacagtttaataaacga

SEQ ID NO: 241123 - DNA, 700 bp, Homo sapiens
cagtctgccattgataggtgtttatggtgattccatgtcttttctattgtgagtagtgctgcagtgaacatgcatgtctttgtatctttatgatagaataatttatattttttggggtataaacccaattatgaggtgcctgggtcaaatggtaattctgtttttagttctgtcattgccacaattcttttcacaatggttgaattaagttatactcctacaggcagtgtatatgaggcaggaaatataaaaggaaaaacaagtaaagggaaaacaagtccttccctgatcagtctgactcactccaaagtcctgctggagctatgataacattatctgcaaggccaggcagggaccccaaaagaatgggctccaggagcagagatgagaaaaacaagttctccttatcagtttccgccttgaaattctttccccataccattattctttgttctgctctcacaactatttttgtaactatttctgcaagtttgcaaagatttcataagttcctgtttttctttctgtagcacggcaaggtcacaagacatgcttaagtaagatagggtcatgttgcaaatcctgttgtaaaacctgtcacggtatgattaactgtctttgttctgcttctgtaagactgctttcctgtctcacaggtttcatgccaaaaacctgacccgcccctgttggttgcatgtat

SEQ ID NO: 241124 - DNA, 369 bp, Homo sapiens
tttaaaaaaaaaaaaaaaaaaaaaaaaagatactaggaggatatatttaaaagttttcgtggtaagaaaaatagcaaaaacgtaagatttttcaaaagaaatgttgcatactagtatttgcataatgactacatgctaggagggattttaagtgaaaataaagcatgttgaagaataactcatatagttatgaccccatttttctgtttaagataaacttgtggctaggtgctgtggctcatgcctgtaattccagcactttgggaggctatgacggaaggattgcttgaggcagaggattacttgagcccaggagttgaagaccagcctgggcaacatagtgagaacctgcctctttaaaaaaaaaaa

SEQ ID NO: 241125 - DNA, 648 bp, Homo sapiens
ggtatttgctggctcctcggaacaagatgccaacttggctaagcagttctggatctcggcgtcgatgtatccccctagcgaatctcagctggtgctgcgcagagacagcagtcagcgtctgccggtggcgcggcccaggaggagcagagggtctgaaaacagccactcctcgcagtcttttcaccttgcgagtaacaaaaatagagacatctttgccgaagccctaaagatacaggaatctgaggagaaagtaaagtatctccaaaaggctaaaacaagagaagagattctccaactcttaagaaaacaaagagaagaaaggatctcgaaagaactgatttcccttccgtataaaccaaaagccaaagaacacaaagcaaagaaagtggtatcagagtcagataaagaggaccaagaagaagtcaaaactttggactaatttgcttgacacatggcagaggatggctcacttataccttcactttggaaacaaccttctcttagatcaggatcattgagatcactggcaacattatagtagacaaagaaatacaagttaaatacgcagacttccaggaattttaccagttagtgagtacttgtgttaaaataaagaaataaaggttaaatatgcaggcttctatgaat

SEQ ID NO: 241126 - DNA, 729 bp, Homo sapiens
ggtatttgctggctcctcggaacaagatgccaacttggctaagcagttctggatctcggcgtcgatgtatccccctagcgaatctcagctggtgctgcgcagagacagcagtcagcgtctgccggtggcgcggcccaggaggagcagagggtctgaaaacagccactcctcgcagtcttttcaccttgcgagtaacaaaaatagagacatctttgccgaagccctaaagatacaggaatctgaggagaaagtaaagtatctccaaaagacaaggtctcactctgtcacccagaatgaagtgcagtggcatgatcatggctcactgcagcctcaactttctcggattcaggctaaaacaagagaagagattctccaactcttaagaaaacaaagagaagaaaggatctcgaaagaactgatttcccttccgtataaaccaaaagccaaagaacacaaagcaaagaaagtggtatcagagtcagataaagaggaccaagaagaagtcaaaactttggactaatttgcttgacacatggcagaggatggctcacttataccttcactttggaaacaaccttctcttagatcaggatcattgagatcactggcaacattatagtagacaaagaaatacaagttaaatacgcagacttccaggaattttaccagttagtgagtacttgtgttaaaataaagaaataaaggttaaatatgcaggcttctatgaat

SEQ ID NO: 241127 - DNA, 843 bp, Homo sapiens
ggtatttgctggctcctcggaacaagatgccaacttggctaagcagttctggatctcggcgtcgatgtatccccctagcgaatctcagctggtgctgcgcagagacagcagtcagcgtctgccggtggcgcggcccaggaggagcagagggtctgaaaacagccactcctcgcagtcttttcaccttgcgagtaacaaaaatagagacatctttgccgaagccctaaagatacaggaatctgaggagaaagtaaagtatctccaaaagattacaggcaccatagtgtagtagattttggagacaacaagatgggtttggaagcctaactctgccacttactatttgtgtgaccttgagcaagtggtttaactcctgggatgctcagcttcctcatatataaaaagagaaatgattttttttaatatcctcctcatagagtgatgtaaggctaaaacaagagaagagattctccaactcttaagaaaacaaagagaagaaaggatctcgaaagaactgatttcccttccgtataaaccaaaagccaaagaacacaaagcaaagaaagtggtatcagagtcagataaagaggaccaagaagaagtcaaaactttggactaatttgcttgacacatggcagaggatggctcacttataccttcactttggaaacaaccttctcttagatcaggatcattgagatcactggcaacattatagtagacaaagaaatacaagttaaatacgcagacttccaggaattttaccagttagtgagtacttgtgttaaaataaagaaataaaggcgtggcctcgttggcctcagcggtggagctctgcggccg

SEQ ID NO: 241128 - DNA, 408 bp, Homo sapiens
cacttctctcacatacaagtttatacttggttgcaaaacccaacacatagaatctacaacagtgaatttttattgggagaattttcaaaagttgttttcatgctacatcatgttcacaatggcggagttctgtgtattggaactgactgatattactaccaacaggaaagtggtatcagagtcagataaagaggaccaagaagaagtcaaaactttggactaatttgcttgacacatggcagaggatggctcacttataccttcactttggaaacaaccttctcttagatcaggatcattgagatcactggcaacattatagtagacaaagaaatacaagttaaatacgcagacttccaggaattttaccagttagtgagtacttgtgttaaaataaagaaataaagg

SEQ ID NO: 241129 - DNA, 680 bp, Homo sapiens
ctatggcctctaccccaagagtcattacttttaaaaatgcaattcaaattagcataaaacatttacagcctagggaaaggcttatggcattagaatccttatttataggattattttgtgtttttttgagatatggtctctgtctgtcatccaggcagaagtggagtggcttggtcataattcactgcagccctgaactctgagtccaagccatccttgtgccttagtctcccaactagctggatctacaagcataagtcaccatggctggctaatttaaaaaaaaaattttttttgtcgagattatgttatcactatgttgctctggctggtttcaaattcctggcctcaagtaatctttctgccacagcctcctatagtgctgggattacaggcatgagccaccatgcctagcatagagtattacattattttcaaagtcttattctaagagccatttattgactttggcctaaataactcaatattatatctctgaaactttttttgacaaattttggggcatgatgatgagagaaaggggtttgaaactttctaataagagttaacgtagagccatttaaggaggaacagacacaaattatcagaaaaataaaagaaagatcaagtgcaaaagttctgtggcaaagatgatgatagtaaagaatatatgtgactta

SEQ ID NO: 241130 - DNA, 2294 bp, Homo sapiens
  misc_feature (1754)..(1754): n is a, c, g, or t
  misc_feature (1926)..(1927): n is a, c, g, or t
  misc_feature (2065)..(2065): n is a, c, g, or t
tatataaaaattattactttaaaaatagctgcataatattttatagtaactacgtgccatgatttatctaaacattccactactgatggattaacagattgtttccaattttttggaaacaatgacaaataatgctgcagtaagaattcttggacatatgctcttgaatactttctgtggcatagatttgttttggcttgctggctgaaattgtaagagcatttcaaatttaatagatattgcgaattttccttccaaaaatgtatagcagtttacattaacaataccagaaaggggtcatcattctcctgaatacccaacagtactgaatatattgctctttagaaatttttgccaggctgatgcatgaaaaattctatcttgttttagtttgcatttctctgactactgctgagattaaacatgttttagatgtttatgaatcctttggatttcttcttccatgaattgtctaattatgcatgtggctgtgtatgtgtgtatatgtgtatgcatctgtatgtttgtgtgtgtatgagatcaagtgattttcctattgggtaggttgtctttttgaaaatctagtgtaaaggtgcattagttaaaatcaggcctagctgtataaataacagaaaattacaaaataatattaaatatatttctctttcatgtaaatgaagtccagaggtacaaaggttaaggactgatatggcagctctgccccactaagtcctctgggtcttaacttcctaccagctcatttttctgctatttctgtgtagtggtccttgttttcatggtctcaggtggcagcttctgtttcaggaagcaggatggaggaaggactgaaaaggaacaaaggccaaaggcacaatgtctctttatatatatgtaacttaaattgtaaaatataatgttcacatagaaatataatgtttacacagaaactgtaccacaatgtatagttataaaaattattttaaggaaatgtccatggagcctcccctcaagtgaagaaacagagcattggaatttcagaagcccgcttttcctttctaatcacaactctccctagaggaagtctccctctagacctagagattactataattctgactttatggtaatcattgccttgcttttctttaaagtgtttcacccaagtatgcatttctaaatgacatagtttgcctatttttgaatcttggtgtttgtgttactttggttcttgcttcttctattcagtggatgtttattgtatatgatgattcaatttcatcaatttcattcgatgtattatatatgatgatttcagttatatatgatgattattaaataggatacaatagtatcctgttgtataaacatacttcaatttatccattcaactgttgatggacctttggattattctaattcttgtatattacaaagaatgctgctacaatatccttgtacatgtatcctagtacacatacatgtttctctggaatatagatttaggaaaatgttttggattattgagcatacatatcttcacatttattgactaacaccaaactgttttcctaagtgattataccgattcacccatcagtaatgtttaacagtctgtactgctctatatcctcaccaactcttagcaatttcatacttgaaaatgttgagatctagtagatgtctagttgcagcaaaggctggaagatgcagtgttcattctgaacagttatgtgcatagttactatttggaaatnctattattaatataagaaaaaaacatatattgggaaatacacagcaatctctgccacattcagaatactaacttaaaaatagctgccaggctgggcaccgtggctcacgtgtgtaatcccaacaatttgggaggctgaggcaggaggatcacctgaggtcagaagttcaagnncaacctggccaacgtgatgaaaccctgtctctactaaaaatacaaaaattagccagatgtggtggcaggtgcctataatcccagctactcaggaggctgaggcggggagaatcgcttgaacccgggggcagaagttanagtgagccgagattgtaccattgcactccagcctgggcaacagagtgagactccatctcaaaaaaaaaaaaaaaaaaaaattaaccaagtgtggtggcacgcacctgtaatcctagctacttgggaggctgaggcaagagaatcacttgaactctggggggcagaggttacagtgagcgagatcatgccactgcactccagcctgggtgacagagtgagactctgtctc

SEQ ID NO: 241131 - DNA, 208 bp, Homo sapiens
actgttctctcagctttgaggcagactaagaaattgtcatctggtttagaaaagaagaatatctttgatgtaatagaagatgtgatgatggttgttttcaaattaaataatttagttttattttaattaaatattcagaataatctggaaaaattggagaactgaatctgtgcagttgattgcagtattatgtactccaaagctaggg

SEQ ID NO: 241132 - DNA, 312 bp, Homo sapiens
ctcccaaagtgctgagattacaggagtgagccaccgtgcccagcctggctattttttttctttttttggtagagatggggtctcactatgttgcccaggctggcctcaagcaatcctccatccttaaactcccagtgtttgggattactggcgtgagccacggtgtgggcttaccttgaccctttctcatccctgagggcatccctcggccattcactgtcaaaacctgtcatagattcactgataacttgtccaacagatttatttcaagtctgcactacctcacccctcaagtgtttcaagtctcgaggc

SEQ ID NO: 241133 - DNA, 249 bp, Homo sapiens
atctttgtgcctaaacattaatatgcttttgaactaaaaatgatgcaatcattaaaacttatttatattaatatatcttgcttattcatagtgaactataagaactgaaatgccaaacaaacctgattacttttatcatctttctttcatacaaggaaggaagcaatcattttggtatctggtagacatttccagaaatctgcagatatttattattctaaagttggtgactgaatttgagacacacac

SEQ ID NO: 241134 - DNA, 477 bp, Homo sapiens
tatgatgttagatgtaggtttttggtagatgccttttatcaagttgaagttcacttttattcctagtttgctgaggtttttatctgtattgggattaaattttgtcacatgctttttctgcatctatggagattatattgttttcctctttaattcagtcaatacagtgaattatatttttaaaagaatgctaggctggacacatggtggctcacacctgtaatcctagcactttgagaggctgaggtgggaggattgcctgagctcagcagttcgagaccagcctgggcaacatggtaaaaccccatctctgctaaaatacaaaaaatcagccgggcttcttggcacacgcctgtagtcccagctattcaggaggctggggcacgagaattgcttgaactagggaggcggaggttgcagtaagtcgagattgtgccactgcactccagcctgggcaacagagcgagactctgtctc

SEQ ID NO: 241135 - DNA, 246 bp, Homo sapiens
tcagatgctagtaaacgtgagtgttacctaatattgagtttaaatgtgccagagccaacctggtacgaataatattaaagctaatgtcataggcatgcacctgttaatcagctcatctcatgacaagaaataatgttatttggtgtgtgaaaaataggtaggtactaattataccttgcatatatgttattcttggtagaaatcatataaagttacatgaaagaaactactatgtagcttttgagg

SEQ ID NO: 241136 - DNA, 482 bp, Homo sapiens
ctggtcttaaaatttgatgactgtttaaccaaatgggaactgtttttctgaaagtgctttagggcaatcagtgctaatgcttttacatgcttactgaaagtagaaacctaggcatttgatcagagtattttctaagagatagaaaatgtttaaaagtcagatgataagcttgcataagcctcaagggtgacacaatttagtattcctaaataaggacttagtgtttcttgcagatgaggatattgcaataggaagctatttgacataaaaataaagtgtgcgtgaagtgtgctgtatcacttttgtgtaaactctctttttgattttcttaagcagaaatggctgagattgggtttacatagtctcttaaaatcaaagcttgctttactgcatagaataaaatgtgtttctctgactgactagtactgtataaaatagcctacctctctcatgcaaaaactgatattggacagaagatggaa

SEQ ID NO: 241137 - DNA, 460 bp, Homo sapiens
tagtccattttgagaatgaaaaacatgatgacactttaaatcatacactcctgagaaaaatgggcagattattcacaatgatcatttctaataagaatggaaataaaaatcatcatacttgaccaatttatgatatatagaaaacactgcatcatgcaactactaattcgccatcactattgactttgcagaagcccatttcaaagataagacaccgtatccccagaacaagtgggatagatgtgttttctgtaaaaataattccttccatttatgcccccctaagaaaacaagtagattatgttttttcccttgaactgctgttattgctttttaaatatgtatctctcctcccaacattgtagaggtatgactaaagtcctatcatagttgagaatgccccagaagtaatgagtaatacaatccctgtcccattgcctaagcaactacatgcttttct

SEQ ID NO: 241138 - DNA, 466 bp, Homo sapiens
agttttgggggtacaggtggtttctgattacattactaacctttgttacacttatactcactgcatattcttgagggaagaccccttcattgtatgtacctaaatgttaccactctatagagtattcctgatacctttgtgtagctccagtgatgtttcatgtttcctttagagcatttaccacactgtgccttaaaatataatgagttgtataattcattctctttccccactagattgtaagccccttgatgacatggctcatgtcttatttaattaggatgttttgatggttgtctaatataagacaggaaatacgcaaatatgcacacacacatattttcatttactcagcttcagtatttacttttgagtatataacactgctacattcatttctatgaggatatatataatgaatgtatgttctgtgaacatatcttcaaataatttacatctacaagga

SEQ ID NO: 241139 - DNA, 433 bp, Homo sapiens
acatggaaaggatatagtggtgtgtgagagcaatggcttttatttacttctctgctaacctaaattcatatttatgtaattttgttaagagacgcttaaatgaataaaaagaatcatggtactgcatggatataccatactatgagcactgagtatatgctcctttctgcatgcagtaagcagaaaatgttgagaaatatgagaaagtgaagttagggactttgttaagtggccacatacactctgaaaattttttttaattgccttaaatctgagagtcttctggaaaaaagataaagcagcagtcatttttaaaaaatgaaatttctgtctgggtggggtggctcacacctataattccagcactttgggaagctcaggagtttgagatcagcctgggtgacataacaagacctcttctctactaaacata

SEQ ID NO: 241140 - DNA, 274 bp, Homo sapiens
tagatacaatgctgattgtactttctaagcagaaagaagcaattacaatagacattttggttagaagatggataatacaaaaattcaggagctggccatgttcattagattcctagaggactggccgggtgcggttgctcatgcctgtaatcccagcactttgggaggccgaggcagagaactgcttgaatccgggaggcggtggaggttgcagtgagccgagattgcgccactgcactccagcttgggtgacagagcgagactccattaaaaa

SEQ ID NO: 241141 - DNA, 510 bp, Homo sapiens
aattatacactgcaatgaatatcctctttttgtacatgtgcatataattctctgtgaaaggttttttaaaaatggaattcctggttcaagggaatatatacatttaatattttggtagatattgttaaattcccctcaaaaaaagctctaccaatttaaataagtactgatagtattttaccattttaatttgcatttccttgtggatgtggtggagcatcttttcatgtgtttcttcatttttattttttcttttgtaaattgttgttcatattctttcctaatttttcattgggttgttgattgttttcttagtgacttatgggagccttttatacattctatgagaaagaacaatgcagcccctccctgacaggggtcagacaggagttagcctgcgcctagcacctaggtccaggtgtttcctacctaacacaaactcagagaacttcagcatcagacaggcccattctgtgactgtgacggagcaagacaaaaatatgaccactc

SEQ ID NO: 241142 - DNA, 255 bp, Homo sapiens
catccaggtgattcccaggataacaggaggctgtagctgtcagctgagtttgcacagaagtgggactgttgggccagaagctggtgccaagctccatctggcgaggggcaggtagagcaatcttactgctcccaggcaccatgactgtggtctctattgaggctatggcactggtactggtctgctctggggtctcaggcctggagaggtccccttggactcaagagttgcccctgcgaaatgtccaggtggttc

SEQ ID NO: 241143 - DNA, 417 bp, Homo sapiens
agggagctggctgtgtccatagacaggggccaggcctcggtggagctcgccaggtcatagattccatctgtgcttgcagagttgagcagaccccagggactgagctgctctcatcaaatcccctagacactaaatagtgatcaatgcgtgcttctttccaagagacttaggcccctacgtggaaacaaagtccaaaaagcctgtctgtgtaactgagcaggagaaacgccagccagaccagagaccagcaagatcacagagaaagtggcacctgctgtcatccatcctgggaggctgtgtcctcccagagttttacaggctcatagccaccagccctttctctggacttggatttaaaacaagttgttagtccagcttcatggtagggatgaagttaaagcacaaatgagaccgaca

SEQ ID NO: 241144 - DNA, 2095 bp, Homo sapiens
  misc_feature (191)..(193): n is a, c, g, or t
  misc_feature (221)..(221): n is a, c, g, or t
  misc_feature (224)..(224): n is a, c, g, or t
  misc_feature (228)..(228): n is a, c, g, or t
  misc_feature (233)..(233): n is a, c, g, or t
  misc_feature (620)..(620): n is a, c, g, or t
  misc_feature (1063)..(1063): n is a, c, g, or t
  misc_feature (2044)..(2044): n is a, c, g, or t
gagacggagtctcgctctttcgcccaggcaggagtgcagtggcgctatcttggctcactgcaagctccacctcccgggttcacaccattctcctgcctcagcctcccgagtagctgggactacaggtgcccaccaccgtgcccggctaattttttgtatttttagtagagacgggagaattgcttgaaccnnngaggtggaggctgcagtgagccgagatngcnccantgcantccagcctgggcgacagagcgagactctgtctcaaataaaagtggagttacttttgtgcagagtttccactcccctggtaagaacaaaatacttgtgtgtatgagacacaaatatcaattctgtaatttctaatttcacataagaggtaaaggctcttatgtttgtatttaaaatgatcattacaccaggcctggtggctcacacctgtaatcccagcaccttgggaggctgaggcaggttggatcacttgaggtcaggagttcgagaccatcctggccaacatggtgaaaccctgtctctactaaaaatacaaaaattagctgggcttggtggcgcacgcctgtaatcccagctactcaggaggctgaggcaggagaagctcttgnaactgggaggcggaagttgcagtgagctgaaatcacacccctgcactccagcccgggcaacaagagcgaaactctgtctcaaaaaaataaaatgatcattacacaatatgaaaatgaataataaaattcatgctaacaattttactttacttagaatggcattaagtagcaaaatttaaaaccacgaccagttgagaaattgttaaaggatggaaaaagctttatagttagtacctttaacctaatttttccttttaatttttttttctttttttgagacagggtcttgctctgtcaccctggctggattgcagtggtgtgatcacagctcactgcagcctcagcctcctgggctcaagtgatactcccaccttagcctccctagtagctgggactacaggtgcacactactccacccagctaattttcaaatattttgtagngacagcgtcttgctatgttgcttagggtggtctcaaactcctgggctcaagcagtcctcctgccttggcctcccaaagtgctgcgattacaggcatgaaccaccgcacccggcccaaggagtttgccttttcattttgcactgggccctggatattacatagctgaccttgtcttcaggactaggaaaaggaccgatagaatcctgtgttccttttgaattaatctacatttctttgacaacaagctggacataggcttcatgaagtacagggggctccaggaatactttgttctgaaatccaagaatcctcactgtatcctttacccaagctctggcatatgtcatcatgactttggttcccttggggcaaagagcatacttttggcctgaatggacattgagtgtgggggtgcttaacacctctgaacaggtcttgtccacttttgagttggagggcaggtcagctaggtgtgcacttccaaaagagccctcactgtccaaggtgcagttgtaatccaggaaggaaatgaggtccatgatgtgccactatgtggagaactcacaggttatcacaacactgaaactcttgatgaatgattactggaggagggagtttacatcgtgtcaggccctacactatggagtgtagggatgccacccttggttcccattgtccaaaaacaaaacccaggaacttccacatcttactgtccttcacattggtgtggaaggctttgaagaatctgctgtcctgatgagcgccttgtctcaccacaaaaggctacaacagggatatggcatcaattggatcctcatccagcttgaaataaaccgtggaagctgcttttcctcaggacccgatagagggtgaagttctgggcttggtagagactgaagcagactggcacatcagtggtcacgactgcagtcaaagtgggagacacgatggtaaggaagatgccagaaccacctgctattnctcctagctctatcatacatgcccacatggcactcaagtatcctggtagca

SEQ ID NO: 241145 - DNA, 359 bp, Homo sapiens
tagtagagatgggttttaccatgttggccaggctggtcgcagtttcttacctaagaatttaaagtagggaaatatccccaggccaattatttaattcctgcgtatttaatttaacataggcatcttcatgttaattggctacaatggccagattcaagtcaaagagatttgattttcaaaaacaaggcataaaatacaatggagatatcaacaacttaagaaccctacagagtatctgacacaatgaccaaatgaaataagggaaatattggaattgaattactttttcataatcaccagccacctaaattcttgggtattgagaacaacttaaacatccttctttgatttagtttttt

SEQ ID NO: 241146 - DNA, 585 bp, Homo sapiens
ttagctcatcagctattgttagtgttagtgtattttatgtgtggcccaagacaattcttcttctaatgtggcccagggaagccaaaagactggacatcctgatttagatagaaccatccctggtatttataacttatgctaaaagaatgagattcctaggaagtatgcttggtaggtcagaatctgtatcagtccttcctacaccatgaatatctatttttattttgtagatttctaaatataagctggtaaaactgataattgattgcttaaaaatctaacaacaggttgttgcttcctttcctggcatatgctgacagtcaaaagagcaccctggtgagttccaattgccttgcaccagggaaacatgaatgtaggattgattccacaaatactccaggtcacaattacgcagttccctttcttccgtcatgatagccagttggcttgacatggaggcttggagccttgggcatggaaaaaacttccatagagcaaagcaccaaactttaatggagggctgagggctctactggggaatgctgcttgtagagaactgtactctaaatttgactgtacctgcta

SEQ ID NO: 241147 - DNA, 640 bp, Homo sapiens
gactagtgtccaaagagtgttttagtaaattagagtcaccgtgatcacagtgcagcctgattccaatcctgctgtggtgtttctggcaaatgattattttctggcagagcttcctctacatacagaccagatgcaacttgtatttttagaaaactgaatggttattctgaaattctttttaaaactacattattaaaaaccacataaactgtgttctttcctttgacctaataaatgatgataggaacaaaatctagtgtcagacttttcctcagtcatcagatcttcagcttatttctcctcccattgacttactagcaataatggcaatgagcattaagaacagaaaatgtgtcatcctgttggtcctgttttggattttcattaaccatgtgactgtagacctgtggcaacctgcactgaatgagccatgcagtgttgtgatgagcgttccgatctgtgtctcttggcaaaacacttggttggttgtgtttcccgtggtgaccaaagtactctcaccatgacgtgcgttcttaaaaaaccagagatcaaaaatgtaacctttgcaattgcacaaatcatgtaatatataacacatttaataaacagattatacatttatcatgtaatatatattcta

SEQ ID NO: 241148 - DNA, 360 bp, Homo sapiens
ccataaagcaagttctgagagtcgttttcttctctctttttctcctttcttgcttccatttctagatcctcagtgcattgcacatggactctcgatcctaaagggtccttggtggcttcaagttggttctgcccactctctacctcttctgcaaaggagtaaaggagtgctctgcaagacccagagacaactgttctgtagtttcatacaagaatggacttcgggagggtaggttaagtctggaccttggctctaccataaattgggggataggtgtcaaatttcctgtaggctatcactttcttcttctctgtatcattaggatactgtgaagatgggatcaagtgttttgccctcatt

SEQ ID NO: 241149 - DNA, 417 bp, Homo sapiens
tactgctcagatcacgtgcggtgcattcccagcacctcagagggctcctcattctccgtccactcagtgcgtccttctcccggggaagccgctgtcactcagtgcatccttctcccggggaagccgctgtgcagacttccagctccacagctttgtttttggcattacatttacagcattttccttctacagcaaaacaccttttaatattccattttatgaccagcctgagcaatatggagaaaccccatctctactaaaaatacaaaattagccaggcgtggtggcacctgcctgtaatcccagctactcaggaggctgaggcaggagaatcacttgaacccgggaggcagaggttgcagtgagctgagatcacgtcactgcattccagcctgggcgacaagagcgagactgtct

SEQ ID NO: 241150 - DNA, 565 bp, Homo sapiens
gccttgtgctgctctactcagggtggaaggcaaatgggcgctggtgtgtgcagagtaacaacaaggtctccaggaaactaacagagcaagaacccacttgctgccccgcccagggcagggcactgatctactcatgagggatctgccctcatgacccaaacgcctcccaactaggccccacctccaacactggggaacacatttcaacgtgaggtttggaggggacaaacatccacactacaccataatccaacattacagtatttattttgttgctcaaagtgttccagctttggacactgggagcttttcagccggctcccatgtccccctgacacacccccatccgcatgtgcacctgtgcagcctcaaagcacttcctggcattgcaaggtgcttcatgtacctttagggtatatttcccgccccagccctagaattgatcatttcctccagaagccctggtttacttttattggaaagtgccattaaaaatcaagatctggatggcaggtgtgctcattgtttcgcgggtctcacagcttctaggccctctccgctaatg

SEQ ID NO: 241151 - DNA, 525 bp, Homo sapiens
tggatcttgctctatcacctaggctgaagtgcagtggcgccatctcagctcactgcaacctctgcctcccaggttcaagtgattctcctgcctcagcctcccttagtccctagctgggactacaggtgcacactgccacacccagctaatttttgtagttttagtagagacagggtttcacccttcagaccagccgtgttggtcaggctggtctcaaactcctgacctcgtgatctgcccacgtcagcctcccaaagtgctgagattacaggtgttagccaccgcgcccggccaattttctgaatttttaaaatcatgaactgatgtgctttttgtgcatcaattgagatgatcgttttgaggtttttttccccttcattctattaatgtggtatattacattgatcaactttcctttgttgaactacccttgcattcctgggataaatcccacttcatcatggtgtatattccttttaatatgctgttgggttgggttcatcgctttttttgggagggggtgga

SEQ ID NO: 241152 - DNA, 514 bp, Homo sapiens
ctttgcagatgctgcagcttaatggccgagatcaatggcagaggtgacacctgggctccaccactaagcctggtctggtggaaagagaccaggctgagtcagggccatggcaagttccacgtggcacccaaaaggaggtgagtctgcccttgagtgcctccaaggtcacttagtctcctagagtcttgtgcagtgacagtgcccaggcagaaaggcgcccagaggaagcgtgtgtttattggatcagtcagacacatctaaggagcatgtggtttatgccatgtgctgtgctgcatgctgagagccatcagtgactaaattgcagttcctgccttcaagaagctctgtcacaaggcagaaacaagtaaaacaaaaacagtgatgctttggccgggtgcggtggctcatgcctgtaatcccagcactttgggaggctgaggcaggtggatcacgaggtcaggagatcgagaccatcctggctaacacggtgaaacgctgtctctactaaaaatac

SEQ ID NO: 241153 - DNA, 347 bp, Homo sapiens
tactattatttacttacctcagtctttacatcttagctccattttaccagaggctcaggtccaaaatctgggaggcattcttgattactccctttctcttcagaaccacatctaatcaatccatcagcaaatctttcaaaatatatccacagaagcctgtgtaggtggcccgtaactatagccccagcttgtcatagggtggaaggatctcttgagcccaggagtttatttaaggccagtctgggtaacatagcaagaccctatctctaattttaaaaaaatccataatcaccacttccagtgcctatgccctcacccaggccaccatcatctctcacttgaagtag

SEQ ID NO: 241154 - DNA, 429 bp, Homo sapiens
aatcaaggtgttagcagagctgtgtttgtttctggagcctctaggggaaagtctgtttccttgcctttttcagcaaagatgcaagtattctcttttttccatctttaaagccagcaagatagaatctctctgactctgcttccatcatctcatctcttttctcctgttctcttccgcatctgtctttcacttttaaagacccttgtgattactttgggccttcccagataacctccctattttcaactgattagcaaagttaattctgtctgcatccttaattcccatttcctgtgtatcttaacatattcatgggtttcagagattgtgactgggacatctttggggactattatgctacctaacataggcagaaaatgaaaagaaaaattcaaaccttaactgtattcagtgaaagctttaaaaaaa

SEQ ID NO: 241155 - DNA, 695 bp, Homo sapiens
tggctgacacctgtaatcccagcactttgaaaggctggggcaggaggattgcttgagccccggagttaaagatcagcctgggcaacacagcaagagcctgtctccacaaaaaaagaaaaaaaatgttaatgaaatgctacaattctgcttccaaccactagtttgaatgtaggtgcatgtgtttagtatttcaattttaaatatgattgtcttttaatgatagttttaaaagactggaggtttacttgtgcatgggcctgatgcccagcctgtgtgatactagttcattcctgatgagccatgactgtacccactaagccccttaaagagagggtactcttcctcctacttctctttctttgagttaagagtattaatagcacatgcattctagtccgtattcttgatgttaagacatgttggaaatgactgaggagcgttgtccctttcttgagcacacagacagttgctaaatgcagggcttgtcttaaattaatgttctctggtgtcttctattaccatctcactccatcattaaccccagtggtcttcatcctagacataacagtggtttgcactgtggcatccatgactttgctcctttttctccttcagctgcctctccaaccctctcacctccccctacaaagtctgggtatatttttgcccatttcttgcctagtgttatcaatact

SEQ ID NO: 241156 - DNA, 443 bp, Homo sapiens
cttaaaaattttcaaaataagttggggaaagtaataatagagaagtaaacagttcaagaaaaacaaacactattttatgcttattaaaccagttcctcccacctcactgtagtttgtgttttaaaataacttccagtgctgccaaggtcatggggaagctggtacagtgaattaccagtggcatgaccatggctcagcctgcataggccagcatgcagcaatgcttatcaaacatggaaacacttccatgctggctgaggcaggcattgccctaaggattcttttcaaggaattaggttgacaaaagtaaaaaaactatgcctgaaaactgaaaatgaaaacaacctaaatgtccagtaataagggttaggtttaggaaattttgcttcactactggatggactattatgcaagtattaaacatgggttttaagacttccaaa

SEQ ID NO: 241157 - DNA, 731 bp, Homo sapiens
cttcaatcgtggctcgaaccttgttcaacatcagagtattcacactggtgagaagccctatgaatgtaaggagtgtgggaaggcttttagacttcacctacaactttctcaacatgagaaaactcatacaggtgagaaaccctttgaatgtaaggaatgtgggaaattctttcgtcgtggttcaaatcttaatcaacatcgaagtattcataccggaaagaaaccctttgaatgtaaggaatgtgggaaagcctttcgacttcatatgcaccttattcgacatcagaaatttcatactggtgagaagccctttgaatgtaaggaatgtggcaaggccttcagtcttcacacccagcttaatcaccataagaacattcacacaggtgagaagccatttaaatgtaaagaatgtgggaagtcctttaatcgtgtctcaaaccttgttcaacatcagagtattcatgctggtgtaaaaccatatgaatgtaaggagtgtgggaaaggctttagtcgtgtttcaaaccttattcagcatcagaaaactcattccagtgcgaaaccctttgtatgtaaggagtgtaggaagacctttagatatcattaccagcttactgaacattaccgaattcatactggtgagaaaccctttgaatgtaaagaatgcggaaaggcctttggtcttctgacacagcttgctcaacatcagatcattcatactggtgagaagccat

SEQ ID NO: 241158 - DNA, 677 bp, Homo sapiens
cttcaatcgtggctcgaaccttgttcaacatcagagtattcacactggtgagaagccctatgaatgtaaggagtgtgggaaggcttttagacttcacctacaactttctcaacatgagcgtcgtggttcaaatcttaatcaacatcgaagtattcataccggaaagaaaccctttgaatgtaaggaatgtgggaaagcctttcgacttcatatgcaccttattcgacatcagaaatttcatactggtgagaagccctttgaatgtaaggaatgtggcaaggccttcagtcttcacacccagcttaatcaccataagaacattcacacaggtgagaagccatttaaatgtaaagaatgtgggaagtcctttaatcgtgtctcaaaccttgttcaacatcagagtattcatgctggtgtaaaaccatatgaatgtaaggagtgtgggaaaggctttagtcgtgtttcaaaccttattcagcatcagaaaactcattccagtgcgaaaccctttgtatgtaaggagtgtaggaagacctttagatatcattaccagcttactgaacattaccgaattcatactggtgagaaaccctttgaatgtaaagaatgcggaaaggcctttggtcttctgacacagcttgctcaacatcagatcattcatactggtgagaagccat

SEQ ID NO: 241159 - DNA, 3538 bp, Homo sapiens
  misc_feature (1817)..(1817): n is a, c, g, or t
  misc_feature (3451)..(3451): n is a, c, g, or t
gattatcagctggagaactgaatggtacacaccttcccccttcttccaacaccatggcccccaagatgctgcacctgccgccgcctcatttagccctacaaccccctgccactcaacattatgcagagggcccaggagggtcttgcagtcatctacatacttccctgcgagttcttggtttggtccctagaaatggcagcctgcatgtggagaaggctgcatgcagcctcaggcctgcccacccgatacgaggtctgcatgtatgagttgtgtgcatcacatagctcctcaccatgctttcctacccaggaggataagctttcctacccaggaggataagctttcctacccaggaggagactcaaggcaaaacactggaaactgtgtttatacaaactccccaagtgattctggcagccagcacagaatgactgtgcacagacactcaggcatcactagctctgggcgccgcgcatttgcctgcttcatccaggacagtggctaacacttcaggtagggcccacatacactcagaataaagagctgcctggtcaggaggggggcagtcagcatgggctaagttttttacagatctctggcagacagtgttgtctgctttggctaaagagggaatgggaaggcaaatgacaaatggcctctaacgttgcaaagaataatgtgttatgtggaactcagacaagccagttctatggagaaagcagtacattgaggatgagatttctgcttgtttctttttgtttttggaggaaaagccagggctgtgggcctgacagaagttgatatttgggtcttgaatgtgttctcttccagaatcttctctttccagttttcccagcttactattgataccattcacagaagtcttgcattcagtgccctctctaggtggtacctccttataaactgggccttatgctggcatcttgggtccttggaaggatagtttcctggtgcgctggattagtcatagcctattgtagtgactctggcatggttacctcaggaacaccaccagacaaatatagaccctttaacactggctggcccttgtgtctccagacccctcccaggagttcctcacactaggaaccttgggctgctccactttgggtcacaaggacccctttgcctagcccaaagcaggcctctttggttgcttttctctggtccactctggctatgaccttcaggatcagagggcaagaagtcgagaaggacacgtctccaagatagagcactaagagctaatgggcagaactggctggagctgcttattcttggcctttttatgggtgagatgcctctagcagtgttggacatctcatcccagataccaccaggaggtgagcttgctctgggaggcatattgaaagggctgcaccatgcaaaggtcaggaactctctccactgcatgaaacatggcacaagctctggcccatctggctgtgaccagctgggcctttgctcagggctgtctgtgctgctcctcaccaggtgaggagtgaaggggaaagaagaaggagtcttgtgctcctttcagaggttggacagtgccatgacactgttcaaactgtttagtttctctggggcttctgcttggagtttaagagagacataatttattctgaagtttgccatggagagaatagcatctctattccaatgtagtcataatatatggtatcatcctgcctatttaaaaatatgtttggtagtaaaattttcagtcttattaaaattttagcccaaattcttttcctcctttcttgtttttccccaatcggaagattcggtcngtatttcccccaggggaaacacaagaacattacctaagaactttgaaattattttcagagaattcaggtgctgctggttttgaagatgcctaaaggagtttccaatgttctccaacctcgtctatggtaaaataaattccaagtaagagattccttccaacaaaaagtaaccaaaatgtgtatttgccccatcttaggtaattaaactccctaacagacttgcagatttaggcaaaaagagtggtagaatataaaagctcattaatcatcctggcatcatgagctcatattgttatgaaataaatatgcttactaaatggatccagatgccatcaaatacatgtttccaataaagactattttttgttcttgcccaggcaataaacacacgaggcttgtttataacacctcttttccgtgaatcacagtggtccatccaacacatattcttttcacctctttccctggtgaaaagtgggtacgttttctgatgaggattctggggaaaaccctaacgaggtaggagatgtttccctgtaacccagagctgatgggtgataggaaaatggaaatcacttggctaatcgtataccaacatggaagacatttgtctctattaatcttcttacccaacacatcaaagtaccaatttcaatccaagacagtaccagtccccagaggacagacttgagtctaagaggaccccctgcgatctactctgtaaggatggaatggtagaaagatgaagatatattcaattatcatcaaaccccaggctcttgatgtgggtgagctgtcttcccaagatcacccccaggagttggctcaggactggaaagcagagggggcccattggagggaggatggagttcatagtgagttgagggcagtagttaacgtggggttggagccagacacatacaagttcctatcctgattctgccacttaatagttatgaccttcaacggtattctacctctctgagtccgtttgctttattcaaaaactccaagttgctgggaggataaatgagattgttattgtaaactgcccagcacctaagatgcactaagatgtggtagctcttatcacccttcctagaaaggttattccggatggggactgatgctgtccaggagaaatggatgagtagagggaaagctgtttgttcttaatagtagaatgaaactcacatgtgtcactaaccaaggggcctgccctgctgggacaggcctccccttatagcccactccaaatctatccttctcgagttcccactcactggaatctccagccttccagattttctgggacctggagttggccagtcaccaccaccatcctatgcagctttccctttattactggaggaagtgtgaagataactttttccctcaaacgattgtaaagagcttaaaggcattaagatgagagacgggccaggcgcagtggttcatgtctgtaatcccagcactttgtgaggctgaggtgggcagatcacgaggtcaggagttcaagaccagcctggccaacatggcgaaacctcttctctactaaaaatgcaaaaatcagccgggcgtggtggtgggcacctgtaatcccagctactcgggaggctgaggcaggagaatcncttgaacgtgggaggcagaagttgcagtgagccaagattgtgccattgcactccagcctgggtgataagagcaagactcttgcctca

SEQ ID NO: 241160 - DNA, 363 bp, Homo sapiens
tatactgtccctaagtgaaaaggcagcaagaaaactgcaaatgcaaataacacctctctccaatcttgatggaccaatgattgtcaaacttaagcattattactattattattattattattattattattattattattagcgatgaagtttcgctcttgttgcccaggctggagtgcaatggtgcgaccttggctcaccgcaacctccacctcccgggttcaagtgattctcctgcctcagccttccgagtagctgggattacaggactgcgccaccatgcgcgctaattttgtatttttagtggagatggggtttctccaagttgattaggctggtcttgaactcccgacctcaggtgat

SEQ ID NO: 241161 - DNA, 490 bp, Homo sapiens
gactagagattccttctcagatgccagtgaccacctcacagcccacagcccactacctcctctgtctctcacactcagggccaatattcccctgccctgatcacaccagggccaggtatcagacaactccggacagcccctctgtcccagagccctgaaattactcaaaccagccagtccaaagcctgctcaccctgccttgactgtttcttcccacagaaaccccaataaaggctcttgctcacgtttccctctcctccccctgacttcagcagaccccagcgttcgcccgtgtgtccccgacccgcgccgtgtggcgcagcccctgctcttgagaactgtgagtgacaaaccatcttttcaacggcaacatcccctgatttgtgggcctcactacacctgcctgcatttcaagcagtgggcgcagctagcagggtggagtgaggcgccactgcgctgctctcggtaactggttccaccgggcggccgc

SEQ ID NO: 241162 - DNA, 639 bp, Homo sapiens
  misc_feature (568)..(568): n is a, c, g, or t
  misc_feature (572)..(572): n is a, c, g, or t
  misc_feature (576)..(576): n is a, c, g, or t
  misc_feature (585)..(585): n is a, c, g, or t
  misc_feature (593)..(593): n is a, c, g, or t
  misc_feature (596)..(597): n is a, c, g, or t
  misc_feature (599)..(599): n is a, c, g, or t
  misc_feature (613)..(613): n is a, c, g, or t
  misc_feature (617)..(617): n is a, c, g, or t
gtgagtcttccaaccagagcttgtgcagcatgggatccttgagtgataaagaagtagagactcccgagaaaaagcagaatgaccagcgaaagtggaaaagaaaagccgaaccacatgaaactagccaagggaaaggcactgctgggggacgtaaaattagtgattactttgagtttgctgggggaagcgggccagggaccagccctggcagaagtgttgcaccagttgcacgatcctcaccgcaacattccttatccaatcccttactgtgacaagtagaacagcccctctgtggtttagatggcagcactgcaaaggaggcaacggaggagcagtctgctctgccaacagcctcatgtcagcaatgctaacaaaacctcggcttgacccagagcagctggcacaaaggggagctggcctgtgcttcacttctgtttcagctcagcaaaacagtccctcatctatgagatctggcaacacagagcatttctgcagctcccaaaaacagatctccatctggcacagacagacccagtccgacctcacaatataaaaaatatctgcactncagnctgngcgacagantgacactncgnntnaaaaaataatattnaatnaataattaaaaaaaaaaatgcg

SEQ ID NO: 241163 - DNA, 302 bp, Homo sapiens
tctcagcaatacaaatgaatgactactaatgaactagttaattaatgaactactaataacaacataggtgaatctcataatcatgccaagagaaagaagccagatataaaagggtccatagcgtgattttatttatataaaaatctataaaaacctaatataatctgtggtgcacgcctgtagttcccagcaacttgggagcctgaggcaaaagaatcgcttgagcttgggagctcgagtctgcagtgagctgtgatcatgccgctgcactcctgggtgatagagcaagatgtctcaaaaaa

SEQ ID NO: 241164 - DNA, 452 bp, Homo sapiens
gttttcagagcaatgtataggtaattatgattactctgattctgggtatgaaaaaaaatgggactctggttgattgacattttctcaaggttacacagctggcaaacagccaggtcaggactggagcccacacctgcgtgactctaaagtgcccactcttctgtgctgcaagagcctcccaactattccttagggtcattatgtgaacatgttgtgggggaaagcacaacgtattcatcattcagggcttagttcagcagccacccgcttccctgacaccctggtctgggctggatgtccctcttctgcactcctggagtgctgggtgcatgcttatcccaggagcagctttccccgctctgtatcccaacacctgctactgtctgtcccctaattcatgtgtaagaaacatttttaacaaataaatttgacaaataaatgatgaaatgaaa

SEQ ID NO: 241165 - DNA, 544 bp, Homo sapiens
aaatgtaatatagttttttattttcagcaccacacagggttatgacagttcactaagcctttatttttttttcctttttatctgcccaagaataaccatgatcagtaaacctctaaatgtgaaagaactgttagtgatttcatttgttccaatctgcatgtcctctgaagataaatccgatatggaatttgggataaataccactggccttattactattcatgagtctattttaatttctttggctgttcaacgaaatcctcatgactgacttctctaaatttcaggaaagtaggatgtcagaggaatacttggcattatggtagttatttagagaactttaactctgaagagttcttactagttaagcacatatcttgtaacagaatagtgacttcagtgatttaaaaatatacgacctgttggccaggcacggtggctcacacctgtaatcccagcacattgggagcccgaggtgggtgaatcacttgaggtcaggagttcgagaccagcctggccaacatggcaaaaccctgcctctact

SEQ ID NO: 241166 - DNA, 476 bp, Homo sapiens
agctccagaagctctggcatttggagaacatcttcccttatttaatgcttagcctgtgcctaaactgacacaccttacgtcaggatagggtggttgggcaagtgggtgtgtgtagaggttgctgtacaagtcaaatgacattttctgcctgaaggagatcacagaattagggaatgttgagttcaaaattcctacagaacaatctgcctgctgtaccagcgtgtcatttccccattctccttccccttctccaactactgttcagtctgtaccccattaacctgcctttgcttttcttcatttttttatgattacctgtaattatcttatttgttggcttttttatttatcagctgtttccccaatcccaatataaggttcatgaaagcaggggccttgcctgtctgtgccccaggcacccagtgcctggctggtaagcacatattgaataataaatgagcatcccatgaactcta

SEQ ID NO: 241167 - DNA, 2076 bp, Homo sapiens
  misc_feature (595)..(595): n is a, c, g, or t
  misc_feature (1939)..(1939): n is a, c, g, or t
cctctgatggcaccagtgatactttaatcaggacctattttaaatggataccatatagtatctaatggtaatattccatctctgcacagatataatatagtatacctattagatttttgtgaatagagcagatatttgctagggctcattacttttatttatttttactattttttttaacctccatcaccaccaccaccacctaggattcattacttataaaaaaaatatgtagtgtgaagaaaaatggcaaatgcagagtggtaaagttttataacatatttttgggtcaatttttagaaattatttttaaaagaagaggcataaggtagggatgttagaattctagtttgtggaaatgcaagggatcttgacgtgcctctttttgaaatattatgttaagaaaaacaacttgaaatttagacttaaagaaggaacaggttggagagtaaaagagatgaatttagtgttttggccttggtatatttgagatgcttctgagacaccctatgggcttgtctggagctcaaaaaaaaaaggtcagggctggggagagattgaggaatcttccgaagagagcagagatgataccctnggatgggatgagttagtatagatgtcttgaaacggttaaagatacagattccttgggtcctgcctttggagattctgattcagcacatctggaatggggctcgatccccgcctcttccttaacaagctccccaggccattccgatttgcagccaggttagcgcattggctcatctatcaactcaggtcttggctgttgctttgttgcctctaaaggggatcataaaatgtgaaagattcttctcctgttctttcaaaagagggtagtttccaaaacaaagcaagtttgagagatatattttgaggaaatatttgtgaaaacaccagaaatagtggagccacttccatttcaatcttctggatttgatttgtttgtccattaaaaaaggggggggtaattatttgtgtgtctgtgtgtgtgtgtgtgtgtgtgtgtgtgtggatttatctcagacattgaatgggtcatttttttcatattttccaaagtcacataaataataataattttaaaaattcagagtgctgggctaattttactacataagtagaatatacttagcagctattagtggcttctacactgaaatagaaccctgcagttatgaaaatcatacctgaaatttgagaaaagttgtttttgcacagtaatatagggtaaatgataactctggtagaaatagcctaaatgaagttcaataaatgctggacactatttgaggttgacttttggattttgttgtaagggttatctccagatctaagtgtaaactcagatcactccggtcttcctgaatcagacctatttttcatttgagacagatggaaccatcaagaatttttcccctttgactatgtcttggaagaacagggtgccattcctttcaggtgcatttaaacccaatccaagtagtcaaactgaagaatgcagagagcaatggctattacaggcctcaaagagtccgaatcctttgcaatggccatgaaccagtcttgccttttcagatgatctataagcctggaataggacagttttggaccatggtagggaacttggaaatgttagttggtctaaattcctggttatggaattaaaacaagttgtatctactttagttattaacttaatccagtatttttgttttggcttaatcctattagtgtcacattttacttttagaatatcttccactgttaccgggcgcactggctcacgcctgtaatcccagcactttgggaggccagggtgggcggatcacgaggtcaggagttcaagaccaccctgaccaacatggtgaaaccccgtctctactaaaaatacaaaaattagctgggtgtggtggcncatgcctgtaatcccagctactcaggaggctgaggcaggagaactgcttgaaccaggacctgggaggaggaggttgcagtgagccgagatcacaccattgttctccagcatgggcaacaagagtgaaactctgtctc

SEQ ID NO: 241168 - DNA, 397 bp, Homo sapiens
atgagggatctgccccgtgacccaaacaccctccattaggccccacctccaacattggggatgaaatttcaacatgagattggagaggtggaatattcaaactattgcaggaagcatagggaggaagggcaaattcctcaagtgcacacaggtggttgactggagagctgagatttgaacctggacctgtgtgaccagatgcagagctctgaagtgctccataggctctcactccaggctgtgaattggggcagatgttgggtgaatggagactggtggtgcaatgtcaccttgcattcgctcatatgcctttaatcccatatgaaaggactgtgcatgtcagtaactatgatgttttctaggaaggcattggctctcttgcttcagacttcctccg

SEQ ID NO: 241169 - DNA, 468 bp, Homo sapiens
gggcatatgctggtttctgactgcctccctgtgtgggaaacatcacatctgcatgagaaagaggcaggcttgtctgcaccgcagccacaagttttgctctcactctcttcttagggacaaggatgaggagggctgggggctggggagtcatctcccacgctcatgacctcccttgcagggggctggcagccaccatgcggagatcccagccttcaccttctgcgcctgggctgtgtcccactcacttcgcttgtcttcaaagaaagcagccttttaaaccagtcagaatgaaagcaccatcctctgaagcagaattcgtaactttgatccaaagctctataatgtatttacaggtcttgcagcgcaacaattccacttccatgaccctaaggaaataaccctaaatacagaaaaggctttagtgcacaaagatgtttggcacaggccgggtgcggtggctcatgcctg

SEQ ID NO: 241170 - DNA, 461 bp, Homo sapiens
ctgttttatacttggccagggcttcaagaaaggctgagagcttgtgacattttcttccagccactgcaggctctgccccttcacctaacagcataagatagggctaacagttggggagtatggttgtaactgctcatgtcttaggaggcttcagcctcagcacttttaggtccagaactcaaggggggcagaagacccctgtgacaaaaacccactaactggctcatgagtgacatgagccaggcaacataatgggtgttttatatgagtagatgctgttatttttaatttatacctaaggctcttttgcccaagattgaactgtttcttggtggaaaggattatcaatgcatatctctttttttttttttttttgagacaatctcactctgcactccagcctaggcaacagagccagactccgtcccaaaaaataaaaataaaacttggtccttcccaaa

SEQ ID NO: 241171 - DNA, 470 bp, Homo sapiens
catttcatttctccaaataattgtttgatatttgactctacagcccttcagggcaggcaaatacttgtaacattagctccatagagatatggttctcaattaccaaaagactgtagaagtcacttttctttgcctgacactgggaaggattctgattgaaggaagcagtctttgttcctctggtctcatgtgacagtctgtatcttcaggtccatacaggttgatgcacaccaaaaagtggattcaaagctgcctattcaagacttggtgatagggaaagatgaggagttaattttcattttcgtttatcagctgcctgtttgattaagatttttggtaggaagagccatctttcagacataatgcctagggtaggttaagggcaaaaattaactctttgaaatataaatgcttcctattaggttggcagatttcactaagctctttttgggaagaaaatgctaaaattc

SEQ ID NO: 241172 - DNA, 566 bp, Homo sapiens
gggccaaagcaagttatgagagctgccatatgccagctgccaaatgtcttcagtgccaggcatgttgccaaactaggggtaaaatagtgaatgagaaacaaatgcagcctccaaagagctcaagtgacaaagactgacttttacaacataacggtgctgaggtgcactgaagccctgaacctctggaggctgcaaggatagagcagtgatgtgtcagaccacctgcatcactggttccctgatggcacttaattcaaatttcatcctttggtagggtctagtgaaaatcagctcaaaccttgaaagatatttctatgtaacctaattaaatgagtgagaccttggtgcctctcactgcaggacaggcaggattgaaaatgaaaccaatatctgacccaacgagattctgtcctaagttcaggggaacaggttttggtggcaggcccttttacatgactgtttgctggagcccacaagaaccaagatgagaatctgagggaaatggccactttgcagccaggttacaacaggagagtcatgaccggctgcagttataaaaactgaaa

SEQ ID NO: 241173 - DNA, 193 bp, Homo sapiens
ttagccttattttattttgccttgcattggagttatttgttcatatgtcttgctgctttctagtagattttaaattcttcaagggcagagagacctgtctcatttatctttgcatttttccttcctcctgacaatacccagtgagtgcctggcaagtaggaggcactcaacaatgtttgttaaaatagaatga

SEQ ID NO: 241174 - DNA, 397 bp, Homo sapiens
aaggatccagatagttattggttacacacattaattctgtttaatatgctaaagtatataaatggagaaataataactgagatttatccaaggcaaatgaaaggagaaataataactgagaattatccaaggcaaatgaaaggcatcaaaccacagattcaaaaaccccatgaatcacaagcaatataaacaggaaaaaaaaaactataggcatattataaataaaactgctaaaagtcaaaaacaaagagaaattcctaaagcagagaaaaaagacagatcaccctcagagggacaacaaggcagttagctgacttctcagcagacgtaacaagtcagaagacaatggattgtatcttcaaagtgattaaataaggtcaaaacttgaattctttac

SEQ ID NO: 241175 - DNA, 536 bp, Homo sapiens
agaaccatgcagagtccatgtcccagtgctgtcctgctctggtcttgtgacctggacatgcctcctctagaccaggaggatgggatttaaaagttggggactttagttcacaggttcctcatccactgcttcagcttttccttatccactgcttcagcatacagtggcagtttctgagggcagcttacaggtaaagagaatttaaaatgctctcaagaatttaggctttggtcagcttctgggaaggggagaaatggaagagagtgttgaggaactagttttccttcttggtaagaaaaacagggtgcatgtacaaaagagcttaaggaagttttgaatggtgcataataacaaattctagcagacaagatgagctagttgatgggcttaagaaggatcttgaaaccctgtcacctgactgggcactatatctcacacctgtaatcctagcactttgggaggccaagacaggcagatcaactgagctcaggagtttgagacctgggcaacatagtgacaccctatcttcacgaaaa

SEQ ID NO: 241176 - DNA, 465 bp, Homo sapiens
cctttgtaaaaaatgtttgaaatttgtgtttttaatccctatgtttttctagcagcaaaaaaggaccaactccaggtaaacaatgcccaattgaattgtgattcctgtcaactctatcattgccttaatcatagcacaatacaaacacacagcatatccaccctaataattctaggtcgcattcctggattatggattcctgtaaatctatctgagccttgggcagccacccccactttacattttgtaaaacttcttactcagcttactcatggcactcgtagagccttaggcatgataatttttactatagtctccttaattacattaataccctctgttgtggtgtcctcagtagcactggacagctccactcaaacagctcaatatgcagaaaattggatgcatacagctgaccaggcatggatgtttcaaaataaaactaacactgagatacaaacagaa

SEQ ID NO: 241177 - DNA, 266 bp, Homo sapiens
taccaagggaattgaatgaagaatttttaaaaactggtgaggggctaacttaatatccacagcaggaaagaagtcatctctactcaaacttcacaaccgtacagacattagttcaacattgaccatagcctaaatgtaaaatatcaaaccataaaatggtatcctgtaggagactgaaagaaaaaattactcacaataaaatcgtaagaatcaagagcttgttcaaaaattcttagccatagcagcaaaagcatgattcattaaag

SEQ ID NO: 241178 - DNA, 754 bp, Homo sapiens
tgaaagacaaatttggatcagattgtagagaacagcttatataattatttcactgtatttcatttttatagtcttattataagtgaaaatgacaaattactatagaaagctaagacaaatatcaaatttcactcctaaaaaagtgcctaaaaattagaatttatagacaactttaaaaaatcttattagggaataaatctgttaaataatatcagcaaagtttagtgaatattatgttctgttttttatacaattacttttattgcataaatactttcaggaaaattatcttgctactaaaagaaaaaagtgtgtatgagaaatacctacatatactcagaaccacacacacttcttttatttatggaatcaaactcttagagctgaaaagattttaatctgttcggtctaatcattttagagataaggaaacagcccagtttaaatgacttataggagttagtattggcagagcagaaataatgtaactattttaaagcaaatcattatgaacttacacctatttagagctataaaatcacttcatgtgtacataacaatgaagtttaaaaattgataacactcttatcaatacagcaacaggaggtttacaaaaacagtatcaggtgacatgatttcagattctatagttatttaaaaaaataataagggaaaatgatgaacaaagttgttgaagtatttaacaacttacatgaaatggacatcttaaaagatacaaacagctcactcaaga

SEQ ID NO: 241179 - DNA, 644 bp, Homo sapiens
gcttttgcccattttccagttgggttataatagttctttatatatcctacatactagtctcataccagtgtataatttgcaattttttcccaatgtgtggatgtttttctttaacagtttcttttgatcccaaaaccttttatttttaatgaagtccagtttttctattttttcttttcttgcctgtgctttaggtgtcacatctaaaagaaaccattgcctaatccaaggtcacaaaagtttacccctgtgccttcttctaagagttttatatttactcttacatttaggtctttgatccattgagttcattctgtatatgagggaaaggtccaaatcagttcttttgcatgtggatatccatttgcccagtacctgtttgttgaaaagatcattcttccctcatcatttgttatactttcacctcagtagttgtgttttgaagtatgtatattaaatcttttataggcaaccttgcatttaaactttgtgctctgaaccatctaactgtattcaggctgggtgtggtggttcattcctgtaatcccagaactttgggagatcaaggtgggaggatcacttgaggccacaagttcaagaccagacagggcaacgtagtgaggccctgtccttccaaaaaaatt

SEQ ID NO: 241180 - DNA, 280 bp, Homo sapiens
aaactaggaatctgcccttctacaaaaactgagacacagatgtatcatctccttcaataattgcattttaaagggatggctctgaagtcttgagaaaggcattcctgggttgcaaaactaggaagaggctagaagaaaatttgggagaagatttgcatctcaaagagatagagaaagaactcacaattgcaagtttcctaaaataaatcctccgtgaaaaaaggaggcctgatggatggaactggaggtcattatgttaagtgaaataagccaggcacag

SEQ ID NO: 241181 - DNA, 478 bp, Homo sapiens
actctctacattaaaaaatgtatttcaatcccttacctgatacttaaaaacttagagaaggggaaaattagcttcaatcttaagatttagagaggccaaacctttctgggtatcccatcttcgggtgggtagcagtaatgagggagcatgactgtatacttgtccccgtacactcccagcatctgctgggtcgggcctgtgctctctgaatatttggtaacatggcagctcctatcttccagctactgccctctgaaagcctgccaagagcattcctggtgacatcttgtgcaacctacaaactcttcttatagcacaggctctgctatgacatggaccagagcaaaggtagacactgcaaaattatttcttcccagtgaggcaagtatgattgagcacatatccttgctctgtttactggagaaacagactgatcaactggcatgaaatattgaaacatgaaacttacactaccatt

SEQ ID NO: 241182 - DNA, 318 bp, Homo sapiens
aatataagttacttcctatcaagtgtaaaagaagtttttataaaggtgggttttttttccatgtccagtgtttatatccttatttactgtccttaagtgacatgaaactcaaaataatatacactttacctaattaaaaatggaaaatggtcctgatcctagagaatggttataatttttatttctacaaaattaggttttagcttagaaatcttttctagaataataattacagcatacaaaagtatttcttctggaaaagtttttagtttgatgatacatttgcttcctatctaaaatatgattttgagacagcaa

SEQ ID NO: 241183 - DNA, 433 bp, Homo sapiens
tctaggctgtgaatagcataattttatcaaattagtagcaatatttaataacagaaatggaaagcttagaaaaatctgaaacccaaataaagtcattaagttacaaaatcagtatttctcatgactcattggtctattgtaaaataaatttactgggttatgtagcactgagaaaataaagagagaattggggtggggatgaacagaaaagagagcactacatataataaggttcattattgtttcattaacattttgtttcatttgtttgggtgtgtgtgtgctaaggtgtaatgtaaaatacatttctgcataatggtgaaaaagtttaagacatggataataggatgtacttaagaacgtaagtttataaattcaggaatatatttatatatatacatgaagattgtgggattaggaataaatcgttacc

SEQ ID NO: 241184 - DNA, 388 bp, Homo sapiens
cctcctcctcctcctcctcctcctcctgcttaaattcagtgccagatgttaaaataaacttggtaaatggtgggtgtgctactggcaagaagattgaatctaatgcaaaaaagccctaatttttccctagcatctttgttagatattacaaagatccagagctttcttttaagaaaaaattagagatttttctgcagtggtcttcagagttcattttgcttgcaacatggttttaaagtggccacaaacagaaaataatttttaaaagtcctaattctaagaattaaggggaaaaaagaaccatatgcacagaagtgcatgaataggcctcccacttaaataatccaatctaaaaaaatgtttcacctgaagtattcattcctttgga

SEQ ID NO: 241185 - DNA, 534 bp, Homo sapiens
aaaagagattcaggaaaggagacgtagcgtgactcagcatcccgcgcccaggtatttacccagaagagatgaaacacgtccgcaggaagactcgcctcaaacctttgtagcagcagcgttcgcaaagctgagaaaaccaagtatccatcagctggcgagtggataagcgaacagtggctcatccctacggtgggaagacaaggccgccgctacggggtgaatcccaaaaacaggatgctaagtgagagaagccacacacaaaagaccacgtgcttagggcctcctttacgtgaaatcctagcaaaggccaaactatccttacagaaagcagatgcgtggtcggtcggcggggcaggggacccggcggcagcggaggtggcagatgcgtggtcggtcggcggggcaggggacccggcggcagcggaggtggtttcctgctttccctttgtccaggctcttcaagtaggatgcttaaaattggtaaatatcgttgtatgtaaaattatgcttcaataaaactcaatttttattttt

SEQ ID NO: 241186 - DNA, 681 bp, Homo sapiens
cccctccttcctattctcttacagctaggacccagcgttctgggcagaatagcaggcagcgcagtagctactgagattataagtggtaggtttatggagctgtgaccacaactctccacaagccagtgctgtctcatgcaagcactctcagtgtccaagtgctgagtgtgtgagtggtctgggctttgcagggtcggccaagctcttggaagagcaggctttgttagctggggagtcatcgctccatgcaggccctgagaatggagcatcctgagtggactggtagagatggggcatgggtcactctgagggtttgagctacttctgctatttttgaaattctggtttgaactgcaggattgtgctgagtttggcacagactaatttctctgttggcagcacatgatgtatcaactcatgtgtcagttggtttgatgccactctggaccttgagagttccaaagggctattgagggagaaacctgacttatggcataaaatggggtactgaatttgggaggctgaggatgctaaatggtgtatgccctgcctctgttttattgctgaattgtgtctctcagtggaggttcttagaggcttttcaacaaaacctatgctgtcagctaaaaggcttttaggacttcataatcatggcacagtatcttttcctttttcttaaaa

SEQ ID NO: 241187 - DNA, 481 bp, Homo sapiens
aattgccaaaatactgaattattcaatcataaaactagatgggtatctaaagctctctacccagtaggggaaaaaaccgaaaaaccgtttgggaatccttcagagagaaccgtaatgctatttactggataaatatacttcattttcttctcccagttctttccacaacacgcttgttaagtcgccatggaaagcaccatgctttatcaatttggcaaataacacatttcattttgccaaggcagaaacagcctaaaagtaatatttataccgagaaaccctggctgcagtccccagctgctctcccgcagccctgcgcctccggctcatgcagcgctctccccccggagccggcaggtgcccaggtgagcggggcctgcggaggcagcgaggggcgccggccgggaaccggcagaacgcgtgcagccagaagacaggagagataatacattcccttaagtaataaaagtttccaggacaa

SEQ ID NO: 241188 - DNA, 863 bp, Homo sapiens
ataaacactctgccttgggattaaactttatttataaagggtcattgctccataaagtggcccagccaaattcccctgatgccaggttgccagcccaatttcagtggtggtagactcccaactaccactattccttattcccagttgaaaaagggggaaaaaaatcaaattaccttcccccaacagattataaaggaaataccaaacagccacaaagaagctcgaaaccttttctatcgccttttaaaaagtacacctggcatccctcgctctatccagttatcatttatttctattgcttgctgaaggcgctgatctggatttgtgatcctatggcagagatttctagtccagaagccactagtgcctctcttccagggactatgcctacatcggaatgtattaccggtgttccttgggtttgaaattaattacatcctgtttatgaagaactgaaagcaattaaaggattcgctttcatgtttcagtaaatcaaggtgctacctgtaaactcaggaatgcagtcggtgggaaaaaaagaaccttctcttctaatttagtgcaagcaaaggaaaaacccagaaaaatttaagtcagggactgaaatctatggtactttacaaataagtgaaaacaagcatgtgctgaatctaaaagaaaggattgctgacagacgtcctcagtacaacttaaaaatacactaaaatttcctccgaagtgtttctcttactctcatctatccattacggctgttagtagcattccattgacaaagtaactttacatttagctgacaagatctaaagcagtcaaagactgtagcccatcagctgtggccaccaccgcatgtgtaagaatgaagg

SEQ ID NO: 241189 - DNA, 422 bp, Homo sapiens
aggtttcttctcttggcttgcagacagctgtcctctcactgtgtccttacatggcagagggagaatgagagcaagctctgttgaggctgtctcataaggacattaatcctattggatcagggattcccaaaggacaatatgaatcaaattataaaatatggcccaggaaataggcacagataaatctatactaaggtgttgtgctgatacacaagtctagtactgttccatgagttcatttctcatcacacaccaagatttggtattttcactttttcatggcagattaatctatttttatcatgttaaaaggaactaagaagacagggtaactaaaagcctggctcctagattcaaaaaacacaatagagaaaagggagattattagcataattaagaacacttggatatcaactaggtat

SEQ ID NO: 241190 - DNA, 386 bp, Homo sapiens
accaaaggctgtctctctttccgcttaggcgtctgttaatcattgacacttaattagccctgtaacatattagaaagtgctttgaaaattgtaaagtcctattcaaatatgcgggataattattacacggacctattctctccactgaccctccttaagcgtctactccaggtcatgtgctctgccatgcatcaccttgtgtaattactgttggaggccctggattctcatccgttttacagaaccaagaagacagcaatgtaaatgacttgcccagggtcacataggcagtgagaggcaggttctgtgtgcttctagagaaaccctctttccactttgcattcttcagtgcagtcttttctttctttcaccaaagccaggattct

SEQ ID NO: 241191 - DNA, 517 bp, Homo sapiens
cttcctctggccccactgaggtgatgcaggggtatgtgtggccatatttgggaaagcgcctcgctcccatgcagaggctctgagctcacccaggaggggcaggctctttggtgcccactatccctgggccaggctgggaaggccctatagggtctgcccacgctgaatctgcaggggttgtgctgctggggtgggggtgctgtgtgcatttgaaacaggttcttcaccacccccgccccgggatagtttggacgctcctgggcaccttccccttcactgtggttccctgcagagtgtttgggaggagtcaggttctaggaggcggaagggcgaggccccagattgggttgtggtctagaaagagtggaaagtttgcccaggtgcagtgtgattcatgcccgtaatctcagcactttccgaggccaaggcaggagaatggcttgagcttaggagtttgggaccagcctgggtaacatagtgaaaccctgtctctacaaaaataaaaaacaaaaagtta

SEQ ID NO: 241192 - DNA, 662 bp, Homo sapiens
aatatcagaaaagtatatttatagagatctaaataataaacaatgggagaaaataggactagagggggacataaaggatggggcaggatcatcgacagaggatctttttcagcacaagcttagaaaaggttctctgcctcttccaaaaggctaggctgaaaagatatgatgtcactttcaagtcaacttaagactaacaagggctggaaattttcacaaagtgacaattacaagttggaagtttctttctagtatctttggctagaaagttatttcccaattctcacaaagaattccatgacaattgtatttccctgggcaattaacaggtacacagaagctcaagcgcattcctgctgaaggctgacactcatccgtgttctgggcattcgtacagagcattactggcattcacggtcccagcgaaacctgaacacagctctagagtctagaccaaatcaccggccccttgtttaaactgtttgaacccgagtgtatctgtacaccaccagtcccctggcgctctggggtgagtctggcccggtctccggtgggccctggagcttggcactctgagatacccctggctgtctggtaaattcctttataagtttcacaaccgcaggtttgggtgaggagacaaacaccgctgtagtttgctg

SEQ ID NO: 241193 - DNA, 471 bp, Homo sapiens
tgagagctgcagggtctggctggaactgctcccggccagcggacttcacccgggcgcgggggccgcacctgccgggcgcggcctgctctatggcgccctctgctgttagtccgccccaggctccgcgccggcctctcctgggtccgtggggcctgcgggctgcggggatcaccgagacccacattcccgtggccagcagcctttcgctctgctcagaggagaggcagaagggcatattgctgtttcccagtcgctttttacacctgccttcttcggataaacccaaaaatcttccttcagagaagacggcccgtatttcccgttatttgggggtggaggtggggctaagggcgtcatagggagagccttactttcaacattctgcattatgaaaccaagggagactttttttcccaacaagtgtgaacattttttttcaagagaattaaatcgtttattgattacacatga

SEQ ID NO: 241194 - DNA, 994 bp, Homo sapiens
cgtggatgtttggttagaaacatattccaatgctctcctctttctctggccacagcatcctggctcagcccagctgtggagtagaggtggtaagatccacagaacagatatcctctggtagataagctgacattgatgatactttgaatttaccagctggtgaagcaaacgattaatttgtgattgaactgaaaagcagttgaattgttttgacaccagaggctgaatctaaaccctttacaggaagagcagagcatactatacatttcttagcagatcttcaattctgtttgaacatgatgaagtaaccagggtttagtgagatctaaggccgtgaagtaattcacaaccaagatcttatgaacgcattcagatgtgaggggggcaaatatgttttcaaaaacttagtgtgcaatagagtccattatagaaattaaccactgctatatgttttaagtagttcaatcacctgttgtggttcagtcttgattattgtttattttgttaggtgataagtaggaagatgcacttgttatcccacactatctcttgttttgttttgttttgtttttaaataatgaacagtgcaatctttgaacttgagtttttaataatgatagcaaagacaatggtgagaacttgaaacagccagcatattttatattgccaaagtacttactgatgactgaccacactgtcttgtgaggaactgggtcccctgcactggatcagagccaaatgcaagccacccatcagttcagaggaagcaggaaaacatcttttgggtggtgcatagaacattgagctcttaaaaacccggagaaaaattaggaatttagaaagtaagtgggaggtagaatattgagtccttttttttttttgtttttttgttttttgaggagtcgtcttgctctatcaccaggtgggagtgcagtggcacaatctcggctcactgtaacctctgcctcctgcctcccgggtccaagcaattccc

SEQ ID NO: 241195 - DNA, 495 bp, Homo sapiens
ttagtgtgcaatagagtccattatagaaattaaccactgctatatgttttaagtagttcaatcacctgttgtggttcagtcttgattattgtttattttgttaggtgataagtaggaagatgcacttgttatcccacactatctcttgttttgttttgttttgtttttaaataatgaacagtgcaatctttgaacttgagtttttaataatgatagcaaagacaatggtgagaacttgaaacagccagcatattttatattgccaaagtacttactgatgactgaccacactgtcttgtgaggaactgggtcccctgcactggatcagagccaaatgcaagccacccatcagttcagaggaagcaggaaaacatcttttgggtggtgcatagaacattgagctcttaaaaacccggagaaaaattaggaatttagaaagtaagtgggaggtagaatattgagtccttttttaaaaaaaagaattgatgtctaaat

SEQ ID NO: 241196 - DNA, 430 bp, Homo sapiens
tgtatgctgagaaggaatgagtcagtatcatgcggtgggggaacgaatttgggccgtggagtcagacagccctggctgtgaattcctgcttgggaatcctctgtgtgtttcctgtggggagaaaagtaattgagccgttacagcagccaagaccgtgcctggcatggggcaccagagcaacagatgccagctgcttttgttattaaaagatgtgtcttctgcctgggcaacatagcaagactccatccctacaaaaaataaaaatgaaaaaaaattaaccaggtgtggtagctcatgcctgtagtcccagctactagggaagctgagacgggaggatggcttgagcccaggagttggaggaggctgcagtgagctatgatcgtgccactgcactgtagcctgggcaacagagtgaaaccccatttattta

SEQ ID NO: 241197 - DNA, 861 bp, Homo sapiens
cacaatgatgagaaaagccagcaagttcacacctgttgggaaaagcacacttttaacatctcaggcgtaaaagtcaacagtaaaattactgtggtacaggttgagtatcccttacccaaaatgtttgaaaccagaaatgttttggatttcggatttcggaatatttacacattcataatgatatatcttggaaatggttcccaagtctaaacacaaaatttatttatgtttcatatacaccttatacacatagtctgaaagtaattttgtacaatattttaaataattttgggcatgaaacaaagtttgcatacattgaaccatcagacagcaaaagcttcaggtgtggaattttccacttgtggcatcatgttgatgctcaaaaagttccatattttagagcatttcaaattttggattttcaaattacaaatgcttaacctgtacttagatgttaaatacagtgcctcttccacgggcacttccaggaagcattcttttatataagcccagtggtgttaggtaaaacccaggttcaagggaataaaaacaaagaaattgggttcaccagatgaaaaagagatttcaaatacataaacccttatgaggaattatagacttctaaaattcagatctaggcatatcatgaagtaaactctagctcttttaaagcatgaaaagaagctatttttgttttcagctctctgcaaattcaaaccttaagggattactgtaatcatatgcacatctcaaaaaataaaaacaaccccattttcttatcctataaacatgaataataaaagaataaaaataaataaaaataattttaataaatgaataaaataaaccttgatcgcaagt

SEQ ID NO: 241198 - DNA, 441 bp, Homo sapiens
agctagagagctacaggaagttcatgatgcctcttaagcttctgcttagatgtaggcatctgttgcatctgctcatatccctttggccaatgtatgacatagacatacaaccaattccaaaatcactgaatgaggacataatactccagaagtcaagtgcatgggcaaatacaaacagtcctcttacagaaaaatgggagagtaaaaaactgcaaacaacaatacaatcttccacccgaaggataacttgcttaaaacagacaactataaaatataatcacctctatctttcatcttcattctgccattttgggtggttgtcataaattatgcagttttctataaagtttaaaggaagtattcctctaaaggttcaaattaaggtactgaaatatgtgggttccaaatattaaaattcttgtcctattttgccatgatata

SEQ ID NO: 241199 - DNA, 504 bp, Homo sapiens
cattgagcatataaacttttaaaagtttcaataactcttgaatatgattacaaaataaagtagaatttttgtagaagtttgaaatatagaagagcaaaaaaacccaacttttggcatatttagttccattttcattctaatttagtggctagaattagaatatgcagtctaatatagaattaccatatatagcatacattatatatgtcatatataatatagttattatattcactatagattatatatgccatacatgatatttaacatatatactatacattatgtattgtatgtcatatatgatgtttatatatttagaatctatatattacaatatattattatttatttgaatgaaacattcaaatatatgtatttatcccattaattgtttttaccaaaaccagatcataatgaatgtttataatgttcttctttcataaacacaactaaagtttggcctgagatatatgtattacaaattaaaatatggttttattt

SEQ ID NO: 241200 - DNA, 456 bp, Homo sapiens
aggaaattgaggctcagtgggtgaggctggggccagctgtctcctctcagtctgagagagttggggtttgcgacactgactgtgtgagggcagcaagccttgaggataccatgaaaacctcacagttgttctgattgtattggctgagcatcacctttattaaatgtggacaagcaggccgggcgtggtgactcacgcctgtaatcccagcactttgggaggctgaggggcggatttcttgaggtcagaagtgcaagatcagcctgaacaacaatgtgagatcgcatttctacaaaaaatttttaaaaaatatctgagtgtggtggcacaagtgtagtctcagctactcaggaggctgaggtgggagggtcacttaagcctaggaaatcaagattatggtgagccatggttgtaccattgtactctggccccagcaacagagccagaccgcgtatc

SEQ ID NO: 241201 - DNA, 364 bp, Homo sapiens
ggcctctattaacctggtgaacccctaagggtaactgagcaaccctaccctctgtgcctagagagggcaggtagaccaactgctctgctcccgttcacacccgtccccttgaaaggggctgaagattgaagagatcatcggagcatggaggagagactttgagccaaaaaggaaccagggaaaaagacctaggccagaaaccagcccagctgaggtcccaccttctccctctcccttccaacccaggcatcctggagaaacttggccgggactttctcaatccccccgcatgccttcacattgagccgaatggtcccagacattgtagtgtccatgaatccaaaagctagagaactgaattttt

SEQ ID NO: 241202 - DNA, 378 bp, Homo sapiens
tctgtacccagcctgtgccatgtcctccatgtgtgtcgctgtagtactgcccataggtgctgtccccgttttacaaatgagccacaaaggtggccaggcacggtggctcatgcctgtaattccaacacttcgcaaggccgaggcgggtgaatcgcttgagcccaggagttcaagatcagcttgggcaacatagtgagacctagtcgccacaaaaagtacaagaattagccaggcgtgggggtggcacatctagtcccagctattcaggaggctgaggtgggaagatcgctttagcccaggagaccaggggtacagtgagcagtgattgtgccactgcactccagcctgcatgacaatgagagaccctgtctcaaaaac

SEQ ID NO: 241203 - DNA, 419 bp, Homo sapiens
taacacagataaacaggaatcccagcttcacctctggccctctccccagaattaacattttgatgcgtgtccttctttcctgtttgttgttccagtcttcattttaaacagaagccagaaggtgcaatatatcctgttttctagctttctgtttatttccacgtttatttcaggtacttaaatgttcgtcttccagtgctcaacctccagagagatacaccattagttcatagccagtctaccacacacaatctaaggaacaggcactatgttcccagtgttcctattataaacaatgcttgatgaacatcctattttccaatctttccacccaaattggtggctggggccactcattctactcctgtttctggccttgatacagtcctgtacatactgacaaatgcagtggcgtcaga

SEQ ID NO: 241204 - DNA, 1316 bp, Homo sapiens
  misc_feature (1269)..(1269): n is a, c, g, or t
  misc_feature (1314)..(1314): n is a, c, g, or t
tttctctagatctgaagatatgctatacagatgtgtacaaagaatatgtagtgcttttcttcttacaaagcgcataggtaagaaaaaagcacagcacaatgcattggaggaatccaaagaaactgagcatccccagaaggaaagtatatatgaatatgtggcagaagctgaaaataagaaataaagatcatatcttgtgcttacttaagcaaatactttgaatttatcctgagaaaaatgtaaagttattaggggacatttgaacaggagactgacataatgttattggtgctttatagtatattaagaattaatttttgggaaaaaaagaaaaccaaattcaactgcagacattaacgaatatgtgttggctcatgtaatcaaaagtccagcgtgctacaagtaagttttgacataggtgctcaaaaagtgttatcagaattcagtttttctttccattcctcactactggatctgttgtctgcaggctttctctacatactcccaaggtaagtatcagcagttttgagaatacatgattctttgtttatgtccagcggaaaagagagagcttgcttctctggaagcgtataaggcaggccttattttaacctctgcttgatttggtaatacatccattttcgaatttataggccagagaaatgaaatctattaactgacttaggcctgaattataagatcaacacctagagctgggggtaaagtcaacttcactatgaagcactcaactgaaattggagagaagtctcaaagaaaactgagaatcctggcctaatgagacatttttctcttaaagaaatctaaagttactctatactcccggacaataccaggctaggcgtgtatctttgcctccagataccagatgccaaagcttttaagttttaatgtgacttaaaaggagaattttcagaagtagtaagtgttccacatgatactggggttgatgagtcaatggctaaacaaagggcagaggaaaggcataagtggtagaaaacaaagggagaattatgctggatgcaatttatcatagatactagtcagaagaagaaattcattaatctttcctcaaaattgtagccatggtcaaaggagacattccaccattttccatccccgtaattggttggcccttttctatactgacagtaaaaatctctgtgttgggaacttatagcaaaatgaactgccattctctgctcttataagtagcaataaatttcaacaggacaaaaataaggttatttntgtaaaacaaaaccagcaaacatttccaattagggaagttagctntg

SEQ ID NO: 241205 - DNA, 399 bp, Homo sapiens
ttaggaaaatctgtcagattaaatcatggcctaagacattttgtgaatgtgttaggaggaaggggacaaccagtagaagacgggagggggagatatttttcagtctcatgatgaaatacttcacccggaagagcaaaaaaaattctaaaaaattaaaagaaataaactgccataaacgaacggaaaagaggcattccagggttagaaaaattgtattccaagtataatttttttaaaagcctgaaggaaaggctcgagttcatccaggagtttaaaccacttcctttgcccccccaccacccgcgccccgggcgcccccaggaaaactttagcacagcgcagcggcgcgatccaggcccctcccctgtggcgcgcagcgggcccggttttatgaatggg

SEQ ID NO: 241206 - DNA, 518 bp, Homo sapiens
gccaggttgatgttagtaaaggtcaaacaatttcaggagcacctctgacctccctccacacaggttttcttaccttgactatgcagagggtggtccatcttggcactgaagatggaaccccctcttccatggtctggggtgaccccatgcctgtaactgaatgtgctcagatccttggggtgcggggactgtagggggaggatttgaaggtgtgggactgtcctggctggagaccactgggtcaggagaactccagtagagggtttgggtgctgggaaccaggaagagtgggggaaggggcagagccaactccagaggcggatctcctggctgaggacagagggtgtattgtccaagctggaggttgctgtagctgggcggggagcagctcagctcgtctcttccaaatttcttttgggggagggtaagggaaggcaagcccccctttacttgtggccctgggggctacaatggttgctgagaaacaaggcttatttgacaaataatgcttcccagga

SEQ ID NO: 241207 - DNA, 810 bp, Homo sapiens
ccggcagtcagcgtctggcgctctgccggggctctgcgccgaggcccggcagcacagcaccgcgggcctctctcctgaagccagctgcgcactgcgtgcgggggcttgtagttgcttgtcttctcccatcatcctccccttcctcggggccccaccggtggaaactgctgcatgtgtactcggatctctgccataggggattttttagctgagacttggcacccctttcccgcttacgtacctgaaaactcttggcaccccctggtttttttgtgccccagccaactgtagctcagcttccaagatgcccttacctggtgacagaagtctgggatgcacgaaagcggagcagctgggcacagtgggcatgcgcaacattagaggaaggtgggctttataccggaaaaggttttcctgcgtctggaccagaagatttttaatacgattatttacagccacttcagacgaaaaaccaagtgatataatacaaaaatgctcaggaggcgacaggactaaccacttttacactttgatctttccttctaggctgtacattattttttcagtgttagctggtgagtcaaattcattttttaaaacccgggacacatgttccacgtggcaaggcttccataaaaacatttggtgaacgaataaagtaacaaaaacttacagttcagactctcaaattgctatcatgtcttttgaaggaccggcatacattaagctaaggcttccctcagaaaaaaaaaacaaaacaaacaacaaaagaaaacaaagcgtgatctcacgctttcttccaagcgaaga

SEQ ID NO: 241208 - DNA, 330 bp, Homo sapiens
aacatcagagccactcccaccacctcgctcagccccttcagtgggtgtccttcctttccaggatgaaaactcacaaaaatcccattattttgctgatgacttttagatattgatgtcctgaagtcactttcagttaagttggccaggcctggtggctcatgcctgtaatcccagcgctttgggaggctgaggcaggtggatcacttgagtccaggagttcgagactagcctgggcaacatggcaaaccccatctctactaaaaatacaaaaattagccaggcatggtggtgcacacctgtaatcccagctactagggaggctgaggtggg

SEQ ID NO: 241209 - DNA, 433 bp, Homo sapiens
ctatataagtaagcattatatttttggaagtgatgtttctcatcttgctctctgaggtcaccctactctgtaatagtctctaataaactatgctaaatttactgtattctgtaacacgccctgaatttttagctgcgtgagatcccaagggctcttgggacaagaccccttttctggtaacaattagatctagaatttcactaaactataaagggagaataagcaaaatgctctttacagggtcattattggttaattcatctgtttaccttgatataaaataaaataaaatttatctaaaataaaacaattcatttttggttaattcatctgtttaccttgatataaaatataataaaatgtatttaaaataaaataattcatctgtttaccttgatataaaataaaattgttaatatttgtcatgttacct

SEQ ID NO: 241210 - DNA, 390 bp, Homo sapiens
gtgtcacatacccatcatgcatgacaaaggcccttcttccaccttgtccttgttcttagatggtaacaaaattctattatctggaagattgctgtagtaagaggaaacacagggagggaagcacagggaaacatgggctagcttttcaaagcttctacttggaagtagcaaacattacttccactcacattccactggccaaataaagccacgtgggcacacccaacctcaataggggctgaagtgcaatcttgccgtggaatgggagaaaacagaacctgaatattggtgaaaagtgctaatgactgcctgtcaaccgcagtgttagggagacttcaaatagaagaactgagctgatcttgttgtagaaatatgggaggaaacaaaaac

SEQ ID NO: 241211 - DNA, 429 bp, Homo sapiens
actctgactatcttaagcaaaaggaaatgttttggaacaatagtggaaagccacagaattacaggaaggctacagaaccaagcttaaaaactaacaggaaccaagccgtcttggtggaagaggaaaaataactataggtatagtttatatcagatacagagtgaataagtgagccgtactaggataaatgaattccaaatattttcagtctatttgctgctctactcaagactttataaaaggagaatggctttcttgagctacggtacttaacctcaaaaaaaaaaaaaaaaaaaggagaatccagttagcctggcttgggtaacaataactcttccttgactaagagagggaggtgattggaacgcagccctgccagtctatgttcaatgaggacaatacttttctaaatgcaactgaggctgctct

SEQ ID NO: 241212 - DNA, 473 bp, Homo sapiens
tgcatttggcatatactgccaggtatcacttattttattttttctgtggaaaaagaaaatactaactgaatttttgtatatatttattaatatccagataggatatcataattaaagtaatcagatcaagtttctaaaatattactggctcttgttttccattcccaaacacctgagagatactgtacacttaacaagtgaaacagtggtctgtatatccagtatttgtatcctacaatttccaaagtgtgtttttattatgaccttactcctctttactgtccatatttcacaaaaagaagttatccattgggtaagaagatcttaatccattaccaaagacatttttaatagtaattaataaatcacatatgttctatatattttggacataaataaataatgtaaaatgtcggtacaaatagtttctctacactcaatgatattatattattaaagtcagctgcatttaa

SEQ ID NO: 241213 - DNA, 356 bp, Homo sapiens
accagctggttgaggatcttggtgtagcttgattaaaagaaaaaaacattgtttttgtttaaactggtagtagaataatgtatggttcactatggaaaacactaaaagaaaatagaagcatctctaatcccaccacctagaaataaccattgcttcacgtttgagagtatgtccttccaggttgtgtccgagctcatcttttacataattaggaatctatactatatatgcaatttttgtatcctgtttgttttcccccactctgtattacattgggaacattgtcccaagtcatgaaacgattttcacaaatgtttttaacggaaggatatttcattaaataagtaaatagcttt

SEQ ID NO: 241214 - DNA, 818 bp, Homo sapiens
cctctccctctccctctccccaacttcattggctttccattaaatcacctggaacaccacttttctaaaagactgtctcctttgcctatgaaaactagctaccacttgtttttagtaataaagcctttctaaaatgctttgcctaattaccacatcactctacagatggtcacaacacaactgcatgtttcaagtacaatcaacttacagatattctcaagctaatcccaaaatgccattaagtgcttatcactttaattttccaaaggtagatttgaatccatcagtgggtgatccttttttttaagaactcacagtgaatccaacatgaaaaaccataattaagaggtttaaaacaattttattaccaccactgcacaaagtaagggtgaacaagttatacttcatgtcacacacacgtgtgtgttcgatgaataacaactcaagtggtccaggtgaataaagtaaagaacaccaaagacttgacaatcacaagagaaaccaacgtctaagaatttatgaaactgggcaagttatttcctgggactcaatggtaaagacacagcagtaatccaaattttccatctttgaaattttccatctttcagtcaatattagtaatacctgggtcaaaggggagagttaggcataccaattaatgatcatcagaaatgacatagtcctacaaaagcaaagaaaatttagagacactttcttaaaaatacgactcttggtactgttgaagaaaactgtatgaggaagaacgtgatgtaaaaataaaaatggggaaccttccatctaaaaaagagaaaagtaaa

SEQ ID NO: 241215 - DNA, 352 bp, Homo sapiens
tgcagcaatctggggagcatttattcaagaaaaacattgaatctcagtaagaacattaagaattgtggcattttaacttgccctgttcccatgctgccttttcccagatcagctgtagcctggacaaccgatagcctgcaatcacagtgaaaccaggaggctggcagttactgcaaaagggagaacagaggtgatactcctcatagaccatccccagaaaattgtcatttgactggtctgatggtttcctaaaattgtccattcacaaggctgtctttatttgaccaacacaagtcagtaaggaaagaatagtcttcagtaaatggtgctgggataactggatatccacatt

SEQ ID NO: 241216 - DNA, 1242 bp, Homo sapiens
gttaactgcatttgcagctagaagttaggctctgattcactgttttgtattttctaaaagggttatatgtaatttgaaagatagacctgccaagacgtgagatctgtgttctccttggttagagctaacatttttggtgaggaaagcactgcaggagcaggctggcacagagaagaggacatgcggaaggagctccagctctccctgtcagtcaccttgctgcttgtctgtggcttcctctaccagttcaccctgaagtccagctgcctcttctgtttgccttctttcaagtcccaccaggggctggaagccctcctgagccacagacgtggcattgtgtttctagagacctcagagagaatggagccaccccatttggtctcctgttccgtagagtctgctgccaagatttatcctgagtggcctgtggtgttctttatgaagggtcttactgattccacaccgatgccctcaaactccacatacccagctttttccttcctgtcagcaatagacaacgttttcctcttccctttggatatgaaaaggctgcttgaagacacaccattgttttcatggtacaatcaaatcaacgccagcgcagagagaaactggctccacatcagctcggatgcatcccgcctggccatcatctggaaatacggtggcatctacatggacaccgatgtcatctccatcaggcccatccctgaggagaactttttggctgcgcaggcttctcggtactctagtaatggaatatttgggttcctcccccaccacccctttttgtgggaatgcatggaaaactttgttgaacactataattcagccatttggggcaaccaaggccctgagttgatgacaaggatgttgagggtatggtgtaaacttgaagacttccaggaggtgagcgacctcaggtgtctgaacatatccttcttacacccccaaagattttaccccatctcctatcgagagtggaggcgctactatgaagtgtgggatacagagccaagcttcaatgtctcttatgccctgcatttgtggaaccacatgaaccaggaggggcgggctgtgattagaggaagcaacacactggtggaaaatctctatcgcaagcactgtcccaggacttacagggacctgattaaaggcccagaggggtcagtgactggggagctgggtccaggtaacaaataaagctaacactcgtttgctgctgctgcagtgtggaaatgg

SEQ ID NO: 241217 - DNA, 825 bp, Homo sapiens
ttttagagtgaggtaagtttggtaaacttgcaaaatcgggctgtggcaaataggattttgggaagctggcttctttaacccctccccagcctctctgggcctggcctcctgctgtgatgcccctccctcttcccctggctacttggggctgatttgcacctgctcctgcagatcaacgccagcgcagagagaaactggctccacatcagctcggatgcatcccgcctggccatcatctggaaatacggtggcatctacatggacaccgatgtcatctccatcaggcccatccctgaggagaactttttggctgcgcaggcttctcggtactctagtaatggaatatttgggttcctcccccaccacccctttttgtgggaatgcatggaaaactttgttgaacactataattcagccatttggggcaaccaaggccctgagttgatgacaaggatgttgagggtatggtgtaaacttgaagacttccaggaggtgagcgacctcaggtgtctgaacatatccttcttacacccccaaagattttaccccatctcctatcgagagtggaggcgctactatgaagtgtgggatacagagccaagcttcaatgtctcttatgccctgcatttgtggaaccacatgaaccaggaggggcgggctgtgattagaggaagcaacacactggtggaaaatctctatcgcaagcactgtcccaggacttacagggacctgattaaaggcccagaggggtcagtgactggggagctgggtccaggtaacaaataaagctaacactcgtttgctgctgctgcagtgtggaaatgg

SEQ ID NO: 241218 - DNA, 770 bp, Homo sapiens
gttaactgcatttgcagctagaagttaggctctgattcactgttttgtattttctaaaagggttatatgtaatttgaaagatagacctgccaagacgtgagatctgtgttctccttggttagagctaacatttttggtgaggaaagcactgcaggagcaggctggcacagagaagaggacatgcggaaggagctccagctctccctgtcagtcaccttgctgcttgtctgtggcttcctctaccagttcaccctgaagtccagctgcctcttctgtttgccttctttcaagtcccaccaggggctggaagccctcctgagccacagacgtggcattgtgtttctagagacctcagagagaatggagccaccccatttggtctcctgttccgtagagtctgctgccaagatttatcctgagtggcctgtggtgttctttatgaagggtcttactgattccacaccgatgccctcaaactccacatacccagctttttccttcctgtcagcaatagacaacgttttcctcttccctttggatatgaaaaggctgcttgaagacacaccattgttttcatggtacaatcaagtaagtgtttagggaaacttaaaatgtcaacgaattgtatatatgggtaaactgagggtaaggactcaggtcggagatgggaatagaacccacatttgggttgactctcatttggccctctttttaccatgttgagaactgattcaaataaagagggaagacttacattaggtgcatcttta

SEQ ID NO: 241219 - DNA, 215 bp, Homo sapiens
gccattgcactccagcctgggcaacaagagcaaaactccatctcaaaaaaaaaaaaaaaaaaaaaagagagagaattgggaagtgataggggcctgcatagactgcttttcctacctcctacccctccaaccccagataactttattctctctacctgaatatgtctgaaactcaggagacaggtctgggctagagacaaagataatagctacat

SEQ ID NO: 241220 - DNA, 390 bp, Homo sapiens
gagagaccgaggcaggagaatcacttgaaaccaggaggtggaggctgcagtgagctgagatcatgccacttcactccagcctgggcaacagagtgctactccatctcaaaacaaacaaacaaacaaacaaacaaacaacaaaaacccacaccaccccaaaacttagagttcagggcagttcttcagttccatgtgatgttggctagagctgcagtcatctcagggcccacctgggctagcacatacaagatggcacatcagatgtgtgtggcaccgtggtggggatagcatgaaggctgggcccagctgggttgtgcagtgtgacactccatgcagtgtcagcactattcctctgtggcctctcccccgggataactagatttcttgcat

SEQ ID NO: 241221 - DNA, 418 bp, Homo sapiens
tgttgtgcccacaatctccggttccaccctcactgtaaaatcacgtctccatccgcctgcttgatctttcagccagccgctcctcagctggagaatgggaaataatgggctgtgccagcaagccacactccaagggcagagtgctcagtgaacctgttcaaagtgtggcctgggcagctgcctgagggtcacccgggccatgaaaaggcaggcccctgggtcctacccacatcttctgaatctttagaagggcattgacaaatgctctactgatttttaagtattcctggattaagatattttttctttaaattgtccatcttttactctattttatcttgaaaaaaatcaaacccaggacaaagttgaaagaatgctgctatgaacaccaatatatccttcccttggatttaccagt

SEQ ID NO: 241222 - DNA, 1141 bp, Homo sapiens
ttaaagagtcacttggtaggcgggcgtggtggcgtgtgcctgtaatgccagctactggggagactgaggcaggggaatcacttgaacccggaaggcggaggttgcagtgagccgagatcgcacctctgcactccagcctgacagactccctctaaaaaaaaaaaaaaagccgcttggccattgaaatgctgtgttcaggttgaaaagtaaatacatgtgtatcttatataaagtgtgttaattctaagttggttttctaaattactatgatttcattattgtaagagagaaaaaaagagggaaactaagtttgaggtctttttaactaaggacagttgccaaaagccatctccctgttcttaattgctaccattgatcaagctcagttttaaaaaacacaaaagggcagccgggtgccgtggctcacacctttcatcccagcactttgggaggccgaggcaagcagatcacttgaggtcaggagttcgagaccagcctggccaacatggtgaaaccccatctctactaaaaatacaaaaattagctggatgtggtggcgtgcgccagtaatcccatgtactccagaggctgaggcggaagaattggttgaacttgggaggcggaggttgcagtgagccaagatcgtaccactgcacttcagcctgggcaacagagtgagattctgtctcagacagagagagagagagagagagagagacacacacacacacacacacacacacacacacacacacacacagtgagattctgtctcagacagagacacacacacacacacacacacacacacggaaaaaatgcatttcaaaggaaactactagaaatgttcatattccctttgaccattttgctttcgtgagttttctctgtcacaggtttcctgccaagttaattcaaagcccagtgggactaacatgctcctctctgcaaaatattctccagagcttctgggaatacctcatagctactgctaccaggataccaaaatatttcccaaatacacttgcagctggaagcaagatataacatttcctctctaactccttcttgcctgtgcttttcaaataacctcagctgtgaatggagggcttagaagtccagttgtctcttatttgtttga

SEQ ID NO: 241223 - DNA, 488 bp, Homo sapiens
  misc_feature (62)..(62): n is a, c, g, or t
accgcccagtgccacgcgcgcacacccgcacatcgactctagagagtacccgccacacatgnaccctctcacacacacacacacacacacacacacacacacacacagtgagattctgtctcagacagagacacacacacacacacacacacacacacggaaaaaatgcatttcaaaggaaactactagaaatgttcatattccctttgaccattttgctttcgtgagttttctctgtcacaggtttcctgccaagttaattcaaagcccagtgggactaacatgctcctctctgcaaaatattctccagagcttctgggaatacctcatagctactgctaccaggataccaaaatatttcccaaatacacttgcagctggaagcaagatataacatttcctctctaactccttcttgcctgtgcttttcaaataacctcagctgtgaatggagggcttagaagtccagttgtctcttatttgtttga

SEQ ID NO: 241224 - DNA, 396 bp, Homo sapiens
gcacccagttcttctgaacatattactttacaaaactttcatttatgcctggtgactctcatcaggcattcaaaagctttccctcagtgcttcagggctcttccttttcttccctttatacatacacctttatgtatcttcatacgtaccctgcataacctcatatatcttagcatttaccatattctgttgaaaaactgtttccatttctctttacttactagaatgtaaacagatgcacaatgttgagaaaatgaaaagtgacaactttgtttacaagtttagaaattatcagattctcacttaagctctagtctctgtaaagtccacaactactcaataaaagtgaagaaaaatgttaacagagagggaggaatcaaaaacaaagaactattt

SEQ ID NO: 241225 - DNA, 175 bp, Homo sapiens
aaacaaaccctaagagctgttgtttattccaagctttatgtaacatagctggctagctactatgaacagcagataagattgggcaacatttggtatcaaagataattagaggaatgatgttgatattttcttgttttttgaatgccattaaaattaaaagtaataattgaaaaga

SEQ ID NO: 241226 - DNA, 1097 bp, Homo sapiens
tagggtcttgttctgtcgctcaggctagcatgcagtagcacaatggcagctcactgcaacctccacctcctggggtcaagcaatcctccacttcaatctcccaagtagctggcacacaccactagagatgcacaccaccacgcctggctaatttttgtatttttagtagagacgggatttcaccatgttgcccaggctgttgaagttttagaacttctgagctcaagcaatctggccgctttggcctcccaaagtgctggaattataggcataagccactgcgcccagccctcactgcatttctaattcttcctcttgtttttggaaacagggtctcactctgtcacccaggctggagtgcagtggcacaatcatatttcattgcagctttgacttcctaggctcaaacgatcctcccacctcagcctcctggcttgctgggaccagagatgcccatcaccacgcccggctaattttttaaattttttgtagagaaggagtctcgccacattgcctaggctggtctcgaactcctgggctcaagcgatcctcctgcatttttaaacaaacatggaacaaattccaaatgaagtttttttttaaaacaatcgccttgagactatttattccaacaatgttattgttcggctaaaagcatttggtaaggttttctttcataattaccctcaaagctcctttagataaaagaaaaatcactcatgatcatatagtcacatcttactttgcatctataccaaaccaataatccaacctggtatgatactctagctgctagacttggctctaaagcaacttttagtcattctcagaaatcaaactgatactaagctgacatatcctaaaagttatgccaatgaggcattccagggaagcactgctgaaataaacacaaaaactcccatggtgactacgttgaggaagaccaatattcatttggataactaaatcatgatttattttaaaaaataataaaagccatttctgtcgttttttaatttaatgatagcccagacatacttaaatctctagaaagtgactgtggtttctctaaggtcccctacctcatatagcaaaag

SEQ ID NO: 241227 - DNA, 596 bp, Homo sapiens
tagggtcttgttctgtcgctcaggctagcatgcagtagcacaatggcagctcactgcaacctccacctcctggggtcaagcaatcctccacttcaatctcccaagtagctggcacacaccactagagatgcacaccaccacgcctggctaatttttgtatttttagtagagacgggatttcaccatgttgcccaggctgttgaagttttagaacttctgagctcaagcaatctggccgctttggcctcccaaagtgctggaattataggcataagccactgcgcccagccctcactgcatttctaattcttcctcttgtttttggaaacagggtctcactctgtcacccaggctggagtgcagtggcacaatcatatttcattgcagctttgacttcctaggctcaaacgatcctcccacctcagcctcctggcttgctgggaccagagatgcccatcaccacgcccggctaattttttaaattttttgtagagaaggagtctcgccacattgcctaggctggtctcgaactcctgggctcaagcgatcctcctgccttggcctcccaaagtgctgggattacaggtgtgagccat

SEQ ID NO: 241228 - DNA, 351 bp, Homo sapiens
gagacagagtctcgctctgttgcccaggctggagtgcagtggcgcgatctcggctcactccaagctctgcctcccaggttcacgccattctcctgcctcagcctcccgagtagctgggactacaggcacctgccaccacgcctggctaattttttgtatttttttagtagagacgggatttcaccatgttagccaggatggtctcaatctcctgacctcgtgatgcacccgccttggcctctcaaagtgctgggattacaggtgtgagccactgcgcccagccagatgaaggtttcttacagagctatcagaatacagagtttgtgatactgcacaggcatacgaaatgga

SEQ ID NO: 241229 - DNA, 399 bp, Homo sapiens
caattcttgaatcactatttgctcaaataagcccattaaatttttattgtacctcggtttactctttagcaaaagtaaacaaactaataaaataatcacaatttctgaaaagtgtgatttatttatgaaatttggaatgccccagtatgacaggcagtgggcacaccgctggaaatacagcatgttagaaaggagacaaatttcttgacctcgtgggattttcattctagtgggaagtgacaaaaaaaaatcagcagaaacagccctccttggccgggcgcggtggctcacgcctgtaatcccagcactttgggaggtcgaggcgggtggatcatgaggtcaggagatcaagaccatcctggctaacaaggtgaaaccccgtctctactaaaaatacaa

SEQ ID NO: 241230 - DNA, 231 bp, Homo sapiens
tcccaggttcagagatgtatgtcactattaggaattaagaatgcagccttgagcagcgagccagaagaatcactcctctaaagataggaaaaaaatgccaatttttaggaaataaagctacacaaattgtaagaaaaagctgacctttactgtaagtaattattcagttttgtttcattcagttatctatttccagcacaaaaatactataaaatcattaccacggtttaa

SEQ ID NO: 241231 - DNA, 617 bp, Homo sapiens
gaaaaaaagaaaatttacgcaggctggggcacagtggctcaggcttgtaatctcagcactttgggaggcagagacaggaggatcgcttgatgctaggagttcaagaccagcctgggcaacatagtgagatccctgtctctacaaaaaaaattattttaattagccgggcacagtggcgtgtgtctgtagtctcagctagtcaggaggtcaaggcaggaggatcacttgaacctaggagttcaaggctgaagcgagccatggttgtgctattgcactccagcctgggagacagagtgagacactgtctctagggggaaaaaaaaaacaaaaaactaaagcaagcagaagagttttatagatgcacaccacattgggcagtgaccagtacctgcacccacatgctctgcctgcccacctgacaccacaggtgaactctccttgctcctgtctgtgggtgattcctcccctatccatgtactacatccaggaaatggctgctgcaattctctctttgctttcttgtatcttcttttccttctctttctctcattattcctctctagattattacaaacgtggtaaattttttccatctaaaaaacaaaacaaaacaaaac

SEQ ID NO: 241232 - DNA, 576 bp, Homo sapiens
tatctttgagcagtctattcattatgaacacatgtaatctgttggaacaaagttctaggacaatccaggtcatccttcaatatttgcagaaaacagcacaaagaaaacttgatacttaaacttagttggaaactttatgccacagccattaaatacagagatcatataaaggaatagaggaagctgttgaatactaaactaactcaaatcatcattatccttacgaagtgcacactgaattaatgtaaaaagcatttagtaaacaaaaagtattttcaatatacaattaagactgaaaagtattgaggcctcataagctgaacctgacacaataaatttaaaagggaaactaatttggaaatcagaaaaccatctaaagaatttgggaattaggcttctgctgccctctctgctactgacggtcaaggcctcctcattgtattctgtcctccatatctctgctgattcccattttgtctatttccatttaccccactactacttgctcaggtcactctccttcattgtcggtgtttgttcaaattcctcagacccatccacttcccatctaaactt

SEQ ID NO: 241233 - DNA, 391 bp, Homo sapiens
tctgtgggctccgtagtcagacctcattgaaattcttgcctctaccacttgcagtcagcagtgtgctcttgagaacatctcctaactcctgagcctccagttttgcatctatgaaatggagctgttcaaatcactgacctcactgtgtcattgtgaggactgacagatgctgccaattaaagaaccaggcacaagacccagcatatgatcaaaacattggcactattattattcttatgagttactattattgtgtatttgggggggtttgaatgacttgccctaagtcacatagctgataaacagcagagttagatttgaactcagctctgactaatcccagagctcttctaccggaacacctcagggcagcgggtctcaagatgtggtc

SEQ ID NO: 241234 - DNA, 475 bp, Homo sapiens
ttccctttaccacctgttcatgtgcttcatattttgcttcctaggcatggcaagtttgatttctggtacaggagttcatgagtcattcttgccccttattctcttactgggggatattgggtagacttcgacatgtcatcatctcaccacttggtggagaacctgatgtcccagaccccccggcatctcctcatcagggacagaagataacctgttgaggagatggcagggttctgagacatcaatttctccaccaagtggtgagatgatgatatgaggaaatctacccagtatcaaggggaatggggaaattggtacgacttagcctcaacagttacgggagcaaaattatagagagtcattatcttgatttaaataacaaaagcaaaacccagtgacagtgaccattcattggtacagaaccttgtctcaagaaaaccttcaaatttcccatgttctaaaaccgagcgcaata

SEQ ID NO: 241235 - DNA, 441 bp, Homo sapiens
ccatcccctaggctgtgccatgactttctgatttctctcatatatgcaattgtgtttatgtctggctcccaaaaggggaaaatgagaaaaatgaatgggagtggggagggaaacaccagctctttaattctcctggaagtcacttcaaccagaaggtgaggggcttgcaacaatggaagtgcaacaatggctaatgactctctgcacctctgtgatcacgagtggcagttaggaatcagagcacagatctaacgttttgaggacaatgtactttttgcccccctagctcctacaagctgtgtgcaaaccactctaggaacatgtgcacagctgcgtgccatgagattcagtggtaggagatggttagctgctgctgtgccaagactggaaattgaccaattttttttttttttttttgagactgtctcaaattaaaaaaaa

SEQ ID NO: 241236 - DNA, 1806 bp, Homo sapiens
  misc_feature (1)..(1): n is a, c, g, or t
  misc_feature (5)..(6): n is a, c, g, or t
  misc_feature (8)..(8): n is a, c, g, or t
  misc_feature (357)..(357): n is a, c, g, or t
nctanngnttattcatttcatttattactcacaatctttctaggtagctatgctcttaccccgattttacataacaggaaaatgaggcccagagaagttaagtaacccatccaaagtcacacagcctgttttggagtgatcaggattggaacactgtccttttgttttgttttgtttcttattcaagtctgtccccttaattcctgaaccagggggttcttaaccagaggtcccccaagggctctttgaatgggcttcaggggctctgtaaatctcagaaatttatatgtgtacccaggtgggcacatttttctgggagcaatattatataacacccaggattctcaaagcgggtgnggatccagaaaaggtaaaggctggaatcaggccactgtagggaagggaggcaagccactggggaagggggatggaagcggcctcctcccaggcctggggagcagggaggcagctgcttcaaaattcaggctgggctccaagcctgctcctggacctgccctgctttttctggccacacccagctcttaggacctcagctggcaggaagacgtggggcaccatctgagggcaggacactcctttggtcccctccctgattctccccttccctacttcttttgtgagctgaattccttcagagcactgtgacaaggtgaccataccacatgcaccagcctcctccaggcactgtaatcctgcttggaaggagcggggagtgcttgccctttggaagtactgggggacatagacagaccactgagtgacagagacaggaagggaggagaagagacaagttcccagagatgctcaagtcctgggtgcccactctctgcagcctctagaacagccttctcttttggttccaagcttttgctcccctcatccaagggttgggatgatttgtgtcccttcctttcctggcacctcctgctctgtctctagtgctcaactcatttcctgggggaaaccttctctgccctgttcagctcctctgcgctccttagcacattcccctggatgtcactgtcatattgccaagaatgtgttgctttgtctgtctgtcctgcctctctctctccatctgttgtgaacttgggaaggaaggacctgaatcacctctccatgcccctatgccagcccagcatacaccaaggggtccaagcatttgttgagtaaataaactaaataaataaacaagggacaaaaatggagccagacagggaacttagcctgtgcctcagagagaggaccaggggtaggtgtattggttttgccagctgcctgcagatgcgtgcggtgctcctactgctcacaccaatatactcagaggggcccagaagcctcattctctaatgctttttggctatgctctcggccttagcgccatttttttggaaacctctgcgccatgagagccaagtggaggaagaagcgaatgcgcaggctgaagcgcaaaagaagaaagatgaggcagaggtccaagtaaaccgctagcttgttgcaccgtggaggccacaggagcagaaacatggaatgccagacgctggggatgctggtacaagttgtgggactgcatgctactgtctagagcttgtctcaatggatctagaacttcatcgccctctgatcgccgatcacctctgagacccaccttgctcataaacaaaatgcccatgttggtcctctgccctggacctgtgacattctggactatttctgtgtttatttgtggccgagtgtaacaaccatataataaatcacctcttccgctgttttagctgaagaatt

SEQ ID NO: 241237 - DNA, 503 bp, Homo sapiens
acttttctccagctgtttctcccttaccctctcatcaattttgataacttgtactttttctaggagaacatctatttcattgaggctttctttcaaatgcatttgcctagagttgtagaaaatattctcagtatcttctatatacctgttttactttctttctttcattttttggccaacaagagagaaactccgtttcaaaaaagagagaaaataggctggggacggtagctcacgcctataatcccaacactttgggaggctaaggcaggcggatcacaaggtcaagaattcaagaccagcctggccaacatggcgaaaccccatctctactaaaaatacaaaaaaaatgagccaggtgtggtggtgggtgcctgtaattccagctactcaggaggctaaggcaggagaatcacttgaacccaggaggcagaggttgcagtgagccaagatcgtgccattgcactccagcctgggcgacaagagtgaaactccgtcgcaaa

SEQ ID NO: 241238 - DNA, 495 bp, Homo sapiens
ggactaatacagcatccaaattaaaaatcggaatgaaaagcaggtttcatcctcaattcatccctagatcaccacttggaccccagctcttagctccagatttccagagttccaagtctacatgaacatgaaagagtcagggagactgtacatcttggcttgggcaggatggtcctgctttatacttgttgtcctggcataattattaatggcaccctccttcactctcaaaagtgtcctagtttacatgagaagtcttagagccatccaaagtcagggggaatcagtgactaaacacaaacttttaggagcaagttcatttattcaagtttgtgcaagccttcagatgaagctaagtagatttggcattgttttgtaagtataaagatatttaaataaacttccaaaatatcccaacagaacggttcaataaaagcagtatgtcatgaattttaaaatcatagacaatataggaaaggctatccatatgtgaaa

SEQ ID NO: 241239 - DNA, 398 bp, Homo sapiens
agaaaatgacaaccggatgagccctgggctttaataggacacctggcttagaattgaaatactaatcaaattatttgttatgactattttcagtaatttagcatttcacttataaaatgtctcatccactctgaatttctccaattgtagtacatggtgcatcatcctggaccatgatgaggataaaaatatctaccacttattaagcactcactatgttcccaacactgtgccaaacaaagaaactctaattaccttttcatccccattctgtagataaggaaactgatgtttagagaggttaagttacctatccaaggtgtggtaggcaaaataatggctccccaaaattgtccatgtcctaatccccagaacctgtgaatgttaccctgcaaagc

SEQ ID NO: 241240 - DNA, 474 bp, Homo sapiens
ccggttaaatattttgaatagccctgctaagcagtaatgaatataagaggtctagcctcgtgcctggctcatagaaagcactcaggaaaaggtagctgggactacaggagtgtaccaccatgtctgcctaattttttatttttatttttaaataaatggggtcttggccgggtgcggtgcctcacgcctataatctcagcactttgggaagccgaggtgggtggatcacctgagctcaggagttcgagatcagcctggccaacgtggtaaaaccccatctctactaaaaaagtacaaaaaatagctaggtgtgatggtgggtgcctataatcccagctatttgtgaggctgaggcaggagaatcacttgaaccgaggaggtggaggttgcagtgagctgagattgcgccactgcactccagcctgggcgacagagtgagactccatctcaaataaataaataaataaataaata

SEQ ID NO: 241241 - DNA, 382 bp, Homo sapiens
ctcaaataaaaaaaaaaaaaaaaaaaaaaggatagagggcccagaactcccatgtgtctataaatggagagtgaaggattcaactgttgaaggaagctcttgctgaacgtggactagtgcttactgtgcatgctatgcttacgttgttttgttttgaagtgtaaataggtagactcagaaaaccctgcttcctctggtccatctgcgccccctgagggagggatgctccagctggacaagagcttagacactgccttgagggcagcagtagtcagaatgcagctcccagaccgcacccctcatctcccaccagcggacccttgaacaagtcacttaactttctaaatgctgtttcctcattggtaaattgtggacaacagta

SEQ ID NO: 241242 - DNA, 425 bp, Homo sapiens
agtggggtaaggggaaagataagagccccagggaggttggagactgtgggattaggggctcccttcacccaggaaccaaggagctggggcagaggaggattttaaggacaactttggagttagaggataagagtttggagttgggattctgccctttcatgctgagtttctgcacatggccaaaaatctctttagcttggctcatgctgtatcaggcggtcgtgctagcccagggcttgggacactgcccaaattaagctttcttctagggctaagtcctaagctagaggcatgggttagtggctccagcttgccttggggaggtcaaagtaataccctaggcatcatacatcttcttggaggttccacctaacttctagaattagctggtaatgaataaaattggtagcaaatattaaaaaaaa

SEQ ID NO: 241243 - DNA, 491 bp, Homo sapiens
ccaggcatggtgccacatgcctgtagtcccactactcaggaggctgaggtgggaggatcgcttgagcctggagaggtctaggctgcagtgagtgatgattacgccactgcacacaggccctgtctcaaaaaaaatttttttaattaaaaacaataaaggccaaggtaaataaatgggataagttagaagtgaagtaatttaagaaacataaaataacttaggaaaattctaattggttttcatataaaaactcaagatcttgcatccataaaataaaaagtggaggctactgggaaaggaatactcagagggaaaaaaagttattggaaatcttttaattactgcaaaaatcaaaaatttaataagggttataagagaaagtttaagaaatctcccagaacacagatcaaaaagacagatttattaaaaaatattatttacaaggaaaggcagtatcaacccaaaaggtttgatttgactattgggaattt

SEQ ID NO: 241244 - DNA, 466 bp, Homo sapiens
gaagaaaaaaaaaagtgatttggtaattcttgggagctgtaagaccagtcagcaaagagaacattaatcactgggccactcagccagaagaggcctccaagaagggaacaatcaatgaataggtcttctctgggcagacagaagaaaaggtcaaaagcattaagccaggaaaggtaggggcatctcatgtacattttccaggactgtgtgtcagaataataactgtttcaagggaagcagtctggtatttcaagagaggccagtctcaaacactggcttgggaatgtcctgccactggctggtggtccttgctcctttactggagttgtatcagaagcaagtatcacagggccatttgtcttcaccatccctctaggctttagggtggggaagcaggaagtagacaagcaacccaaatggagcaccaagtaatttgaagaatgtcctgtaaaaccagtactaaaaa

SEQ ID NO: 241245 - DNA, 425 bp, Homo sapiens
ttgaataagtagtgtttaattactaaaacttttgtttaataaagagggtcggattttagggtgggaaataacttttggcatcaggtacatttaagcatggatctgttggaaggcaactatgctttctacacttaacacttgttttatgcacctaagttaaggaagacacttgatctatattacgatattaatgaattatgagcatttcagtgttgtagtattaagtttagttaggcttttagacttgcagaagaaccacagaaataggacggttattgcaaaaacaggaggtttagaaaaacaactcttaatcggcattagctgtgtttatcagtactttgtgatacaaatatttttagtaggagggaaaaaaaaccctgaggaatttaagtacttaaactagttagagcccctgtttattcaca

SEQ ID NO: 241246 - DNA, 516 bp, Homo sapiens
gagttctcactcacaccacctgagtcagaatttgtggaactgagtattaaagggtccataacttctttgcaatgtaaagaaattgggccccagagaggtggttaaagttatcttgaattatgtagcagaaccaggaagaaaaagcagttttttgaactgttgcagtacttttctcattctgtcattgctgtcattacctgactgccttcatgcctccatttcttttaagaaactttttttggtggaagacctcagaatcttcatggtattttctttggttctgactagcaatggctaagacaggttatctctcagtgcttatacagaaatcctttaggaatctggaattctattagattatcaatatgttagatatataataaatattagaaacattttatattttgtgtgtattctgaactgtttaaaaagcacaaatattacctgtttctagaggatttgaaaaaatttatctgaaaagaatggaactagctggactcaggtggtgtgcctgta

SEQ ID NO: 241247 - DNA, 130 bp, Homo sapiens
ctgcccatcccagtgaagtaagataaccaggaattttatttctgagagagagtatcctgggcctccacatcaaggagcaggaaagctcagccttggcttcttgagctatatcccagggagctgtatcagc

SEQ ID NO: 241248 - DNA, 973 bp, Homo sapiens
ctgctcttcctgatgagacttttctaggttccagcctctctccgggtgtcccctttttccctcctgccctaggggcctgacctcccggctccactagcttcgttctatcagcagaggtgagctgtgccaccacactttgccatttctcccatgagacatttcagcctgaaaggccgcaggttccaggcctcatgaatctgagccctattttcttagtatcattcagtgtgctgggacaggctgagggtgacaggtttggggcttctctcttggctgttttctgactttccacttcatttgtcttttctcctgactgcctcttggctggggtcttgctccttagcttgtttcttgtgacctgtgggatcttctttttagagcctggggagtagttttattaattacaatgtgtttattaaataaaggccaaggttatagaggtcctgatgtgtcacatgatatcaccttcttgcatttgagaatcaaatacaaaaccaccctttatttttaatttaccacctcacccattccaggcatactgctctggaagtgtccttcatgtgacatctgagtgcctccctaagacctagggtcttagggagtgaaactattctacatgatcttggaatcttggattcatggcattatgcacttgtcaaaacctacagaacttcacagcacgaagaatgaaagttaatgtatgcaagtttaaaaaatcatttaggtcacagaatctcaggaaagaatgtacaatgtgataggagaatctgttttacaaatgtatgaaacaaactcactgaagggcatgagaaaaggtgatgtaagtaactctggaaacgaagagcctaaaaccaaatgcaaaggaactgcacataatcactgtactccagtagacagagttgttacccacagagatatgggttaacaactctggtactgcaatacatatatactggaaatatacgattaagca

SEQ ID NO: 241249 - DNA, 449 bp, Homo sapiens
gaaaatggcctttaaggcacacactcctgaggtttcactgctgggttagctgacattctttccttcacttccctagttgagctgacctcaaagttcttggtgtccaagacttccaaaagaatgcaaaccacattatcttccccacaggggaaaacagaaaaaaacttggatgatacgtcaggataaggaataggtccaccacatggtggacctatttaagaaggaaggagagttccactgcaatcacaccaaaaatcaaggttttgtggacatggatttgtccacataaaaaagaagagtggttttgccattcagtcaaaggcccttaataagcagttaaaaaaagagcaagttgggagccattattcttagtttctgccacacacctgtgaaatcagatgcaagacagaatataaagatccctatctccaaaggatttgaaaaatgga

SEQ ID NO: 241250 - DNA, 338 bp, Homo sapiens
caaataataaacacaaatggatagtcaacacattttttgaaagaacatctgaaagacaaaatggggaatggcgagtctgtctaataaaccattttgagaaaactggatattcatataaagaagtataaagaggactgttatgttgcacaatacacaaaaatcaactcaaaataaattaatgacctaaacttaatatcagaaatgatgaaacttttaaaagaaaacatagggtgaatgtatgtttagggaaactcaaatttatgttcacaggttgcaaaaagaaaaatatgagaaaaacatagaggaaaatgattctgccaataaagtgagttggaaat

SEQ ID NO: 241251 - DNA, 385 bp, Homo sapiens
gctgtttaaagaagttgaaaaatttatctacggtgggcaaggactcagagtcaacatcttatcttggcacaagacaggaggtttggtggttgtaggagacctgtattctttccacacatgcaagtgagaatgaagtcttccacttgacatacctctaactctgatataaaactcagtaagttttggccaggtgctgggattacaggtgtgaaccaggccactgcgcccggcccctttctatttttgtacccattaaatatcccatctctccccaatccccccactaggttgttggaaagacaaaacaccgaaaccatttgtttgggctgggttatgaataaaaatgaaactaggctgttgcaaaggatagtctacttcaccaaaa

SEQ ID NO: 241252 - DNA, 456 bp, Homo sapiens
atgacactgatcctgagtaattcaaatattaggaaagacaattcatttgaatcatctcctttgaagagaatgagtgtctgaacaatggaagtgcagtaaaggaaatgtaattatagcatgcgagttgattgaagccaaaaatatttatctagttataataatataaattctgttcattgattttcaactttttggagtcagcatgcagacaaaacatagaaggattaattttgcttatagagcaaagtctgaatattatcaattttgatagtatgaaaacaacattatgaagctgacagaccttggaagctggaagggaggaagagagggagagtcagtacctctaaaatcttcctcttaggaaactgggagtcaggttctaatgaatatgttgtatggatcaaaaaatagaaggttactgtttaaatttataatagaagccaataaatgagccaa

SEQ ID NO: 241253 - DNA, 394 bp, Homo sapiens
cctttcaaaaaaagcttctttgaccatctcaatctaaattaacctcttcctcccataaactccctttgactccattaagctactgacagtttatgaaattatgtaaattccagtttatatgttaaatgattgcttaatttttcttacattatctttctaactagattgtttgcttcttctggatttgatcccccagctggcacctggctcagacttaattaatgctgcctgttcttgtctgagtttccatgaacttataaatacaagttgtttttgtaaattgagtcccaaacccatatgtttataagagcaaacaccttgagcaggattaactatgtgcaggtatggatattctgttgcatttttttctaaataaaatcttatttattggcta

SEQ ID NO: 241254 - DNA, 245 bp, Homo sapiens
agcattggaaccaagattgggtttatatcccagccctgccctcattagttttgtggttgctcatcgaccctgagctcatctgcaggatgacagtgatgtgaagattggggacggtcattgtctggcaggtgttcagcacattgtgggaagggcattgtttccaaccaccccctggatatttccacctgagtgtacagaatctcaaaaattcagcacatctaaaactgaaatcagagctcccccca

SEQ ID NO: 241255 - DNA, 330 bp, Homo sapiens
gtcctcaacattcataggatctttcttccatctgccaaataaaaaacaaacaaaaaaaaactggaagcacacactaaatgcagaaagaatctcccctttaaaaactgtgagtcattgtgaagacattaagtttattgtggccgatggagaaaggccatttccctgccgctcaaaaaaagatgtcctcatcctgatccctggaagctgtgaatatcttccaggaatgcttaaggtaagatttttgagatggagaaaggatctggattattcagctgggcccacaaagggaatgcaggaggcaggagagtcagagaaggaaatgtggtgatg

SEQ ID NO: 241256 - DNA, 482 bp, Homo sapiens
tttgatccgctcaaaggtggcttaggtgaaattggagtaattcccttatgggggtcttaaaatgtaagtgaatgtccttatccggggtgactcaaaagcttaagtcgggaagcccaacgtgactaaaaccaataggtgattgttcggggccgactgtgtgcgggtgtacacggtattcggcccgggtgtcatccgcggcgctggactgtttcattttgagtttgcaacttgggtttttcagcgagctttttttcttcctgaaagctaatggcttccacagcaattagacattttcctcgcccgccccttccctcccctttctttacatataggagatgggatactcattcccgctgctattgataaggtcggaggcggccgggcctctccccagctttcgcccgccccagcgcccgctctccctccgccctcccttggcttccttttgatgtagtggggaacgcgtcctactaaaaaaaaaa

SEQ ID NO: 241257 - DNA, 875 bp, Homo sapiens
ggagaggataaaaggattgggatagaaaaaaaaaaaagaggaaataactacagaaaactttgcaaatttggggaaagagatagtctttacgcatccaagaagttcacctaatcccaaacaggataaacccaaagtaacaaacatttggacacattgtgattaaaatattgaaaacgaaaaataaattttttaaaattttgacaattttgacagcagatataggaaaagacacattccatataagcaaataatgatttgaattagagtagatttctcattagaaaccacaggagacagaagacattggaacaatattttggaagtgctaacataaaagaactgttaacctagtgaagataccccacagaaatgaaagagaaataaacccatttttagatgaagaaaagctaagaaagtttgtcaccagctgctctattctacaagaaatgctaaaggaaattctgcaggatgaaggaaaatgatactggatgaaaaattagatctttaggaatgaaggaaaaccaacagaagggataaatggctgggtaaatatattttttaaaaaactacttaaaaatatgtgtgactcttgaaatcaaaaagcataacattgtctgctggttttttcagtgtatgtagatgtagcatacaagacaactatagcattaaggctagtggaagatggagtaaaagaatctatggttgccaagtttctacatatcatatgaagtggtacaatataaactcttaagtagaccgaaagttttggtgcatatgttttactctcttaggacaactaataagaaaatgcaaaaatacaaaaggataaagccaaaaagtcaatagagaaattaaaattaaatactaaaaaatat

SEQ ID NO: 241258 - DNA, 178 bp, Homo sapiens
tacaagtaatatggtgctggattttgaatggctgttagtaagacaaacagctccacaaagtcaattctctccttaatacccactgtcctaaacattttgcattagtctttcttgttctcagtaccttacataatcacatttgcatcccatctgtccccacccccaccatgatttttcc

SEQ ID NO: 241259 - DNA, 501 bp, Homo sapiens
aggggagatggtctgttttccttgtgttaaggttaattctttgggatcctaaattcattgagctgtttctttctacatataactaatttttgaaggttaaagagacagtgtaaaatcccaaagtggtgatcatcaatgatttttcaaactattagatgaaaagcttactgtggaatttatgatggatcagtctgtcctcactagtgatcagttttaacatcactaaaagtaggacaactagacattatgttcctgctgatgtgatgcaagaagaagtacacagcaccacctgggaagtattcttgccaagtaaattgaacttgaatctaatcagatctttggactaactatcagtttacaggaaatactagagatggaggaacatgttagatggcacatcaagcatattgttcaccaaatctagaatgtgaaaatttttttttaggacaaatggcccaatttcctcagttaataaatgacctttttaaaataaaaaaaaaa

SEQ ID NO: 241260 - DNA, 509 bp, Homo sapiens
cgagaatcaacatcttctgtgtaatttccaggaaatgcctttcaaactcactgccattaggtagctctccaaacttcacttagaggaacaatgttttagaaggattccaaaaataggaataagtgcagtcctttttctctagattggcattttctgaaatgtttcctggaatagtcttttcgtaatatattaatagacgccactaggataaaggattttgtttgaaaagtgttggattagatcaaattaagcaaagcagtggagagggcaatattatgctgtgtttaccaaacagctttgaccacagaacacctaggaacatttcatagatcccttggaacacagtttgggaaatgctactccagaggatctggagtaagacaaaccagcagagaaccagagttagcctttctggtattccagtttagaacagcaccatatgctctgcagatagaggctctaataaccctatgacaccaatgccaggacttttgaatgaatgagtagaa

SEQ ID NO: 241261 - DNA, 364 bp, Homo sapiens
ggtccttgtacttttttctattttgtcaactactggactttttttcaccattgtgcatcctagttttgaagtcaaaatcccaatttatttgaaacacaatgtggtttagcatattagtttcctagggctactgtaacaaatcaccataaacttgatgtcttaaaacaacagaaatttattgtctcacagttctggaggacaaaagtccaaagtcaaggtgtcagcagagttgattccttctgaacactctgagggagaatccattccaggcctctctcataccttttagtgcctgctagcaacttttgacattccttggcttgtagaaatagcacttcaatctctgcctccatcttctcattgc

SEQ ID NO: 241262 - DNA, 1282 bp, Homo sapiens
gccactacactccagcttgggcgacagagggagactctatctccaaaaaacaaaaagaaaaaaacaaagtaaagctcatcaaaatatatgcagcaactcagttcacctctctggttttgatttctctaaccatatgaccttgggcaaattaccccctggaggacttgacttcctaatctaaaataaacactcaagatgatatctacttcacagagatgtgaattttgaatgagataatttagattgaaagcaacatgtgtatgcatatgtacttcctactttaggccagagccatggcctaagtttattaacaagactgctttttttgttgttgttaaccaaacagcatctcactgttgcccaggctggagtgcagtggcacgatcatggttcactgcagccttgatctgagtgagtggctgggactacaggcgcacactaccacactcggctagtatttttaaaatctatttttgtagagacgggattttgctgtattgcccagctggtcttgaactcctggcctcaagtgatcctcttgcctccgactcccaaagtgctgggattacagatgtgagccactgcgcccaaccggtaacaagacttttaatagagacacctgaaaggtcctacagtttgatttgtataaccaactacatgagcattgcacaggagaagggcaatttagcatctctaaaaagattaaggggattttgcttctagcaagcttgatatgaattagtaataggatgtgactgctgtttaccaacaacattcagcaaagattgattgattgattacctaaccatgtaatggacgtttaaaaagtctattcatagaaatatccaaaactgcaatttcccaagagtaagttctgcagagactcacttgatgttctggtttgggaaatggcaggctaaataactaaacatctctcttctgggaatttctgggccttgagttattgtgcattgtgaatctccaaaaaggggcttgcttttacagatctttggtaacaggtggaacagggctgctggtggtttgtgtgtttctaggctcatcctattgcatctggacaactccgttagtgtggtcacaactctttgtcaagtgtagacaactgggccagtatgcagagagcgcagcctggatggggagtgaggttgtgatgatgaagttgtgatgatgaagatgtgaagttgtgtgaagttgtgatatgggaggggcacacatagaaggggcctgagtgggagagggtgtctggggaaggttgagagagaac

SEQ ID NO: 241263 - DNA, 1228 bp, Homo sapiens
gccactacactccagcttgggcgacagagggagactctatctccaaaaaacaaaaagaaaaaaacaaagtaaagctcatcaaaatatatgcagcaactcagttcacctctctggttttgatttctctaaccatatgaccttgggcaaattaccccctggaggacttgacttcctaatctaaaataaacactcaagatgatatctacttcacagagatgtgaattttgaatgagataatttagattgaaagcaacatgtgtatgcatatgtacttcctactttaggccagagccatggcctaagtttattaacaagactgctttttttgttgttgttaaccaaacagcatctcactgttgcccaggctggagtgcagtggcacgatcatggttcactgcagccttgatctgagtgagtggctgggactacaggcgcacactaccacactcggctagtatttttatcctggcctcaagtgatcctcttgcctccgactcccaaagtgctgggattacagatgtgagccactgcgcccaaccggtaacaagacttttaatagagacacctgaaaggtcctacagtttgatttgtataaccaactacatgagcattgcacaggagaagggcaatttagcatctctaaaaagattaaggggattttgcttctagcaagcttgatatgaattagtaataggatgtgactgctgtttaccaacaacattcagcaaagattgattgattgattacctaaccatgtaatggacgtttaaaaagtctattcatagaaatatccaaaactgcaatttcccaagagtaagttctgcagagactcacttgatgttctggtttgggaaatggcaggctaaataactaaacatctctcttctgggaatttctgggccttgagttattgtgcattgtgaatctccaaaaaggggcttgcttttacagatctttggtaacaggtggaacagggctgctggtggtttgtgtgtttctaggctcatcctattgcatctggacaactccgttagtgtggtcacaactctttgtcaagtgtagacaactgggccagtatgcagagagcgcagcctggatggggagtgaggttgtgatgatgaagttgtgatgatgaagatgtgaagttgtgtgaagttgtgatatgggaggggcacacatagaaggggcctgagtgggagagggtgtctggggaaggttgagagagaac

SEQ ID NO: 241264 - DNA, 882 bp, Homo sapiens
atttgcagagcatgttactagcaatgagggacggctgagagaaagagctccagaaatctgcagagggatccccctgagccttctgctgaatattaagtgctagctgtgtagggtgaaatttgcaaagcaggcaagaacaactgccatgaagctttgaggtgaactattcacagtgcttgcatcaggctggggacagccattcgaaacagccacaatggagacagcttattaaacaaccagggcacccaggagagagcccagaagggacacaccttgatggataaaatagttctaaaggctactctagacacacaaacagaacacaacaacaagccaacaagtgatcaagctgatctacaagtaactcactgcctgctaacacaagtgttaacacttttaagggaagcaatgaaatctaggcactcaacatggtaatatctacaatcctgttttactagaaaggagtaaaaacaggaaaacataacccatagctggaagaagaatcagtcaaaaacagatcgagaaatggcagattatacaatttaaaacacctattttacacaaaaagaataaaatacctaagaatacagctaaccaaggaggtgaaagatctctacaacaagaattacaaagcactgctgaaagaaatcagagatggcacaaacatggaaaaacattccttgttcaaggataggaagaatcaacattattaaaattgccatactgcctagagcaatttatagattcaatactattcctattatactaccaatatcattcttcacagaattagaaaacaaaactattttaaaattcatatggaaccaagaaagagcccaaatagccaaggcaatcctaagcaaaaagaacagctggaggaat

SEQ ID NO: 241265 - DNA, 406 bp, Homo sapiens
gcaggctttgcgaccttgtgaggcttgggagagaagcctggttctcatttgaacagatgggcctgtttgcaaatacttcctctgataccctagaacagacaacatcctgtctgaggtgcactagggccccgtcttacagaagaggatgctgatgaccagggaagcccattaataaggtcccactgctgcctggagagcaagcaagtcagaggtcctctggggccagtgggccggtgctgagcagcccacccagatgcagttgatgcagtggaggactctccagccctagaagactaccgagatactagaaaggaggtgccttgtccccaaaagactgggaggagtggaacatcccagctagctcactttaggctattactgcaagaaattaaacctgtatagtgtt

SEQ ID NO: 241266 - DNA, 498 bp, Homo sapiens
gccaggatggtctcgatctcttgaccttgtgatctggccacctcggcctcccaaagtgctgggattacaggcgtgagccaccgcgcacccggccgtcactatgtatttataattactgttctttgaaaatcgaagtaactttcatctacccagtgcttactggtttgagaaaaagctttgttgcttttatttcagaagattaaaatttaattttccagtaaagattccttttgctccagtggaattttgaagcgttatacttgtatgaagaaaaaaagaatttcaaaatttataatttttgtggtaccatagaggggatactacttaattatgctagcactgtctgcagaggtctaaaaaaccataggctgctgtctatattgaacttgttaagattccttttgtttcacagtgcctgaagattggtcatgaaccagtaatagccattaaacaatgtctgttctcataagagatgaaataaatacaaattaaaacaac

SEQ ID NO: 241267 - DNA, 426 bp, Homo sapiens
cagcttgtgacttagccaaataaatcttctgattcctagtaaagtgtttttcattatacgaaatgccagctatgtaagaggagattaaaagtactaagaactgtaagtactgcattgattatcatatgctaaccatgggccaggcacggtggcacacacctataatcccagcactttgggaggctgaggcgggtggatcacttgaggtcaggagttcaagaccagcctggccaagatggtgaaacccctgtctctaccaaaaatacaaaaaatttgccagatgtggtggtgcatactggtaatcccagctactcaggaggctgagtcaggagaatcgcttgaactcgggaggcagaggttgcagtgagctgagatcgtgccactgcgctccagcctgggtgacaaagataaactccatctgaacaa

SEQ ID NO: 241268 - DNA, 683 bp, Homo sapiens
  misc_feature (586)..(586): n is a, c, g, or t
  misc_feature (590)..(590): n is a, c, g, or t
  misc_feature (594)..(594): n is a, c, g, or t
  misc_feature (611)..(612): n is a, c, g, or t
  misc_feature (615)..(615): n is a, c, g, or t
  misc_feature (627)..(627): n is a, c, g, or t
  misc_feature (659)..(659): n is a, c, g, or t
  misc_feature (676)..(676): n is a, c, g, or t
ctaataagcccagggaagaagagtcagacccagtgccagcgcaggggaaacgcatctaatccagaacagcagacacagctcctctcccatggaacacccagagcagacattgccagtcgatcccagcaccctttccccgggagcctgggctcagcctcaagactttgcttccgcttcacaaagctctgcacagccagttctcatcaattggagttggtccaaaatatggaaactctttgctctgcctgacccaaaccattcctctttcccataacaattctgacatttaaaaacagcagaattccccaacactcatccccgggaaaagaaatttggcattgttggtactttcaactcctgaccctggtcagctgttgagtcaacttgtggttgagtctgagccccatttctgcagacagaaagaccgcatttgcgtttctgagtctcaggtttaggatgaattttgtatagtcactgtaacaaattactgcaaacgtagtggcttaaaataaaacaaatccattagcttaccaaaaaaagaaaaaaaaaaaaaaccccgagggggggggcccggggaccccaattntggncccnaaaaggtggagccgggnnttnacaaattcaacntgggccggccggtttttaaaaaacggccgggngaccttggggggaaaancccctgg

SEQ ID NO: 241269 - DNA, 568 bp, Homo sapiens
ctaataagcccagggaagaagagtcagacccagtgccagcgcaggggaaacgcatctaatccagaacagcagacacagctcctctcccatggaacacccagagcagacattgccagtcgatcccagcaccctttccccgggagcctgggctcagcctcaagactttgcttccgcttcacaaagctctgcacagccagttctcatcaattggagttggtccaaaatatggaaactctttgctctgcctgacccaaaccattcctctttcccataacaattctgacatttaaaaacagcagaattccccaacactcatccccgggaaaagaaatttggcattgttggtactttcaactcctgaccctggtcagctgttgagtcaacttgtggttgagtctgagccccatttctgcagacagaaagaccgcatttgcgtttctgagtctcaggtttaggatgaattttgtatagtcactgtaacaaattactgcaaacgtagtggcttaaaataaaacaaatccattagcttacaattccagagattaaaagtccaaaatgaatctttaaa

SEQ ID NO: 241270 - DNA, 513 bp, Homo sapiens
tggcagaacggactcggggctgtccttcgtggcccggaccccgcgaggcctgtccttccacctctgtggggaccaagagggcaaggatcgtgccaggctcaccgtgggcgctcagtaagcggccgtgcagaggacggttgagggctttgtgcagaggaaatgagagactgctctgaagcaaggcccgcctagtgagctgctaggaaaatggaagtctgggattaatcgtctctacaaggagggtgcgtgggaggcaccaaagcaggcggtcacagctcccgcaaaggcagccggctctccttccccgcctgacgctcagggactactcgcacagactgggctacttccttcttcattcattcatcaagtatttattgagaaactgctaagtgccaaatgctttgttctgggcattgtaggggcagaaaggtgtgatattttcccttactcatcccaaaggtcacagcggacactcctacaaataaaatataggttagcaagagaaaagcataa

SEQ ID NO: 241271 - DNA, 349 bp, Homo sapiens
tggtcagctttattgcaaaatttgcacacaacagactgtttataaagttttttgaaattgcaggccagggtggtggctcatgcctataatcccagtgcttagggagactgagacaggaggattgcttgaggccagcagttggagaccagcctggacaacatagtgagaccccatctaaacaaaaaatttttttaattagttgggtgtaatagtacaatcctgtaatcccagctgttcaggaggctgtggcaggaggatcgcttgagcccaggaggtcgaggctgcagtgagctgtgatcatgccactgcactctggcctgggtgacagagtgagaccctgtctctgggg

SEQ ID NO: 241272 - DNA, 918 bp, Homo sapiens
attaatattttgtttgtttttattgctctatatagtccatggcatgtgtatattacaatttgtttatccattcaccagttgatagaaatttgggttgttttcagttttgggccattatgaatatttgcatacctggtttcatgtggacatatgtttttatttctctaggttgaatacctaggaatggaattgcttggtagtatggttaatgaatgtttaccgttataaggtatttctatactattttgcaaagtggctgtaaggttttatgttcccaccagcaatgtaggagagagtttcagttgatctgcatcttcatcaacacttggtattcacagtctatttaactttagtctttctagttggtgtgcagtggtatcttgtggttttaattagcatttctctgaggattagtgatgttgaacatctttttatgtgccaattgactatttgtatatcttcttttgggaaatttctgttccaatctttggtctatttttattggtttttttgatcttttgattgagtcttaagggttctttatatattctgaatacaagttcattgttttgaaacattttgcttccaatctgtggcttacctttgtgttttcttaacaatgactttcgagaagcaagacttttaaattatacagcccattttcaattttttttcttttatcatttgcacttttggtatcctgtttatggaatctttgcctaaaccaatgtcacaaagattttcttcagtattttcttctagaagtttaatggttttatctctaacatttaggtttataaacatttttgagttaattttatgtataatgtgaggtaaagtttgaggttcattatttccatgtacgatatccagttgtttcttatctctgttggattatcctggtacctttgttgatag

SEQ ID NO: 241273 - DNA, 1666 bp, Homo sapiens
  misc_feature (83)..(83): n is a, c, g, or t
  misc_feature (151)..(151): n is a, c, g, or t
  misc_feature (399)..(399): n is a, c, g, or t
  misc_feature (804)..(804): n is a, c, g, or t
  misc_feature (834)..(834): n is a, c, g, or t
  misc_feature (853)..(853): n is a, c, g, or t
  misc_feature (908)..(908): n is a, c, g, or t
  misc_feature (1106)..(1106): n is a, c, g, or t
  misc_feature (1204)..(1204): n is a, c, g, or t
  misc_feature (1342)..(1342): n is a, c, g, or t
aaaaaaataaaaacaaattaaaagtagttacctctggaaagagagggagggaaatgtgattgagaaagattatgtaggaaatntcaaatgtaagtacatacatttttttcttagataaaacaaaaataaaaatctgtaacaaatatagaanaaaataagatttgatatagctatataacagtaaactgatgttaatgatattatttcctatacctttctagatggtagaaatatttcactgggaaaaaaaaaagaacaattgaccagaatagattgtccaggatgcggcgaagtgaataataagagaaagggttggagaatttgcccagaagaggaaacagcacatacacagtgggctggagcaagtggacacagtcagggtgttggtagccgttctcngtcaacatccagaatattgttgtctacttctgagggagacccagagactgaagatgaaaagtagttagatttgaaattatgtttcctcgtagtaacatgatcattccttatattcaagcctagacagtttcatatcaacatttctccccaccatagcgctctggttagattacataatatttgctcttctcacatcctctaccaattataactcaattcatactagataagtataattgattttaaaaaaccctaatgtatttaaaaattagacttttctttacaaaataatagtgcattttgatatgacattaaataaaactaagaatgctttgattaaaatacaggaaaagtgaagtttaggaatagtgctatgctctagtctcctcttggctgtatggttgntgtgccttgtgagaattctcactgttacanggctataggagaagcatgnttacagcaaatctctgattcagcagctagataaacaattctcttgaaggaggtgnaaatttcttcctccttagagaagcatttgccacaaaattagagtcctatggggctgctctgctaatcttgcctccaaactaacttagatctgatggagacaagagatgaaaaagtgaatgttgtgagtttgttttcagaaaaattcattgattagaaagtgataatttagtcaacttgattatatcatatagataaanagtccttgggggtttgtggaataaagcatctttctcatctgaaatcagttaaaattgcctggtagactaagtgaataattttctccatgattagaacngacaatgaattcatatatcttcagggcatactttccactctataataatccagtgaatactctttggaataataggtcataacagttcctccagcttcagagttaatgaggtaacacaaattcccacaccatcacaangtgagatgggtcatacacaatatgagacaggttcatagaagttctttctcattttcctctctaatcaccatagctttcctaatgaaacaaaacaatctgataaaactttgctagaattaaacctgaattattaggcaagaatacagtgacataagaatgtcaaataaaagaacattggttttgataaatttaatatattcttattacaggccaattagaattttagatagaaatatgtgataatgtctatttatataaagcaagaatatagaaaagactgaaggaatgaaatagttaaagaatgaaggaggaagaaaggtatgg

SEQ ID NO: 241274 - DNA, 590 bp, Homo sapiens
tggtagcagcctagacaagcagccggtagagatataagacaatggcccctcggttgtggttgccatagcccttagtatgttttatcacttgcttagagttttgttccaaaggcaggagccatgtggcagtgcactttcagtgcctcaagcattgtttgtatgtatagttcttgaaaattcatctcactttgtcacgtcacaagatgaatacgtactcagacttgatgtgaaatgctttcttttgatcatcagtgcagacacagtggttcgacttcattagtcagaggtggggcccagatactgatgttttttcaaagctccccagatgattctgatgggcagctgatactgagattttttttttttttgagaaacacagaagcatataaaacaacaatctgttttgcatatatgcagtacttggtatttagaaaagctgtttatagcctattcctattgtcaacttgaattaccataaggaaatatatttaaagtttagccttatcacctgtttgcattaggcagtggtctctaagaagcctaacaggtatttgtaagaaaagtaaattttaagcacaactcatccatct

SEQ ID NO: 241275 - DNA, 357 bp, Homo sapiens
aatatctaataaattaataaatatttaatacattaatagatggataaatgaacaatcaaccaaataagtggacatgtattctaggtatagcgacaggcataccttattttcttgtattttacttttttgtgcttctcagatattgcatatgtttttttaacaaattgaatgtggcaactgcataaaccaagctggtcagtgccgtttttccaacagcaagtgctgacttcatgtctctgtcatattttggcaattctcacaatatattaattttttaattattatatctgttatggtaatctgtgatgtctgatgttaacattgtgactatgcccatataaaatggtaaacttaaca

SEQ ID NO: 241276 - DNA, 352 bp, Homo sapiens
ctcctgcaggggactaggaggccggcttttatcagctcatgagcttttaaaaatggagagaagggcaggtgtggtggctcatccctataatcccagcactttgggaggtcggggtgagaggatcatttgagccctggagttagagaccatcctgggcaacatagaccccgtctctacaaaaagtaaaataacagtcagccaggcatggtggcacacatctgtagtctcagctacttgggaggctgaggtgagaggatcacttgaacccaggagtttgaggctgcaatgagccatgattgtgccactgcactcctgtctgggtgacagggagagatcccttctcttggaagag

SEQ ID NO: 241277 - DNA, 1920 bp, Homo sapiens
gtattcctactgtgctctctgaggatgtggatgctgttgatctgcggaccacactttgagaaatacacaggtgacagctgtggtggaaagaactcccatccaggaatcaaaacatgtcttcacattttggccatggaacttgggggtcttgctttgttgctcaggatggagtacagtggtgcaatcttgtctcactgcagcatcgacctctggggcttaagccatccttgcacttcagcctcccaagtagctggtactacaggggatgcaacaacaaggcgccatcttggaagtagacaccaggccctcaccagacaccaaacctgctggtgcctcgatcttcaatttccagcctccagagtgtcatggtttctggaagaaaagactcaagatgttctcagtagctgctgttttcagacatcatgaaagtcttctcctaccctctataaaaacaaacaataaaactctacaaaggaaaagcccacaaaaacatgctgactttagaagaatccatgatttagaatatttttataaatatctaagaaaacaggagtcctttccatatatatggtccttggagatactttccatatatatggtccttggagaatccagtttttatgagaaaggtgatttccaaaatctcttacactttacaatttcaattttggcctgagcatatctctcgattgatctacctacctacatactgatctatcttggatagagcactggacaaaaggtaggcactgtttacaatccactgacaagaaaacacatgaagaagcaaaccccacagcgctctgaaacctggaagagatgggttctacatgggtctgatgggattactgtactaaccagcctccgaatatcccgctccgactcccacttgatcttcgagatggcttcttggtgggactgatgctcactccgaaggtccccagccttgattttatctgcttggatcatattgctcagagcctcgtccacctgcttcttggccgttttcaggtccgcaatttcctgtaagagcttaaggcgctctgtgtcaaacagtttccgggcctcctcccgggcctcaatggtgagcgctgtccttactttgtcactgctgccgtcgcggagagcacagagagcagacttgagcctctggatctctccatcacgtaccttcaccgtccttgacatttcctgctcgtgctgcttgataaggttctccctcacagcctgcagctccttcatcttctcctcatggagcttggctttgagttctgtcaccagcaccgtgtgcttgcgctgctccagctcacgaatcctcttcgcttcttgagtcttctctctttcaagctttgatacctaaaaacagagaggcgaaatgatgaagagaaatgagcctcaaaggacgggtgtgctcctaggcaggatttgcagctcaggccgctgtgatctcttaattcctcatctcttttccaattccaggccctctgagaaaaaagaactacaggccttgaagctgggaatacagtgtgtaagaggaggaaatacctgaggatatttatattactttgttcagatgaatatttgatgttctggggccttactatgcaatgtgtggtctgcagacaagcagcctcggtatcacccaggaagcatgttagaagcacagaatccctggcttagccccagatctatgactcagaatttgcatcttaacaaatccccatgtgattggtatacgccttaaaattagaaagtatcgctatcatggtttttccctttacggggaggactgcaaaacagatcgcctggagagctttttagactacacaaccctagctagatccaaactgataaatgtgtgtcttagaatagctcacagtttgatattgtgataaggctaataaattagtgcctcaagtg

SEQ ID NO: 241278 - DNA, 2200 bp, Homo sapiens
  misc_feature (1600)..(1600): n is a, c, g, or t
  misc_feature (2190)..(2190): n is a, c, g, or t
aaaaatttaagagattgaggtcattttaactacatttttttaaatacggttacagatttttaactatgaataaggacgttagcatacttagactattcctcgttctccccacctcccttatacttagttccttcatgttttcctgaactaattttatttttgccttatttttcttaaaaacttttaatttctgctattttgctatattttatgatatgttaagccatccttagtttataataggaacatggcagaatataaataaatcatagataaacatactagaagttattataatttaaaattttgataattctgatttatgatttaccagtaattttttggtatgcaatagtatgtgtaatggttacttctagttctgtattcactattgaaagcacgctttaaagcagcccagaagtctctttaaatccgtatttacctctacactaataaatctctataaattgttgtgtcttcaatttaccattaataagcagtagaaaaaattgttttgctttgctttggtactactgaaattgtgtgttctaatatagtgaggccatgaggtgagtgactcctagtttgctattttttaaattacaggctgttaagtcagatctgccaggatcaggtcctaaaagtgctatttttcacacatcaaaatccaagttgaaatactggcttgtttgttaagattaattaactataggtaatacttgcaccttgcctcattaaaagaagaaaaaatgccccactatattcactcacagaattttagtagaaaaattaatgatgaatgtaaacaaacttcatgcaaatacaacatttttaccatttaggaaaaagaaaaacatgatttttccccctccaaaatagagataattactgataacgcaatttgcagctgttttcttcatgtgacctctgttttttttttgttttcaagtatcagaaaattgcaaacttgaccatctgatctcaggtagttgagcagtattgggtgttaaaaaaatactggaattagacacatagtagctctgtcataattggatttgaactttgacaagtttcttagccctgtgagcctcagtttcatttgaaaaatgatgggattaaactagcaggtcactaagtgccttctatttgtaaaacctttgttcctaactgagctatattgaaaatatcagtgccctcttgagtgttcctatatcaagttgcattgcagcaattttaaaacattgttcaaacaaaatacattgactttgaaaaataaaaatatctttgaaaagaagtatgaaatgaaaataagtaaataaaaaatatgttgacttcctttaacttaagctttaagtggttttgtgaaataaaacaagtgtaactgagtgtccaacctcaacacatcagtgatcatatttctgtgacaagaaccacattgcatctctgaagccctgtagtacttccccgggtttgtcctgcagaccaaggcacattgtagttttaaacacagactggaaatgttcagaagattcagtggaagtcatggaccaggaaagatggagttggtggtaattcagacaattagtttatttgctctgangatttctctaggttccagaagtacatgttttaaattatagtggctatttgtcccatgaattacctgaaattaaacagtttaattttaaaaaagcagtatttatttagaaattaaagatttttgaaaaatttgcatatggtaatgaataactttatcttctattagatgatcatcatgaaaaagtaaatgaatgtatttaaattaatgggtttcaaagattagacacaagccctggactttcaaaatatatcttttagattataaaaataattcatgctaatcatagaaattttataatttacaggaaagtataaagaaaaataaatttatcagtttcatcatctggagataactgctgctcccatttttctgtacttttttctttttccattcacaccaacaaaaatattttcactttaagtgtcagtgggattatattgtatatacagtttttgattcctccccttcccactcatatccttatatgattatagaaaaatgtctctaattgctacataatattcccttgttttgaccattcaaatatcttgccagcttttaatgattataaatactgctacaataaaganccttgcatat

SEQ ID NO: 241279 - DNA, 497 bp, Homo sapiens
actctccttcaccagcaagaaactgggaaagaaaattgcccctcttgagttgatcactcatatgtaaactgcccaccccactgcagttaacaccctgggttgggtttgcaatggttgggggaatcccagggcatcagaaggaagtttggaggacatgtggcggtggtctaatcattagcaggattctgcaggaaacgacaagtttaaggagccagatagctcatggccaagaggagagtcacagaaagatgatgacgccaacttgggccagccctgtactataggagtttgacaaaggggtctatagacaccaggccaggggtactccagtgtgctccacataacagcacctggacacaaaccaagcccctactgcaacaaggcatgctcagaaattgacagtgagtgtctagaaactgctatggaaacaggacgtcgtaattttatgtctgttgaatctaacaagaaaaaaatagagcttaccttttgcaagaaaa

SEQ ID NO: 241280 - DNA, 476 bp, Homo sapiens
  misc_feature (28)..(28): n is a, c, g, or t
gacaaaaaaaaaaaaatagcacagtgtntgtatatgatatgtcactctcatgtgcaattacttgaaaatctgtaataaaatgggcttatctgggagttgctttaaacatatttttcggctgggcttggtggctcatgcctgtcatttcagcactttgggaggccaaggtgggaggatcacttgagcccaggagtttgaaaccagcctgggcaacatagggagacccccatcaccctatttttttttttttgatacagagtctcgccattgtactccagcctgtgtactccagcctgggtgacagagtgagactcaatctccaaaaaaaaaaaaaaaaaaattagccaggcatggtggtgtgtgactgtagtcccagctactcagaaggctgtggtgggaggattgcttgaacccaggtggtcagggctgcagtgagccattattgcccactgcactccagcctgggtgacagagtg

SEQ ID NO: 241281 - DNA, 480 bp, Homo sapiens
agctgtgcctgcacttattccactgaaattgtggaaatgatataccatctacctgagaggattgttgaggagtttatgggaggaaatgggagaataatttgtttagtgtcagttaaagaactcctggcgtattcaacaaatgtgtctccatctgctatgtaactactccaactcaatcctatcaatatgtattgagtatcagccaggcacggtggctcacacctgtaatcccaacactttgggaggcggaagcggggggatcatttgagttcgggagttcaagaccaacccggccaacatggcaaaaccctgtctctactgaaaatacaaaacaattagctgggtgtggcatacacctgtaatcccagctactcgggaggccaaggcaggagaatcgcttgaacccgggaggtggaggttgcagtgagccaagatcacgtcactgcactccagcttggacaagaatgaaactccgtctca

SEQ ID NO: 241282 - DNA, 284 bp, Homo sapiens
tgtgcgagccgagtcagcctggccctgagcctgtccacctccaccccactcagggcccctcatctcctgcagccccaggggccttgggaggttgacctttgttggagctcagaaaacaataccccaaaatgagggactcagaagcagcctcaaaagctaaagttggctgagtgtggtggctcacacctgttatcccagcattttgggaggctgaggtagaagaatcacttgaggtcaggagttggagcccagcctgggcaacatagtgaggcccccatctctat

SEQ ID NO: 241283 - DNA, 361 bp, Homo sapiens
tagtagagacagggtttcactgtgttagccaggatggtctcgatctcctgacctggtgatctgcctgcctcggcctcccaaagtgctgagattactggtgtgagccaccgcgcctggcctagctgtaaaatcttaatctttctaagcttcgagttcctcatatataaaatggagattataatatagcactggagcgagtaatacaagagacaatagctatcaaatgcttagcaaatatacaatacatagttaagtacttagaaaatatgttttcagttacttcgggtatatacctgggaagggaggcagaaaattttggtcattctgattattattactactgttaagcatagaagcacca

SEQ ID NO: 241284 - DNA, 450 bp, Homo sapiens
tgcataggcttctccctaacctggagcaagtcaaaataatagagacagtcttatattccttgtctcgggtcgacggaatctgagacgagtcaaggtaacagaggcagctgtttgaatagattcatcggagggtctaaggcagtctccagaccaagctgtaagggaggtaagatagaaataatcattcaggtaccacagtagacagaccttgaaggtaccagggccctcacagcttaatcagacttagcaagcattttttgcctctgaccttctagttgaaacaaaattagttatcagtggacttaggcgaatgctatactgtacgtagacacataaccccaacctatataaacactaagaatactgtaacatttcgagttggtctggtggagttatctccagccttctctctgtatccagttacagcaataaatccccttctttcctaaa

SEQ ID NO: 241285 - DNA, 429 bp, Homo sapiens
tacagaattagtccccatgagtccctaaacaaacaaaaaacaacagcaacaataataactgtggagggtggggtcataatccagaattactaaaatatatattatctacagtgtcaactttttaacaattatgagacatgcaaaacaaacaaactgcacacacagagaattctggtccatacacaggggaaaaaaaaataccagtccactagaaactgtctctgaggatgtccacatgttgcatttaatagttaaagacttggtgtctttatatattaaatagccacgtgtggtggtacatgcctgtggtcccagctaatcaggaggctgaagcaaaaggatcgcttgagcccaggaattggagactgcagtaagccatgatagtgtcactgcactctagcctgtgctacagagcaagacactgtctca

SEQ ID NO: 241286 - DNA, 284 bp, Homo sapiens
cttggttttaggcatggaatgaacctctctgctcatgcttatgaagctgttacttggtcaacaattaaaacttagaaggatagatgcaaataaggagagaaagttttcatctttttctatgttttgaaaaattacagcctaactaaagctgtcattttaaacaagctttttacctttttaccaacttctacgtggaaaacaaaacaaatggcttctgtgagaagcctggaaacctgaattctggttgaggcttttttactagtttgtcagcttcttctttcaaa

SEQ ID NO: 241287 - DNA, 378 bp, Homo sapiens
ttctggcgacctagttttatactattcattacagaaataccatgaagaccagtgggtaatgtcctagagttgaacttacatcaaatcatacctaactgttttcatatttgaaaaaccttaaaaacaatgaattcataattctattgtaaatgattttactatactgtagtaaatgattaaactgtaaacaatatgaataattcttgaaagcataattatgtagacagtttcttttagattaacatgataaaacaattaaagaaaacattccaaatgggataaaattaatcaaaactgcatattttcaatgacttggcttaattatcatgcttttggaaatggccagatgactaacaagaaataaaaacaagattttga

SEQ ID NO: 241288 - DNA, 2277 bp, Homo sapiens
atctctttgcattattacagttgttgttatttttagttctatttatatgaaaaatgtactttttagcccacaaaaatagcatagcagcagcttatcaaaatgtcccagacaagtttacttcaacaaattagtaacaccttcatgcttcctgtggtggaagaaatgcagagtccacttcctcccagtgaacatctgagccagatttctgctccactcggtcccccttcccacctcttacagccatgaaataatgtgagagtatttgtttcccctgcaaagggaagagggtccagagacaaaagggaagttagtattcactggaagcctccctgtacaagcaacagtgttaggacttttatacacatttttacaattattacagcagttctcaattattgaaacagagggtaggcatttcccctttttcagaagggaaaagtgagaattaagttaattccaaagtcacacagctagtgagagaaaaagcctggacaggaactcagactgtatgactccaaaggctaagtgcattctatacacacaggccgccctcctggcagtgagagttcaggatctgttggagaaaacctcagaccatggttttcttgcagcttctgctggagaacattaggtgcctgttcccccgtggtgagtgttacaaagtgcagcaccacccaggggaagagtctgggccttggagttagacctgagtttgaatcctccttcagatatttactattgatgacattggcaatcaatgctgctgaatttctccagccctccatttattcatctattaaggggagagctacctacagggcggggaacttacaaggattagatgaggggatatgtgtaaaggcctaacacccagtaggtgctcactaaatgatgttccttattattatggtgattaccactgtactcttttcagatgaaagtgttcggtcacctggaacctgtgagtatgtggtttttgatctgtgactaaactgttcacccatttcccagtttctctgctgtgtcaaatatcaacattttaccaggtttctctgttgttgccaaacctgtcatttttatttggtgtggcttcttgggaaacttccatggcccatttgatgggaatcaaacagagtgaaaacaaggacagatgcagcagaggtggcatcaggaacaaatgggtcataagaacttaccttggcagcagccccagaatggtcaggaggaaaggcactttaaggtatcagaaggtagaaaggagaggttggatgatagaatggggaagggattcctccttgtgttcacagaagtgaatcaatgggagacacaaggttaccacttaatattcctgctctcctaggcatgggtcaggtacatcttcagccatgggtaagtttgttcaacaaatgagtgatctttgggaggctgaggcgggcggatcacgaggtcaggagattgagaccatcctggctaacacgatgaaaccccgtctctactaaaaatacaaaaattagccgggtgtggtggcgggcgcctgtagtcccagctactcgggaggctggggtaggagaatgtcgtgaacctgggaggcagagcttgctgtaagcagagatcgtgccactgcactccagcctgggcgacagagcgagactgcatcccaaaaaaaaaaccaaaaaaacgaaaacaaaaacaaaaccaaatgagtgatgcattgacctttcgtaattcttggatgcaaaagtagaactcaagctacttaataacaatcatggtggcatgggcaccagcaagtcagggtggacaacagccatagttctggagcatggtcctcaagactaccttttgtatgcagagtattaacactttaactcttagatccttggaacataaggaagagaggctggaacaaaaaggggttggcatttggaggtggagaggtagtgtaaggcacaactgtttatcaactggtatctaagtatttcaggccagacacgtggctcacacctctaatcccagcactttgggaggctgagccaggaggattgcttgagtctaggagttcaagaccggtctgggcaacatggtgaaaccctgtctctacaaaaaatacaaaaattagccaggtgtggtggggcacgcctatggtcccagctactggggaggctgagatgggaggatccacctgagcccttgggggtcgaggctgtagcaagtcatgattgcaccactgcactccagctgggtgataaagtgagaccttgtctaaaaaaaaaaaaa

SEQ ID NO: 241289 - DNA, 2223 bp, Homo sapiens
atctctttgcattattacagttgttgttatttttagttctatttatatgaaaaatgtactttttagcccacaaaaatagcatagcagcagcttatcaaaatgtcccagacaagtttacttcaacaaattagtaacaccttcatgcttcctgtggtggaagaaatgcagagtccacttcctcccagtgaacatctgagccagatttctgctccactcggtcccccttcccacctcttacagccatgaaataatgtgagagtatttgtttcccctgcaaagggaagagggtccagagacaaaagggaagttagtattcactggaagcctccctgtacaagcaacagtgttaggacttttatacacatttttacaattattacagcagttctcaattattgaaacagagggtaggcatttcccctttttcagaagggaaaagtgagaattaagttaattccaaagtcacacagctagtgagagaaaaagcctggacaggaactcagactgtatgactccaaaggctaagtgcattctatacacacaggccgccctcctggcagtgagagttcaggatctgttggagaaaacctcagaccatggttttcttgcagcttctgctggagaacattaggtgcctgttcccccgtggtgagtgttacaaagtgcagcaccacccaggggaagagtctgggccttggagttagacctgagtttgaatcctccttcagatatttactattgatgacattggcaatcaatgctgctgaatttctccagccctccatttattcatctattaaggggagagctacctacagggcggggaacttacaaggattagatgaggggatatgtgtaaaggcctaacacccagtaggtgctcactaaatgatgttccttattattatggtgattaccactgtactcttttcagatgaaagtgttcggtcacctggaacctgtgagtatgtggtttttgatctgtgactaaactgttcacccatttcccagtttctctgctgtgtcaaatatcaacattttaccaggtttctctgttgttgccaaacctgtcatttttatttggtgtggcttcttgggaaacttccatggcccatttgatgggaatcaaacagagtgaaaacaaggacagatgcagcagaggtggcatcaggaacaaatgggtcataagaacttaccttggcagcagccccagaatggtcaggaggaaaggcactttaaggtatcagaaggtagaaaggagaggttggatgatagaatggggaagggattcctccttgtgttcacagaagtgaatcaatgggagacacaaggttaccacttaatattcctgctctcctaggcatgggtcaggtacatcttcagccatgggtaagtttgttcaacaaatgagtgatctttgggaggctgaggcgggcggatcacgaggtcaggagattgagaccatcctggctaacacgatgaaaccccgtctctactaaaaatacaaaaattagccgggtgtggtggcgggcgcctgtagtcccagctactcgggaggctggggtaggagaatgtcgtgaacctgggaggcagagcttgctgtaagcagagatcgtgccactgcactccagcctgggcgacagagcgagactgcatcccaaaaaaaaaaccaaaaaaacgaaaacaaaaacaaaaccaaatgagtgatgcattgacctttcgtaattcttggatgcaaaagtagaactcaagctacttaataacaatcatggtggcatgggcaccagcaagtatgcagagtattaacactttaactcttagatccttggaacataaggaagagaggctggaacaaaaaggggttggcatttggaggtggagaggtagtgtaaggcacaactgtttatcaactggtatctaagtatttcaggccagacacgtggctcacacctctaatcccagcactttgggaggctgagccaggaggattgcttgagtctaggagttcaagaccggtctgggcaacatggtgaaaccctgtctctacaaaaaatacaaaaattagccaggtgtggtggggcacgcctatggtcccagctactggggaggctgagatgggaggatccacctgagcccttgggggtcgaggctgtagcaagtcatgattgcaccactgcactccagctgggtgataaagtgagaccttgtctaaaaaaaaaaaaa

SEQ ID NO: 241290 - DNA, 621 bp, Homo sapiens
gccattctcctgtctcagcctcctgagtagctgggactacaggtgcccgccaccacgcctggctaatttttttttttttaagtagagatggggtttcactgtgttagccaggatggtctcgatctcctgacctcgtgatccacccacctcggcttcccaaagtcctgggattacaggcgtgagcccagttttcattttttaatcagacccgttattattccaaatggtgacagggtatcactcccttaaagttctttgcttgttcaacctgggtctcacctggagcaagcccttctggaaggcagggactgccacctcgttcacgttcatgcctcgtgtttttcatatactaagcctctttatcaggcgagaacacaaaacaaacgaggtggaggatgctcttccccacctgtgctgagtcttacttagaacacattatttcagaaaatcaagattttaggcacggtgcttgagtctttagatttttaggcactgtttcttaacagttgggattttcacattcctaagtctcaccagtgtgacttaattatgccccacatcaccaaaggattagtggttactggaactgctatgaccatgacacgattcgtgcgcgtaccc

SEQ ID NO: 241291 - DNA, 694 bp, Homo sapiens
gccattctcctgtctcagcctcctgagtagctgggactacaggtgcccgccaccacgcctggctaatttttttttttttaagtagagatggggtttcactgtgttagccaggatggtctcgatctcctgacctcgtgatccacccacctcggcttcccaaagtcctgggattacaggcgtgagcccagttttcattttttaatcagacccgttattattccaaatggtgacagggtatcactcccttaaagttctttgcttgttcaacctgggtctcacctggagcaagcccttctggaaggcagggactgccacctcgttcacgttcatgcctcgtgtttttcatatactaagcctctttatcaggcgagaacacaaaacaaacgaggtggaggatgctcttccccacctgtgctgagtcttacttagaacacattatttcagaaaatcaagattttaggcacggtgcttgagtctttagatttttaggcactgtttcttaacagttgggattttcacattcctaagtctcaccagtgtgacttaattatgccccacatcaccaaaggaaagtggaaaattggctcatcaccagctgttcccaccttgcttctaagcaactgtggacctgcctgccggtcatatcagcccgactaagaagagaaaggaatggatcttttcttctgtccctctt

SEQ ID NO: 241292 - DNA, 448 bp, Homo sapiens
gatgtgcaatattctcttgagctctttgagctctctgtttccacatttcacctcttctgccctgggtcttgctctgtcacgcagggtgaaatgcagtggaaccatcatgactcactacagcttcagcctcccagactcaagtgatcctcccacctcagcttgttgagtagatgggactacagatgcacatcaccatgcccagctaactttttattttttgcagaagcaggatctcaccatattttccaggctggtatctaacttctgggctcaagtgatctacctaacttggcctcccaaagtgctggattataggcatgaaccaccatgacctgatgaaagaaatttttttaaaccaaactgttttacccaaaattttaatccagagctttcattagatgacatatcagagaaaataaagttgagccatataaacatgtcaaaaata

SEQ ID NO: 241293 - DNA, 405 bp, Homo sapiens
ggcaaacctggaccactggtcaggctagaagacagtatttaaagagaaggcatacaggccaagtatggaaactggagaatatttatgcttaagggaataaagacagggacgaacttgctaaagagagtgcagtcagaaaggtagacgtgaccaatgcatgctgggctcttgctgtgaatttggggctgggaattcaggtggaaggcattgaaaggagaagtctccatcagagagggctgtgaggaaagtagaaccatcagataaaacctggatttccattagggccaggcagagaaaggaactttgtggaaagatggaagacaggacaactggaagataccaatagttatacccacaagaaggcctgagactggagaggagctgggctgagtggggaggagattg

SEQ ID NO: 241294 - DNA, 408 bp, Homo sapiens
gtaagatgatctacattgttgctgtatccaggcctttactgttgtaagaaatgttggagtgttagttgagggaaaaagtatgtattggtaaatataaactctactcatactaatgagagtttttgatatggtctactttatgatggcttcaagaaaaggatgtaatctagcatataacccattatttttaagagccctgggtaaattttagcctttgtcatatataaacttgtttatatattagtgtatgtaacttcggaggtactaattctaacatagaattctagtattttagagtgtacaatttctcccttagatactttatataaacagtttttcaaaatcctaatttttaatccatctatgctgcaacaataaaaaaactttgtaaatattattggtatatgc

SEQ ID NO: 241295 - DNA, 1895 bp, Homo sapiens
  misc_feature (1246)..(1246): n is a, c, g, or t
  misc_feature (1255)..(1255): n is a, c, g, or t
  misc_feature (1291)..(1291): n is a, c, g, or t
  misc_feature (1304)..(1304): n is a, c, g, or t
  misc_feature (1695)..(1695): n is a, c, g, or t
cataaatcataaaattgtaggactagaaagacacttggaaatcatcctgtccagtctgccatgaaaatatgcattccttgggaggtgctttctctcacagcacattcattgtgcagatgtgtggtccaaggtcacagaactggtagcagatctgggatcagaacccagcactccagctcttacccagcatccactcagcagcccacactgagctgatatggcaaagaatgaatgggttactgtctccaggctatgccagggactgcaacaggtgctgtaattacttgtctttagagtaataagcctctgtaataagtatgtaatgtggaagctttattcagcccatcaaccctcaataaccattgttgcctagctgtactctcccaggcccggcccctgctgcattgcccatcacttgggatcttaagtaacagcacttcttgtagaagaacaaggccctgccagatgtgactagatcacaagaattagcattgaacactggttaaaaataaaagtagttttttcatgacattcctatctgccgtgtgtgtatgtgcatgggtgtgtttgaaatgtgatgaacaacagcaatgatgttatatagatattcatatgacaaatgtgtgctggacatctactaacagaaaggccttgtgctaggaattttgttccaaaaacaaggaagcataaatgctgtaagcatggtgtgaacacaatggtctgaggctgccagggagagagcacaatgggttttcaaaggggataagaagggggcagaagaggaatcaaataaggcttcaaggaagtgatgacacttgagtgattttaaattcccagacacctgagaatttgtaaaatcagaaatggagagaatattccaagtagaaaagatagcttgaacccagaagatgttaaggttgactttcagcaaagcttgaaaaatagcatataataactgttcttatatatataatgtagaagaagcacaaaagagagaagacgactagttttaggaaactgctgatataaggattatatcattccaggtcaatctcgtatgttgaacacagagggaaaaattctaaataagagcaaacgaatccagcaggatattaaaataactacattgtcactaatgagccttacctaaggaatgcaaggatagtatgaagttttagaatctatcagtataggtctggcacagtggcccatgcctgtaatctcagcactttgggaagccaagacnggtggatcncttgagcccaggagttcgagaccagcctggggaatntggtgaaaccccntctctacaaaaaatacaaaaattagccagtctcacaatgtggtctcaaaataaataagtaaaaatgtaaaaataaatctatcaatataattcatttattataggaaaaataatatcattagttcagtaggtacagaatcaatcattagtaagctcccacacttatttataatttaaaaaataaaaccaaacacctcttatcaaactagaaatgggaaaaaaaattgctgctggaacctaaaagcaaacgtcatattaagagtgaaataggcaagtctttccagtaaagttcaaaagaggtaagaatgcctgctatcacatctattatccaacattatatttcaatttttttgttaatataatacaagtaaaagaaatagataggcataagnatcaaaaaggcaaacaacaattttagtattttcaaaagttatgagtctatgtaaaaaaaaaagagaacatatatattttcagaactaaaaaaagcactcaaaaagtccaatgacttttagttctaaaaattttaaacacaaaatttacattttaaatacaaaacccacattttaaaaaaatttgtaagtttctataggcc

SEQ ID NO: 241296 - DNA, 769 bp, Homo sapiens
gtgattatcctcactttgtgactgaggcatttttcagacaatgccatagagggagggggagcccaagcagaggacagagtttttgctgatttgaaaagaaagagatcagaattcaaggaggctaaagtagctgaaatttgtggctgataaagaggaagctactaaaaaaaaaaaataaaggctacagaaatttatgtagatttggctgaatagtaaactctgcatgcacaggatgagaccccacacagtttggcaaagaagatctagtgaggaaaaaaacaattactgggaaactataagccaaagaatttccagggcttaataaggctggatgaagttccacccacccaaaatggagaaaattcattgaacacctgggacattcaataaagactccagaaagattacaccttggtggtagggctaaaatagacctgctctattaaatattttatttttttatttattttattttaagaatcaggccgggcatggtggctcacgcctgcaatttcagcactttgggaggctgaggtgggcagatcacctgaagtcaggagttcaagaccagcctggccaacatggtgaaaccccatctctactaaaaatacaaaaattagccaggccgtggtagcatgtgtctgtaatctcagctacttggaaggctgaggcagaagaattgctcaaacccaggatgcggaggttgcagtgagccgagatcatgccactgcactccagcctgggcgacagagcgagactccgtctcaaa

SEQ ID NO: 241297 - DNA, 525 bp, Homo sapiens
cgggagagggaagtcagtggtaccagaaggtagatgggctcccttgcaggctccttgttctcctgccatcaccagtagaaccttctggctgacagaccagggacaagtagactgggttcaaagtgacagacctttcactttcaacagctttggctcagcagacatgtacacatacaaagtagagcctacaaggtcaggggcattctgcccccgccacaggactaaagactgccctgcgggaagatggcaggagcagtttctgacctcagttgagtatctgtggccatgagcagaaaaggcaggggtctgcctcctgaccaagcacatcttgaacatcacctgagagcttgaacatcactaaggacctagacactcacttgtctttcaacttgagcccatcactcaccatgtgagttctgttgagggtgggtagaaagcaaataggttcaggttatcccaccagactaactcggtgaatgaaaggatcatgccttcttcacattttaattaaatggatcaagcaca

SEQ ID NO: 241298 - DNA, 394 bp, Homo sapiens
gctatatcaaaactgagttgccataaaatttggggggacgtgttgtcaccaagatggagctgtcgtgatgacaggaaattagaaggtagagctggaaagaaacaccttccagtggagacttgtgaagaatgggaatccccctgagccatcgtcggtgaaatctcaaaggcaccttttgcagagtgccagccatatgcccggcacctcaacccatcattttactttgtctgcacactacccaatggggcagagtaactgcacccattttacaggcaaggaagtggaggctccgagcagtgagcaacttgcccgaggtctcacagccagaaagtggtggagccgggctggactctacgttttgcttgatgttgtcataaacaatcaagaggagaaa

SEQ ID NO: 241299 - DNA, 211 bp, Homo sapiens
acatgcagtttctaatgaattttctttcagtttcctgaatgtgccgacctatttcccacttcagagcctttgcactgctgttccctttgcctggaatgctcttacccctagtcctttcctggcctatattgtatatgcttggtttataaacttaaaaattactttctttggagaacttacacacctccctatctaatgtaaaataggttat

SEQ ID NO: 241300 - DNA, 333 bp, Homo sapiens
aagaagaaggagaatgatcagtaatgcaaacagagaaaagagcaagtgaggagcaaattttggccatgtcttctgccctgtgcacagatgttctatcaccagagagcagaaacctggtcatggggcaggatgtcccattaagggaatgagctcatggggcggccacatcagcctcctcttgctaagagtgcctgctccctgagacgctcctgatggtaatttggcttccacgaagacttgtctgcaaatagagaataagctgtgcagcggagcaaattatctactctgctttgagttcttattgtaaagtaataaattggtattttggttttt

SEQ ID NO: 241301 - DNA, 472 bp, Homo sapiens
tagtttcagctcatggggctttagaaacagggcagattttgttttgagttggagagttgtagccaaatattagaggaaatcaagagaattcaagatctagttcaattgtcttaagttctgggacctgctaggaagtgacaatttttattcattcattgtatgtctaggatcttttgaagccaggaatttgacttttagtcaaagctttggtcatataaacagtatttccaattgtatcctgcttataaggcagatttttactgagcttatataaataaaaataagaatactcataaataatttgtgaattttgaaggaatcaggtagggataaaaagaaaatgtctctacttttgttcataaaagtatgctttaaaaacttgtctgtttttaatgagccctttgacctattatgctattttctggatgggggtataaagcacagtcgtgtcatattaaagcttacttcaaac

SEQ ID NO: 241302 - DNA, 415 bp, Homo sapiens
agtagtgggtttctgttctattggatgactttgagatttgtctttgtttccttttggaattgttcaaatgtttcttttaatgggtggttgaatgaacttcagcattcaaatttatgaatgacagtagtcacacatagtgctgtttatatagtttaggagtaagagtcttgttttttattcagattgggaaatccattccattttgtgaattgggacatagttacagcagtggaataagtattcatttagaaatgtgaatgagcagtaaaactgatgacataaagaaattaaaagatatttaattcttgccttatactcagtctattcggtaaaattttttttaaaaaatgtgcatacctggatttccttggcttctttgagaatgtaagacaaattaaatctgaataaatcattc

SEQ ID NO: 241303 - DNA, 548 bp, Homo sapiens
agggcaggatgctcggtgaggggtggtggagccgtagagcaaacatccttcgagagccaaatgtgcgtgacctttgacctttccccttcaggagtgtacagtgagggaatactcgggtaagcacagaaacacctgcaaaaacaactcacacattcgccagcagggagtcggtcaaaccaaccaggcccaggctgtggaatgttaggcggcggttaaaagtcacgagatacgcaccttcagatgggaaagatggacaccacctgtctcagcgggagaaagacagctgcagaagcttcacacaatttagcccgattcccacgaataaacagaagaaagggcagacaagtttgtaccgacggaggaaggcactgggaccccgcttcagtcgggcacgagtttcccccagagaggggaggaggcaggcagaggacttcactttctatgtaatctttgcctacagagtttgacgttttgtaactgtcctgtataatttgtcatctgaaagcctgaaaaaaatagccaattaaaaagctgccattggtgatgag

SEQ ID NO: 241304 - DNA, 361 bp, Homo sapiens
ttctgggtttaaaagaagctttggggtttgaatctgtagccccaccaaagaaataagaaattgtctttatataaaagatatgtgtatatcattgcagtttaatggtgctttagtacaatgctgtgatttttggccaaactagatgccagatacacagctgcatttaatgtaaatgtaaatcttacataaaattttagtattttatataaaacctagccggccgtggtggcgggcacctatagtcccagctgctcaggaggctgaggcaggagaatcgcttgaacctgggaggcagaggttgcagtgagccaagatcatgccattgcactccagcctgggtgacagagcaagactctatctc

SEQ ID NO: 241305 - DNA, 189 bp, Homo sapiens
tgtaccactttttctttatccattcatctgggttttttgtttgcttgtttgttttaaacttttaagttcaggggtacatgtgcagatttgttacataggtaaacttgtgtcatggggatttgttgtgcagattatttcatcacccaggtattaagcctagtacccattagttatttttcctgatcctct

SEQ ID NO: 241306 - DNA, 497 bp, Homo sapiens
tcttctagaccagatgttcctggctagcagcactgccacctctccctccaggcaccagcagacccttactgcaaagaagactcttgagctgctgctgctgtgttgggtgaggggaaacatgctatgtctctggctggaactcagtttcctacagcacagtacacttatgggcaggtctagcatctgtaccacacttttgaaatggaactccagccggacgcagtggctcatgtctgtaatcccaacactctgggaggccgaggtgggaggatcacctgatgtcaggagttcaagaccagcctggtcaacatggcgaaaccctgtctctactaaaaatacaaaaattagctgggcgtggtgatgggcgcctgtagtcccagctacttggaatgccaagacacgagaatcgcttgaactcagaggcagagtttgcagtgagctgagattgcgccactgcactccagcctgagcgacaaaagggaaactccgtctccaaa

SEQ ID NO: 241307 - DNA, 421 bp, Homo sapiens
tcttgttaaaatgccagttcttattcaatagctctagaatggggcctgagattctgcatttctaacagtctccaagatagtgctcatgctcgtggtccaaggatcacactttgcatactaatgatttgaagcattattttcttaacaagcaagggtgcatgtattacagaataaaatgcaaagtgtgaatttttttagtaaaacactaactaccccgtaaatatcacatgtctagtaaaccatttcaacttacactcttacctcccttaggttttttagaggaatggaataaaaagtagccagacatggtggctacttgggaggctaaggtgggaggatcccttgagcccaggagttgcacaggctgcagtaagctatgatcgctccatttgtactccagcctgtgcaagaccctgtctct

SEQ ID NO: 241308 - DNA, 174 bp, Homo sapiens
tcagccctatccctctctaacttcttggaggagagtaaagctgcagattgtgttaataaccgatcctgactacatgatgacacctccataaaatcctctaaatgatgggattcagagtgcttccatgtttgtgaatgcattcatgtgctgggagagtggtgtatcctaactcca

SEQ ID NO: 241309 - DNA, 488 bp, Homo sapiens
accatgttttgtgtgggcaagccgagttcgggaccctcggggccctggcgtagcacctagagcccgctgggtcaggcgccgccctctcacctgcgcgtctccgccggaggaaaggcggttaatttatttttgaaataacaaaacctaaccggcgggaacgtttttcttgctctgacatttattataataatcctaacactgccgtccgctgtgggctccagcccaggctccacagccgtgggcagcttggagccccagggcttttagatcggccagaggactgacactctggaactggaagaaaaccgcgcaaggccgatggcgtttggattttatcctgacgcaaatcagagccctgagagaattttaagcagggcagggtcagtacccatttgcttttagggttcttcagtggatggtggcagagacagggtatttgccttgtggaggtaggatggacttggtgacttagagtggagaataagaat

SEQ ID NO: 241310 - DNA, 498 bp, Homo sapiens
gctggggatgtgatagcttgcaaaacaactcgaattattcagtgtatcataaaaaatgaattctcaggacaggtagaaacttggtttactcattatttctaacaagtaccaaaaccccctgattcatgtgtgttttcttttcctggcataccaagagttaattggcacatgacattcttctattgcatgaagctgttccaaaacgtccaacctgacaaaatatattatgattgacaacctctggcctagtgagatcgctttgagtcagagatgtgttcctcataatttgtggaatgattatctaggtttctgctggtgtcttgaataattggtgttatggtaactgtatttataatgtagtttattttttgtggccaagagcttacatgataattacttcttcataacaaataccatatttgaaaataatatgcaatacagatttaatttcttctaggacattgagttatgtttcagatttctttccaaaaagatcac

SEQ ID NO: 241311 - DNA, 352 bp, Homo sapiens
tgggattataggtgtgagccaccacactggcccgttaatgacctttaaaaggacatatacttcagggaaaggaaaataatcccagaaaaaaatctaagagataaaatgcagtgctaagcaagtaaattggtaaccataagagtaaatctgaatgaacatttcctgtatgagatatttaattagtatagtttaaaaagccaggacaggccgggatcagtggctgacgcctgtaatcccaaagttatgagattacaggcataagccaacgtgcccagccgcatttcatctttgtttttttttgtttttttgagacagactccagcctgcgcaacatgagcgagactccatctca

SEQ ID NO: 241312 - DNA, 436 bp, Homo sapiens
tgggattataggtgtgagccaccacactggcccgttaatgacctttaaaaggacatatacttcagggaaaggaaaataatcccagaaaaaaatctaagagataaaatgcagtgctaagcaagtaaattggtaaccataagagtaaatctgaatgaacatttcctgtatgagatatttaattagtatagtttaaaaagccaggacaggccgggatcagtggctgacgcctgtaatcccaacactctgggaggctgaggcgggcggatcacctaaggtcaggagtttgagaccagcctggccaacatggcgaaacactgtctttactaaaagtacaaaaattagccgggcctggtggtgggcacctgtaatcccagctacttgggaggccgaggcaggagaatcacttgaacctgggaggcagaggttgcagtgagcc

SEQ ID NO: 241313 - DNA, 327 bp, Homo sapiens
agcccgggggaacagtcagcgggctctgcgtcccgggagctggggacacgcctgcaagggctttccgcctgcacacagtcatttggagaaaatcaagagagttttcaaccttggaaattgtgcaatgttccagccgacttaatgggcttgccttatgcggagaggcagtcctgcaggacagagctaatgtgtggtctcccaggaagctcatcagaacacctcttgtcccttttctttaaaagaaaaaaaatttaaaaagtttttgcttccatctcaatgtccattccattattttgtagctacaataaagaaacatgggcagcagtg

SEQ ID NO: 241314 - DNA, 353 bp, Homo sapiens
gtgtgcaccccggtcacaacagtgatgctcaagggctctccaaaggaggcaggcttgtgtggaccccagagggactcctgatcaggttagaaggacgtggaaagaatactacctgcaagccgacgagagaggcctggagcagatccttccttcacggcactcggaagatgccaagcctgccatcttgattttagacttccagcctccagaactgagagacaacacgttgtttctgttgtttgagccacacagttggtagaactgttaaagtagctccaggaaactaattcagtgactaatgttttcgaacagtctttgtgcattttaaataaacatatttaatatataaaaaa

SEQ ID NO: 241315 - DNA, 383 bp, Homo sapiens
gtcagctatttggtatgcctttatgaataataaaattatggctttcctcccttctaggccttattgtagccaagtggctttagtcattttcatgggacagattttccaatgtctttattattactctaccttcgccatctcatatttttaccactgggccctagatatatatatcatccattgttcagcatgctctacccagtggaataatcatatttagaatggtctataagatgatcattctccattgggtccaatttacaatctgtttctcccttttttctttcgtatgtttttctgctcattcaaattatgatcagaagctaaggcattttcatatccaaatgctctccccatcacttctaataccatcaccatatatt

SEQ ID NO: 241316 - DNA, 250 bp, Homo sapiens
gattccttctttcctagctgtgttctctaacgagaaaccacatgacttcctaagccactacacacactgtctctcaaatgttaccaaccgccctgcctctgcgtggttgatgatgaaagacctctcttctatcagcagttaagctcagaaagtcatggaattgtctgactgggataaaaaattaaaagcagctacaatgttattaccaagaaacacacttacagcaaagtgattaaagaaagggtagaag

SEQ ID NO: 241317 - DNA, 397 bp, Homo sapiens
ctcagctcctacaaaatatttatttatatgtatatatttctttttcttctcctcctcctttcactcatgggtgcttgaaaacaggtttaggagccagtcatgtggaatttatctttcaggaatgtcgaacaccccttgagttatccaaagcatacctgactaggagtcaggaggcctacattttctggattaaggcttggtcctaacaaactgtcagtgtggacaggcccatccatctctggggtctgctccaggccttacaattctgtaattcacactcatcaatgtggtggcaggcattagtgtgtttgtacaaaactcagcaagaagtagtctccttagatgctacatgtagactgaagcgaggaactgcctcctgctaatgccagttgtgttt

SEQ ID NO: 241318 - DNA, 598 bp, Homo sapiens
aaggcaaagctcacgtggtggtaaagcacttgtacttcaggattgtgttgctagctgcctcgacacagccactgggaaagccagttcacccggggctcctgctggacctgggcacaggagttgctgcagctcctgccctggcaggtggaatgacatggccttgccaaagacagcggtgcctgtcattataggaggtaaggtgacaaggtggaagctggaactttgcggccatcactggagctgctttacctaggatcagggtagtgggtccccaggggcaggcagggtcaaatggatgtgctggctgggtataaattggatccaacatttttttccttttaaattactgaatgatttgtggggtgtactttgcccctgtaggaatattctattgccctgccacgtttatgtaatggtttcagtatccattgattattcttgcctgtaccatttattacagcaggagatgcaagatatgagggttagttatgttcgttaccactagggtgtcatcgtacgctttttcaggaacacaactaggatgctttatttacatatgtaatgaatatatatataataaaaatatatatataatgaa

SEQ ID NO: 241319 - DNA, 516 bp, Homo sapiens
aattgttctgtcttacatcatctgcaacttagacaattctgttggttttaaggtggaaacagctgccagtctatgtatccctgggattcctctaaccctgctaagcagggttactcatgaattactttacatctatcaatcatctgtcctacaaagaactgggcaaaccttcttggaaggccagaaggttttgcaaaagctttaggaaagggttatggctgaaggcagcctgatcctcttaccttgagttaatagtaaaaagcaaataacaagggaatgtagaggagtttatctaaatagcttgttttctcattgttgtcctaagactgacctttgatcattcgcatgcaggactgctctctctggggagggcgggagaaagggagcagaatctctgtaaaatgtgatgttcaataaccatttgtttttgaaaacatttttgaggttggtagcttagatctggcaatgttctcccatctaataaccatcagacaagaaataaacttgcttagaata

SEQ ID NO: 241320 - DNA, 375 bp, Homo sapiens
atgccctgaaaggaaggtacaaggtatattggaagagggcctgaatagacttgggggattggggaatgattcctgaaggaaatgatagccatatcaagttctgaagagtatgccagacagaaagaagtgaacagtaagtgtgatgtcctgtaggcaacagaaagaaattgagaatggttggatggcacagtcatggggtatcaaatggaagaggtagtaaatgaggttgaagagaaatgtggggaccaaatggtaaaggccctgagaagtcatacgaggagaattgcttgaacctggaaggcggaggttgcagtgagcagggattgcgccattgtaccccagcctgggcaccaagagtgaaactccaactcaaaa

SEQ ID NO: 241321 - DNA, 537 bp, Homo sapiens
attctatcttggttgatttaccctataacctggagcattttcgagaggcaacagaatggaattgtctcaaagtactgacttttcattattttccacgcagatccctgaggataacagaaggaaaggttttgtctgggggagggtaggcttctcccaaaaagagaattctggaagtcaacataattaaacaaagaggaaaatgtgccagacaggagtgggtgggggctgttttctctttgtggttggttgtggtgcgttcaagattcctcgcctaagatgaggttcctgagcttccagtaggcgactgactgcccaagagacccagggctccgcaaggagacggcgcaggtgtcggggctccccgcaggtgaggaggccgacgttccaggaggtccgcccgggcggtccctgagtcctgcctcgcggctgctcgctgggatccgagggcggaacgggacgcgcaggaacccggcccgacgggcgcggctcacacccgtgctcttcctgcgctctcggcctcactttgcggccagagcc

SEQ ID NO: 241322 - DNA, 826 bp, Homo sapiens
ccaaagaaacagtatggaaaaacttagtaaagatggtgtagatttaattacaagaaaagagaaaaaagctaatttgatggaacagttatttggtgccagtggtagcagcaccatttcctccaaaagcagtgacccaaattctgtggcttccagtaaaggagacattgaccctctaaattttctccctgggaataaaggcagcagagatcaagaacatgatgaagatgaagactttttcctcagtgaaggaagaagttttaatccaaataggcaccgattaaaacatgcagacgataaaccagcagtaaaagcagctgattctgtagaagatgaaattgaagaagtagcactgagatgactgactagagtatacattttttctaattgtaaatattgaaatattttaatacagtatttattataaacatttagactttttaatgctaaaatgtccttattaaggaatgatttttaatagctaaatacaatgcagttaaaaagaagtagatcatacatacaccacatagatagtttgccaagaatgaaggaggcttttttgaatgaaaccaaaaataaaaatgtgtcttgaaaaatgaaatagattttaactcttcatccagtgctatggcaagtttaactgcactggaggtggtattccttttctacttttattcctatttatgtatttatttttaatcatattctcactgtgctaaatacagtcttcccactaattgttgaatgaaaattaagggtgaaagtctgtgttgggaagtgtagctccggatggtggagaaccagtgcttcttaggagcccttcccttta

SEQ ID NO: 241323 - DNA, 599 bp, Homo sapiens
gcaatgtcggagtgcttgttgaaattatttggaaaaggcctcccctggtggctttaaacacaggaaatggatgaatggatacccttctcaggcctccaggatattttgttactgtctaaggcctccttttaagttacaaacttatggagttttatgttttaagagtctttttaaccactatactttttatatgcacatagttaaaaacagtcaaatagtatagaagagtataaaatgcaaaaataaaagatgtcccccctccacctcattctagtcttactttccagaggtgaacactttagactatttgtttttagcccttctggtggtttctttcacaagtttatgaacaatatatgaattcatccatttattgattcatcaactgccgatagtgctattagattaatttttatattgttcgtaccagcaagatgttcttgttgggcctttggtaccaacaagctgataacagcaatttcttgatctccctgtgtctccatctacatatcataaaataaggatattggacttgttggtttccaaggccactttctaaaaagtgttaagagaccatttgaactaatttaagtgaagag

SEQ ID NO: 241324 - DNA, 425 bp, Homo sapiens
cttcattttttccctatcttctcttgacactcgtcgttgagccagctactgtttttctccaacctgctaggttttcaataaatttcctgttgtgcattgggatagcagtgttcctggaaaattgcttttcgtaggtgagctgcaccagtatctcccatatacactttttaaaataatttagagacaagtaacaaagtgcttacagtgcaaaaatttactccagaagactccaaaccattcactgacattttacagtttaatcccagcttcaatttcataactggtgctcaaaacagaagaggcgcactgaggtgtacacttgaaaagacatttaaagcctttcatttggagatttcaaaaacattaaccaacatactcaaatgcccttaaaattcatatggagaactaatacactatgttcttta

SEQ ID NO: 241325 - DNA, 457 bp, Homo sapiens
attatacccacagatcccaaagttcattactgagcatatacagaaccctcaagttagaagtataaaaattatactaggggcagggaggagagaatttacctcataaatatgtagtatcctctttcaaatacattgtacaaaactactaaatttttctaacattacgaatatcttggctgggcgcggtggctcacacctgtaatcccagcacttagggaggttgaggcaggtggatcacgaggtcaggagttcgagaccagcctgaccaacatagtgaaaccccgtctctactaaaaaatacaaaaattagatgggtgtggtggtgcgcgcctgtaatcccagctactcaggaggctgtggcaggagaatcgcttgaacccgggaggcagaggttgcagtgagccgagatcacgccactgcactccagcttgggtgacagagcgagactctgtctcca

SEQ ID NO: 241326 - DNA, 312 bp, Homo sapiens
gaaggaatattcctgctttttcttgagaagggacgaagattttcttggaatcaaggagcctcctcttttttgtcctttttcagtctcttccagtcattatcatggtgattgtcaactgtcatggtgcaagtgcgaatgtcatttagcatggaaactggattagaatgaagctagaggtttttcaggggatgaataagctgcctaagaagaaatctatgatcacagacatcctgtttcccaaaattaagcagagttaagctgagtaggaatttacttcgtatatcacatatgccttgcattgggcaacaaaag

SEQ ID NO: 241327 - DNA, 252 bp, Homo sapiens
gcgcatgagatttttttagtggtcgtaggtgacttcaatactgggcagaacgtaatgctgtaacagtggccaaccttcaagctagaccactagttctcaaccaggactgatagcccttccctcccctccccacaggggacatttggcaatgtcttcagacgttttggctcaccataaattgggggagggggaatggggtttaactggcatctcatagatagtggtcagggatgcttctgaacatcctccgtg

SEQ ID NO: 241328 - DNA, 400 bp, Homo sapiens
taatgttcgtttgattgattgtgattctaatacatatataagtttgcttctttattattcatttttatatcacaaactcttttcattattataaattttatggtaataatatgttagataatttccaacctatggtaggaatgtccctagtttatttgacctttatgtggtaaacattcattgtcttttaaagtcttgtgtattacaatgatacgttatttctaatttttatctcccctccatttgtattaatttagcagaaaataaacttccagaaataaaatcaatttgtcaaattttaggaatatttataggctgaaatgtagagcatattgggatgcatatattggttggaatttagagagaagtaaaaataaaataaaaatgattctgattctgt

SEQ ID NO: 241329 - DNA, 344 bp, Homo sapiens
gaaaagaggaagagtgcctgcccaggagaatggcactttagcacttgagagtcacatttaaggacagcaaagccgttcatggtggctcacgcctgtaatcccagcactttgggaggccgaggcaggcggattgcctgaggtcaggagttggagaccaccctgactaacatggtgaaaccctgtctctacaaaaattagccaggcatggtggcacatgcctataatcccagctacttgggaggctgaggcaggagaattgcttgaacccgggaggcggaggttgcagtgagccgaggtcgtgccactacactccagcctgggtgacagagcaagactccatctca

SEQ ID NO: 241330 - DNA, 337 bp, Homo sapiens
taagtatttttctaacataggtcacaaatgaagattctgaaagagaagacagaatcactgagagaaactgggaagaggtaaatagtgttacagaggatactttactagaaaatggataaagaaaagaaataacatggtccttgagaagttgtaaacataaagaaccacatcctttggatataattgcctcaacatgaagatgatgaaaatggagaccttcatcgtgatccacttctaattaatgaataggaggcttgggccgaactgggtgatcagacatcatacacagagaaggagcaagagagagattacacagaggaggaacaaggtgtgcagc

SEQ ID NO: 241331 - DNA, 1629 bp, Homo sapiens
ctcctagtagttttgttaagtcttaccctgtaatttttgcttttaattttgatacctctttatgacttaacaataaaaaggatgtatggtttttaaaaaaaaaaaaaaaaaaaaaaaaaaaaaaaaaaaaaaaaaaaaaaaaaaaaaaaaaaaaaaaaaaaaaaaaaaaaaaaaaaaaaaaaaaaaaaaaaaaaaaaaaaaaaaaaaaagaagagggggcgggcgcgcgcgcgcgttctctctctcctccggggggcgcgcctccaccggaccccgcagatatagaaaagaggccgcccccatgggagtggcgcgctcatttataataaagagaaaggacgggacgcgccgcactatcaaaacacacaccccgtgcgagggagagaacacagcgcgcgaaatcaggcgatccactacagagacagacgccacacccaccacctctggcgcggggagaccaaaacagatgcacccaccactaacacacaacaatgaatatttaagacatccgatgcgagaatcataaaccaaccgcgagcagcgatgaacggtgaggataaaaaaacgtgattcaatatgtcgccttctgagagacaaaaactatcacgccccgagtggattataatttagtacaaaatttatatcaacggagaggaagatgataaaaacaaggaccgataccagccaacgagagaagcaacaacgaagcgaagaagagagacaagaaaagcagggcagaggaaccagacacaggcaagagaaggaaaggagagaggacagggaccgagaaagcgaggcggcacggcagcaaaggaggagacggagaaggggcgaacgaaggcgcgggaggcgagagcgcaacgaaaaaaagaaaagcacgggcacaaaggacaggaaacacgaacacacaagaacagcggaaggcggaggtacggcaagcacagagagaacaacaggcgaaagagcggacaagaagaaggggaaaagacggcgaaaacgaggcgaggcaggcgtagtcgggcaaagcgaggaacccagacgacaagggcaacagaaggcgggaaacagcagggggaaggagagaaaagggagaaacagaagaagagggaagagaagagaagatgaaaggagcagaggaggaggaagcgaaggcggggacagagaagaggaagagtaggagagaggacaggagaagcggggaaggggagaggcagacggcggcagagcggagaggaggagagagggagcgaggggaggagggcaagcagggaacgcgggcgagggggaaggagggagagacagcaagagtggaacgagggacaggagaaggggatgaaccagggaacggggcgagggcagggaggagcaggagaggggagaggagacgagagatgcggaggaagaagcgggcgaggctccacggaaggcaggaagaggagagaaaaggaacaggggcgaaggcagagggagagaggagaagagggagaagagcaggacgggagcgggagagagagggaaagacagggaggagagcgacggagcgggtggcaaagtcactacacaaggaagagaagagaacgcgccagaggaacaaggaaagcaagggacacacgggagagaaggcaagaa

SEQ ID NO: 241332 - DNA, 396 bp, Homo sapiens
ttctttatccaatccaccatatatgggcacctaggttgattccatgtctttgctattgtgaatagcactgtgatgaacatagaagtggattaaatttctttttcttgacagtctcctaatttatgcttgtacatatatttttctctcatgccttgaggtttttaaaagtcctctcctctttctcatggcaatacttttactaaagtacatttcctgggaatccttagggttccccttattttgaataggctgaatattttcatatgtttggtgatttttatcttttaatcctttaataggtttgaaagtctctcttgatatgggtagctcagataggctccatcatagagtctagaaatcatcctatgatttttttttgcccattcctaggttaaa

SEQ ID NO: 241333 - DNA, 401 bp, Homo sapiens
tactccccacccaggcccgctctccccaaatctgtcaggaaaccctcctcatcccacagcactgtgtgacttcctggggagaaaggggacctgtgtgatggtggggggcccaccgggtctgttggggatgaggctctgggatttctggaacagggttgttctggacagagctgcctctccacccaaccacctgctgccctaatcctccctcagaaccttgaccccaggaggccaaaaggatggatgccattgccccaggggccccaagacctgaggagcagcccctgagcaggcctgcagtgaagggcccggaaggcacttcctaaggtccagcctctggcatgtcaggatgctgtggggtagacacgccctgggtcaatccagcccagaagccgggggag

SEQ ID NO: 241334 - DNA, 627 bp, Homo sapiens
gagaggggagagagaagagaacaaagaacccatacctgcattgaaacccaagtctgcaataaaaatgggtacagataaaatgttaatagtttaaaaaaatacctatcttgggtatgatgatagcccttactctacactatgatcaaagaacaacaactctgtgaacaaagaattattacaaggctgtaagccatgtgatggcaaggcccatcagtggaccccaatatttagaactgcaactagcccacctgacacacccaatctctcatccgtgctttatttttgtatttataaccatctactataggcatttttttctctcctctacctgaatccaaaaggacttttgtgattttgttcactgctatattccaactgccttaagacagggtctaccacttggcaagcacataaaaatatttgattaaaaatgcctcgcacagtacatggcaaacagatgctctcaaattctggttaaatacatttatttaacctatagaaatgtaaattagcaataaaaagcctgaaatgataactacttcaaatatgtccaatttcaactcaaattgtattgatactcataattatacttcttactaacctgttatctttaaattgcaataaaat

SEQ ID NO: 241335 - DNA, 330 bp, Homo sapiens
aggccccagcaggagttaaattattttattttcaccatattcactttgacagtatcctctttgtgactggttttccttttataggagtaataagacatggctttttaaaataaatataggtaaggttttaaaaagtgaattgattgcaagagaaatattaaggaaattatggccaggaacagtccgtggctcatgcctgaggtcccagctactccagagctgaggcgggaggatggcttgagcccacgtgttggaggctgcagtgagctatgattgcgccactgcactccagcttgggtgacagaataagaccctgtctctaaaaacata

SEQ ID NO: 241336 - DNA, 622 bp, Homo sapiens
tgcagcaaccaaatgcccacagaatatctcagcccatcaggcaaatcatctatgggcttcttttaaatgcctcaccacatctggacaagacatcctggaatgcattgcctcctcagcctctagctttcagtgaagtggaaaggattaataacttaagcagattgactgagctctccttgaggaggcggcagatgcttctgttagaaaccctgaaggtgaaacagaccattctggagccaatccctacttcactgaagttgcccattgctgtcagttgctactggttgcagcacaccgagaccaaagcaaagctacatcatctacaatccttactgctcacaatgctagtggggcccttgattgccataatcaacagccctggtaaggaagagctgcaggaagatggtgctaagatgttgtatgcagagttccaaagagtgaaggcgcagacacggctgggcacaagactggacttagacacagctcacatcttctgtcagtggcagtcctgtctccagatggggatgtatctcaaccagctgctgtccactcctctcccagagccagacctaactcgactgtacagtggaagcctggtgcacggactatgccagcaactgct

SEQ ID NO: 241337 - DNA, 438 bp, Homo sapiens
atcaaactaattctactcttaaataactcagattaaaaagagaattagaagcaaattataaactatttataagtgagtaattattacactacatatgaaagtttgtggaatattgccaaagcaaaactcaaaagaaaaattagggcgggcgtggtggcttatatctgtaatcccagcactttgggaggtcaaggcgggcagatcacgaggtcaggaattagagaccagtcagtttgagaccagcctggccaacatggtgaaatcccatctctactaaaaatacaaaaattagccaggcgtggtggcacatacctgtaatcccagctacttgggaggctgaggcaggagaattgcttgaacctaggaggtggaggttgcagtgcgccgagattgtgccactgcactccagcccgggtgacagagcaatacttcatctca

SEQ ID NO: 241338 - DNA, 427 bp, Homo sapiens
attgtgttgttcatcagaaaggctgtagtaatttatactcatattggcagaactccggaactccagaacagccttttaccaactcaaagtgagacttgtagagataagtacaatacaggttgaggactttgtctctggggtcttgcacctgattcccttaaaggaaaactgaatgggccaggataacccttgtcttgatgagcgaaaccaattaaggggcacaccaagggataatagagagattaaacttctcctttcaccattttaacacgaacctagtggctttcagacaatatgtttatgtgtcattttgagaatatccggttccaccatttagagaagaaagtctgttcccagaatgaacttatttctaggaagtacagttgttacattaaaaaaaaaatagtcctcccattttgttaaaagc

SEQ ID NO: 241339 - DNA, 475 bp, Homo sapiens
atatatcccagcctcccttgcaattagggaaatgtaaggggaagtttgggggagagacaaatggcgcttcctccagttttctgctgcggatgcagacgcaatggctggagcaccagcagtgttcttgcatcttgaggtgactgtgagggtggaaaccccacttggaggatggcagatcagaaagaaagaaggagccacagtcactgatgatacttgggggcccaggactgctgcttgggtttcttttacatgagacagaaagaaatttgtgtcttgtgttaaatgactgttatttcagttctctgttacttgcagccaagagcaattcctaacaaatacaggagaaaactttattctttatagtttcaaataccatgggcatgggttaatcctctgctgggtttttaccgcttagacaaggtatgaattattaataaaagcactctattaataaagatctcttccaaaaaaagaa

SEQ ID NO: 241340 - DNA, 504 bp, Homo sapiens
ctgagagggagtctacctctgtcacccaggctggagtgcagtggcgcgatcttggctcactgcaacctctgcctcccaagttcaagcaattctcctgtctcagtctcccgagtagctgggtctacaggcatgtgccaccacgcctggctgacttttgtatttttagtagagacggggtttcaccatgttggccaggctggtctcgaactcctgacctcgtgatccacccacctcggcctcccaaagtgctgggattacaggcgtgacccaccacacctggcctaacagtaaggctttaaagagcctactcaactaatactgaagactgttagtaaatatgtgacctatggaatgatcacactctatagaatgatcacactgactgagagctctatattattttgtaattgaaaacatgagttgttttcaaaagaacttttaaataccaagatgatgcaagtttaaaccttccttgtcatggagaaaatgcccttccactccaat

SEQ ID NO: 241341 - DNA, 451 bp, Homo sapiens
ctgagagggagtctacctctgtcacccaggctggagtgcagtggcgcgatcttggctcactgcaacctctgcctcccaagttcaagcaattctcctgtctcagtctcccgaagtagagacggggtttcaccatgttggccaggctggtctcgaactcctgacctcgtgatccacccacctcggcctcccaaagtgctgggattacaggcgtgacccaccacacctggcctaacagtaaggctttaaagagcctactcaactaatactgaagactgttagtaaatatgtgacctatggaatgatcacactctatagaatgatcacactgactgagagctctatattattttgtaattgaaaacatgagttgttttcaaaagaacttttaaataccaagatgatgcaagtttaaaccttccttgtcatggagaaaatgcccttccactccaat

SEQ ID NO: 241342 - DNA, 434 bp, Homo sapiens
tgatctgcctgccttggcctcctgaagtgctgggattataggtatgagctacctgcctggccttattttctaatattgaaccaccagtcttgtattctcagaataaccactacttggtcatgatatattatccttttatataatgctggacttaatctgcaatattttattgaagatttttgcatccctcttcataaaggatatttttctacagtcttctgtccttgtaatgtctttgatttttggtattaatgtaatgctggcttcatttaatgagttgctattaaataattataattcatattaaagtataatagtgtgatttttaaaagatcttatgttttcaaaataagtattaaaatacttatattattcttagattttcttatcaaatttacttttattaataaaagttatattacttatatatgtat

SEQ ID NO: 241343 - DNA, 492 bp, Homo sapiens
gttcgtggtctcgctgacttcaagaatgaagccgcggaccttcgtggtgagtgttacagctcttaaaggtggcacggacccaaagagtgagcagcagcaagatttattatgaagaccaaaagaacaaagcttccacagcgtggaaggggacccgagcgggttgctgctgctggctggggcggccagcttttattcccttatttgtccctgcccatgtcctgctgattggtccattttacagagtgctgattggtccattttacagagcactgattggtgcattttacaaacctcttgtaagacagaatcttatcaattctgccagctgctactgagcccttgcactgtgctagtttttcccaagcccacacacacactggggagccagacactgaggatacagcaagttcttgccccacaaagcccatgccctttagaggagacagatgccagcatcaacattaccaggtgttaagaaagtacctgggaata

SEQ ID NO: 241344 - DNA, 438 bp, Homo sapiens
ttgggatggctcacccctaaatccttcagcacacatctcacatactgagaaagacattcttctctccagcttcatcctcagtgttaccattactgtgtgttcagttccattgttcaatataaattccacactatgatttcccctgctatgctttatagccatgttttaggacccaggtaagtttctcgcattgcctttggctgttattcctcaaggccttccccagcctggaagagtggtctcacctccctctcaatgcaatgaccctgaatcctctgaggagtccaggcctgtttcctccaggtgcatcacatcaggggctacagtgtccaccctcccactactggtgatgaatagatatttttaaaaacctccctaggagattccaatgtgcagcccccctcttaatactcaccaataaattttacttcctgtcca

SEQ ID NO: 241345 - DNA, 429 bp, Homo sapiens
gaatagttctagaaagagcctagtgctgctaaggcaatagcaatggagtagaagagaacatggatttgagagatatttaggagataaaactgtcagaacttccaaatagatgatgtggaaattgagatggggggaaaatagagtctaggattattctcacatttctggcttaagattaacttatcatgggaaacacagaggcggagtgactattgatggaaaaaataactggttttgagttttatgtaaattaagtattatagatctagagctcaagaaaaagtctggatgagatacagaatgataatctttcatgagagtagtaaataagatcatcttgagagatcatgtagaataagggaagtggaccaagagcaaaactcccaggaaaataaacacttaaggaagaacagaagacaagaagccatt

SEQ ID NO: 241346 - DNA, 474 bp, Homo sapiens
actgctgctgcccaggagagtaggcgcatggattatgtgaattgtgatgattgtaaagtccacttgctgcttgtttcagaaagtcttcttgagatgtaattgccatacattgatctatacatatttaaaatgcgagagcagcaagggcattgacacacgaacacacaggtggaggctttgcctgctgggaaggggacgcatccctcaccctagagactgtctcgcgccctcatactcccatccctgccaactcccactcgctggagaccaccgctccactcgccgtcactgcagattcgtgcccaccttctggagcttcctatcagcagaatcacaaaaggcggctgttgtatccggcgtctttcactcccataactgctgagactcggccgtgtgggcccgttcatttctgtcgtgaggaacagcagcactcgttcagttgccgagcactagcggtactagttcagcggccgc

SEQ ID NO: 241347 - DNA, 475 bp, Homo sapiens
atcagaatctcagcaggctttttgtaaaattcgacaagctgattgtaaaatgtacatggaaaagcaaaagtagagaatagcaaaacaattttgaaacagaagaacaaagttggagaactcactgtctgattttagaacttactagaaagctactataatcaagacagtttgcctactagcagacagataggcaaataaataatggaacagaatagagtccagaaatagatgaataaatacatggtcaactgattttcaataaaggggtcaaggtaatgcaaaggagaaagaattctcaaccaatgatgctggaagagtcagacgttcatatgtaaaaaagcaaaccttgttcgggagctgtagctcacgcctgtaatcctagcactttgggaggccgaggcgtgtggatcacctgaggtcaagagttcgagactagactggccaaaatggtgaagacccttctctactaaaaata

SEQ ID NO: 241348 - DNA, 1836 bp, Homo sapiens
aaatgattcatcccttctgagctggctccttcatctataaagcagggctacttcccctcctgcggagaatggcgaggaggactaaaaagacgagtgaaagtgacaaggacagtgcttggtgtgtgggacgtggttcctctttctttccctttattgtaaaatgctcgttattggtgagctgagaggccctgccgacccaggtaaggggacgctggcacccagggcgtaagggagcgctggcacccagggtgtaaggggacgctggcaccagcagcaaggtcggcatcatacgggcttcttcctgggtcaccctgagcattgaggcctttttttcacttcccctgcctacgggttactgtcataggaagctacttggaaaacaggagtttttcgggatactgaggaatcagatttctatttggaagcatccttctcatcttcagggagggaccaagagttcagcacaccctgatgtgcacagcagccgcccgcagagcggggcggggaaggagaaggggttcactgtcctgtgaggagagactgaggcaccgccctgtgaaaggttagcccttccaccgagactcatcaccacacagagatgacaagaccccactcaagcagctgcagccaaagtcctgctgcaaacagccctcctcagatatggagcacatacagcaaagtgacaagagaccgcctcggctaacaggggcacccatgcagctcaggcaaaggaaaacaagcatcctctgggaagaaaaactatctgtgtgaaggttttgcgggggaaagaaaggatttactctcaaccaaatccatcagagaaccgcacgactcttgagagcgcagtgatgtcccagagaagagaattgggaagcacccaggacaatgcacatgccagtccagggacaccatcgaggacctgggcagcctgctttcagggggaccctcatggtgccccactgcggccactaggcagacatgtcaccttatttccaaacgttatctcgaatgaggggaacatagtcagcaatgaacatgagagcagcagcacctgcaagggaacgggagggctcctgcctccagcccagtgtcgtgggtaagaagcattacagaagagacttcctggacacagtagctgcctgtagaaagactcaccctttcagcagcttgtcctgtgatttgcagaagagatctaagtgtacccctagatttaggaatgctttccaaggggcaaggcagcctctggggtgcttgtgaggagagagaggtctcattctctgtggtacgtgcatctcacacaccatgcattaccaggattctgaaaaatctgcagtctatgcaaatgtgcttcaactagatgtatgtattttttaagaaagctcctaaacataggagggttcctgaagcgaacccagcatgacccttccctcttgttttgggtcagcttcgggtagaatatttttgttttttgtttgttttgttttgagatggagtctcgctctgtcacccaggcgactccctaaaatctgagccaccaagctcagccaggtagaatttcatttttggtttcatgttcactatttcctaagacaatttagtatagatgaatgtcaactgaaagaactccgcatgtagaatgctcaggacatactaataatgctttggaaaaggcaatggtcttgtctatacttgattaaatatctctttaaagaaaagcgcattacatgtcacacactaatcagggggtcacatctgggctcatatgacaagtgttatgtttaacaagagtatgaaagcaaacttaaagtctcaataaagcttcaggtagaaggactc

SEQ ID NO: 241349 - DNA, 920 bp, Homo sapiens
  misc_feature (695)..(695): n is a, c, g, or t
  misc_feature (740)..(740): n is a, c, g, or t
  misc_feature (744)..(744): n is a, c, g, or t
  misc_feature (759)..(759): n is a, c, g, or t
  misc_feature (769)..(769): n is a, c, g, or t
  misc_feature (772)..(772): n is a, c, g, or t
  misc_feature (776)..(776): n is a, c, g, or t
  misc_feature (783)..(783): n is a, c, g, or t
  misc_feature (789)..(789): n is a, c, g, or t
  misc_feature (796)..(796): n is a, c, g, or t
  misc_feature (801)..(802): n is a, c, g, or t
  misc_feature (806)..(806): n is a, c, g, or t
  misc_feature (811)..(811): n is a, c, g, or t
  misc_feature (817)..(817): n is a, c, g, or t
  misc_feature (820)..(820): n is a, c, g, or t
  misc_feature (828)..(828): n is a, c, g, or t
  misc_feature (832)..(832): n is a, c, g, or t
  misc_feature (836)..(836): n is a, c, g, or t
  misc_feature (839)..(839): n is a, c, g, or t
cgctctggcctgcaacgtgtctctggggcggaggcagcggcagtggagttcgctgcgcgctgttgggggccacctgtcttttcgcttgtgtccctctttctagtgtcgcgctcgagtcccgacgggccgctccaagcctcgacatgtcgtacaactacgtggtaacggcccagaagcccaccgccgtgaacggctgcgtgaccggacactttacttcggccgaagacttaaacctgttgattgccaaaaacacgagattagagatctatgtggtcaccgccgaggggcttcggcccgtcaaagaggtgggcatgtatgggaagattgcggtcatggagcttttcaggcccaagggggagagcaaggacctgctgtttatcttgacagcgaagtacaatgcctgcatcctggagtataaacagagtggcgagagcattgacatcattacgcgagcccatggcaatgtccaggaccgcattggccgcccctcagagaccggcattattggcatcattgaccctgagtgccggatgattggcctgcgtctctatgatggccttttcaaggttattccactagatcgcgataataaagaactcaaggccttcaacatccgcctggaggagctgcatgtcattgatgtcaagttcctatatggttgccaagcacctactatttgctttgtctaccaggancctcaggggcggcacgtaaaaacctatgaggtgtctctccgaggnaaanggaattcataagggnccttgcgaanccngganaatgtcngaaagntggaagnttccnntggngaacngcaagnccnagagaccnttgngggnggngccaataatcactatgggacacggagtctaaactaacgttatcacaatgtgtgtaagcaataccctggtatatgcccctcg

SEQ ID NO: 241350 - DNA, 264 bp, Homo sapiens
ttattggcatcattgaccctgagtgccggatgattggcctgcgtctctatgatggccttttcaaggttattccactagatcgcgataataaagaactcaaggccttcaacatccgcctggaggagctgcatgtcattgatgtcaagttcctatatggttgccaagcacctactatttgctttgtctaccaggtactggatcaggaagagagagcgagaaactgtgaggttgatgtgataggagttgtttttgctaactggcatg

SEQ ID NO: 241351 - DNA, 376 bp, Homo sapiens
tgaaggagaaagaaaggaaggctgcttcctgcacctgctatgaatcagcaccatgccagtgacttgcagatctttttcagagctaatcttcacggccttcttggaaattcaatattagcgtaatattacctgcaagaagcctggggcacagacagcaaatgattagcctaagggcacacagccagcaatgccagagcagggctgacccccaggccttcctgactcctggctgagctacaccatctttccttcccaactctggagtagcggccccaggacaggttgtctgggtgtagcctgcgattcccaaagcgtaatccttggacaacgcccatgggaagcacctggtgctgaataaaaacagattcctaggctc

SEQ ID NO: 241352 - DNA, 3191 bp, Homo sapiens
  misc_feature (1891)..(1891): n is a, c, g, or t
  misc_feature (2631)..(2631): n is a, c, g, or t
catgtttaattcctactatttattccataaggtactaagaaggtctgtgggaatccttgatacttacctgggcttagtttagctctaaaaaagtagcacaggagcaggagacttgatgagaacttaaaatgaagtgtctggctaagaccaggatagtcgagttgctcatgaaacctctggattcaccgctgggtaaatctggtatcatgattgttttgatcaccatttaaaaatgtcttttctccagttacaaataagatgttttatccaagaatgtgcactagcacaaaaggactttattttgcacaacatcttctctttgataggacacaattttctcaggcctgagttacatgatgggggtggtggctttgaggaacatggagggtctttttgtggcagctaagtcagggagtttcaggataaggatgctgggacatatttctgttaagcaggggattctggtggaaataccaggactttcttttactgcttacataaacactctggatcctctgtgcccactcagaaagtttagggagaaaagctgaaaaggccttgaattaatatctcagatgaaggacagtgccactaacagtctattaaaatacacattaaaaatatgtaactttaaatccctttggtttggtttaaaaaaaattaaagttttataatgatgcctttattcttttatttaaggtacttaaaaaatgtatatattatggccagatgcagtgactcatgtctgtaatcccagcactttggaaggccgaggctgttcttgaactcctgggctcaagtgatcctcccaccttggcctcccaaagtgctggattacaggcatgagccactacacttgttcttattatttatttttaataccagatgatcatctctattaaaaacagaagtgagtgatatgatgtgtacaacagtgcacgtactgtatctttactgagagaatagtggagaaatacccttgtttgagtcatttcctgaacaataggatggggtggtttgtaaaccaaaatttggtctctgctttggtgaagctaagaatgcagttttgatcttaatatgctagtagccaacacaactgaaggtgatgcagcatttttacctcattagcagtgtcttaggcttagctggtaaggcttcaccagcttgcagtgcccaggaagctgacgtaataagcagcaggtcatgggcaacacggatgtcatcttggtccaagatacatccatcctgctgtgtctcatatttgttgtagaatgattcacatagaaaaaccattttgatttttcctgtcttttaaaaacaatacttcagtttgtcttcatgctttctgtaaagttgtatctccaatatgccggtttaattttgtatgaaactggaattttagatgaaaggctttctaatgcacaaaagaacctcagccctttctcagaagcacaacaaacacacacataaacaacaacaatagaagagttccaattaggattttcagaacacaaatacccatttaaatgtacctaacatttctctgctagaagccactttaaattattgttctttttaaaaggaaaatccaatatagttgaaagcttgtgctttataaatatgtgatgcttccctgcattatctgaaagagggagaaaaaccatgtcttgctttttgggatttaacctgttttagctgatcacaaaatctttattaattgcatttattagctatatagcactccaaggtctttgaaattttttggttgcaaaaatctgatgaaaaaattaaattgtatattatcttgtaattttgcaaaaagcatgtgattgagttgtgccctgccaatgacttctagtagcagagcaagcagtggtccttcctcaccatngagagtggcgtcggggagtttcttgcagttacaacaaagcccaaattatggggacggtgaggggagtctttggccacagaataggtttgggtgtgagctgcactttctgccttgctaagtgtcagtttttctggattttacatttgtcttcctatagcttcagcttcccttctttcctttacttcctactgtggccttcattctcttcacttggtggtgatgagtaattttacacaaggccattttctctggacatagactgaggcagtgatgggatggtgaagtaccacggatagtaatcagggggaccacagataatggcagggagccagggtgtctaccctggctctgcactgactggcttggtgatttgtagagttcttagggactgactcatgtgcctgcaaaattcataggctgaaaccctaatcctcaatgtgactgtatttggagggcgggccttgaaggagataattaaggttaaatgaggtcataagggtggggccctaatccagtataactggtgtcattttaagaaggggaagagacatcaggcataagcatgcacagagaaaaggccacatgtgaggacacagataggaggcggccatctgcaagccaaggatagaggcctcaggagaaaccagccttgcttggcaccttgatcttggacttccagcctccagaactgtgagaaaataaatttctgttgttcaagccaccctgtgttattttcttanggcagcaatagcaattgctaaatacaaatataggagaaaaatgaagtctctctaggattccatttcccatcttgaagatggggctagaaatcgtttctacaatagagagttatatgagaataaacaacataatgtaatcaatatagtgcctcaattcatgccttctcatagatggagaatttatgcccacaagcacaggctagtgtccattttctaataactcagctttttgctgagtacttagcattaaaacaaaacaacacaaatcatttatacatgttaagtttcaagtttcccacttcattttgcctggctgatggctcttagaagacacaaacttatggcacagatgacttcttctggttctaacttgtgttatctctttttcaaaagttagttaaattctccatatattttagtgttgttctattggctagaaagacaaaacaaggggaatctggcaatgtaaaaaaaaaaaaaaaatgctcagctgacccagcacgtggaattgcatttactaatttaggctattttatatagtggaataacatatttgcaaa

SEQ ID NO: 241353 - DNA, 2700 bp, Homo sapiens
  misc_feature (1400)..(1400): n is a, c, g, or t
  misc_feature (2140)..(2140): n is a, c, g, or t
tgagatgggatctcactctgtcacccaggctggagtgcagtgggcaataatggctcactgcagccctgaccacctggattcaagcaatcctcccaccacagccttctgagtagctgggactacagtcacacaccaccatgcctggctaattttttttttttttttttggagattgagtctcactctgtcacccaggctggagtacacaggctggagtacaatggcgagactctgtatcagagggaaaaaaatagggtgatgggggtttctatttgttgcccaggctgttcttgaactcctgggctcaagtgatcctcccaccttggcctcccaaagtgctggattacaggcatgagccactacacttgttcttattatttatttttaataccagatgatcatctctattaaaaacagaagtgagtgatatgatgtgtacaacagtgcacgtactgtatctttactgagagaatagtggagaaatacccttgtttgagtcatttcctgaacaataggatggggtggtttgtaaaccaaaatttggtctctgctttggtgaagctaagaatgcagttttgatcttaatatgctagtagccaacacaactgaaggtgatgcagcatttttacctcattagcagtgtcttaggcttagctggtaaggcttcaccagcttgcagtgcccaggaagctgacgtaataagcagcaggtcatgggcaacacggatgtcatcttggtccaagatacatccatcctgctgtgtctcatatttgttgtagaatgattcacatagaaaaaccattttgatttttcctgtcttttaaaaacaatacttcagtttgtcttcatgctttctgtaaagttgtatctccaatatgccggtttaattttgtatgaaactggaattttagatgaaaggctttctaatgcacaaaagaacctcagccctttctcagaagcacaacaaacacacacataaacaacaacaatagaagagttccaattaggattttcagaacacaaatacccatttaaatgtacctaacatttctctgctagaagccactttaaattattgttctttttaaaaggaaaatccaatatagttgaaagcttgtgctttataaatatgtgatgcttccctgcattatctgaaagagggagaaaaaccatgtcttgctttttgggatttaacctgttttagctgatcacaaaatctttattaattgcatttattagctatatagcactccaaggtctttgaaattttttggttgcaaaaatctgatgaaaaaattaaattgtatattatcttgtaattttgcaaaaagcatgtgattgagttgtgccctgccaatgacttctagtagcagagcaagcagtggtccttcctcaccatngagagtggcgtcggggagtttcttgcagttacaacaaagcccaaattatggggacggtgaggggagtctttggccacagaataggtttgggtgtgagctgcactttctgccttgctaagtgtcagtttttctggattttacatttgtcttcctatagcttcagcttcccttctttcctttacttcctactgtggccttcattctcttcacttggtggtgatgagtaattttacacaaggccattttctctggacatagactgaggcagtgatgggatggtgaagtaccacggatagtaatcagggggaccacagataatggcagggagccagggtgtctaccctggctctgcactgactggcttggtgatttgtagagttcttagggactgactcatgtgcctgcaaaattcataggctgaaaccctaatcctcaatgtgactgtatttggagggcgggccttgaaggagataattaaggttaaatgaggtcataagggtggggccctaatccagtataactggtgtcattttaagaaggggaagagacatcaggcataagcatgcacagagaaaaggccacatgtgaggacacagataggaggcggccatctgcaagccaaggatagaggcctcaggagaaaccagccttgcttggcaccttgatcttggacttccagcctccagaactgtgagaaaataaatttctgttgttcaagccaccctgtgttattttcttanggcagcaatagcaattgctaaatacaaatataggagaaaaatgaagtctctctaggattccatttcccatcttgaagatggggctagaaatcgtttctacaatagagagttatatgagaataaacaacataatgtaatcaatatagtgcctcaattcatgccttctcatagatggagaatttatgcccacaagcacaggctagtgtccattttctaataactcagctttttgctgagtacttagcattaaaacaaaacaacacaaatcatttatacatgttaagtttcaagtttcccacttcattttgcctggctgatggctcttagaagacacaaacttatggcacagatgacttcttctggttctaacttgtgttatctctttttcaaaagttagttaaattctccatatattttagtgttgttctattggctagaaagacaaaacaaggggaatctggcaatgtaaaaaaaaaaaaaaaatgctcagctgacccagcacgtggaattgcatttactaatttaggctattttatatagtggaataacatatttgcaaa

SEQ ID NO: 241354 - DNA, 426 bp, Homo sapiens
acattatttcttgatgtgagaagtttcttcataaacttgtatgtaatagtagcaggaataaaaaaataaggttaattgggaaaatactcttccttaatatttattcattatagtttacagagaatagtgcttaaagaatacaacaaaaggccggttagggatcatgcctgtaatcccagcactttgggaggccaaggcgggcagatcacttgagctcaggagatagagaccatcctggccaacatggtgaaaccctgtctctactaaaaatacaaaaattagttgggtgtggtggcgtgtgcctgtaatcccagctactcgggaggctgaggcaggagaatcgcttgaaccagggagtcggagattgcagtgattcgatattgcgccactgcactccagctgggcgacacagtgagactccatctc

SEQ ID NO: 241355 - DNA, 354 bp, Homo sapiens
catcaagtgatccaccttggcctcccaaacctctgggattacaggtgctatccactatgcccagcctcatgtttgctttacatgtttcaggatgctgcttggtacacacatagttatactttttatatcttattgatggaacgaccctttattcatatatagtatccttctttgtcccttgtaacagcttatgacttaatctattttgggtgaaattagtatagccaccccagttcccttttggtggctattttcatggaatatcttttatcagcctttcagttttaatttatttgtgtctttggatctaaagtcagtttgttttggacaatgtgtagtttgatcatgatttta

SEQ ID NO: 241356 - DNA, 631 bp, Homo sapiens
gcttcttgacaagataaatctaaaaagtggcactgaaaattgagagaacagctgaataacaaaacctgactagtaaagtacttggtcctcattttgcattccccgtttttgaagaattcaaatcaggaaatttccgttatctaaatcacaggtttcaataggattaagagaagaaataagagaagcaacaaggtgcacagaaagccagctctgacctttgttatttcatattgaagctcttactttgagatggaccagtagatgaagagagccattattcagaggagctgctcttgctcttcaaatttcagttaatatgaccacgttagaattattttatttttaaacttcagtaacaaggctctctttcctgttttcaacacacatgtttagaataatcagtggaaactctgcaaatggatgaaacaagcaaatcccccaggactgttttgtgactgattttcttacttctcacctatctaatatgaacggtttagattttgctaagctcaatcataaactcaactctagggggaagaaagtctcaagcatatggttcaaccaactgaaaatgctatacaatcaaaaggaagtataggctagaggtttaccattggctgcttgtacattc

SEQ ID NO: 241357 - DNA, 577 bp, Homo sapiens
gcttcttgacaagataaatctaaaaagtggcactgaaaattgagagaacagctgaataacaaaacctgactagtaaagtacttggtcctcattttgcattccccgtttttgaagaattcaaatcaggaaatttccgttatctaaatcacaggtttcaataggattaagagaagaaataagagaagcaacaaggtgcacagaaagccagctctgacctttgttatttcatattgaagctcttactttgagatggaccagtagatgaagagagccattattcagagatttttaaacttcagtaacaaggctctctttcctgttttcaacacacatgtttagaataatcagtggaaactctgcaaatggatgaaacaagcaaatcccccaggactgttttgtgactgattttcttacttctcacctatctaatatgaacggtttagattttgctaagctcaatcataaactcaactctagggggaagaaagtctcaagcatatggttcaaccaactgaaaatgctatacaatcaaaaggaagtataggctagaggtttaccattggctgcttgtacattc

SEQ ID NO: 241358 - DNA, 668 bp, Homo sapiens
gttgggggagaatgaaagaaaagaaaatctattttagaaacaaaaatgtatctgtgcagctttgttttctcatggaagacaaaggttctttccaataggacagaatgacagttccacttatcttggctgcacagaaattagatcagtaacatattttctgttgaagaagaaaccttatcttagtggctccatttcagaatcaatcatctgcatttcagtcctgccccttctcacaagcagggaacattatacaatttgtatgtttcaattagtttgccataaaaaataagtagctcaagggcattagtttattactggtatccagccatgttttcttttgctaaatgacattctgaaagcctccattctgagcataatcaccttagggtacccacagaatgtggccccaaatgattcaattacagctagaagttgttctcttcccaaagcacgagtcttttgcattcacaggatattttttctttcataaacattcctgcgagaatgtaagtgcggatgaagattgtgttctgtcttcttcttgtcttttttctgtttactctgattttattttataaattattttattcaaatgagaaaattttccgctagaaccaatagtaaaggatggtgagtttccagctgacccacaatgacgtatttaactc

SEQ ID NO: 241359 - DNA, 776 bp, Homo sapiens
attgtcaacaagagggagtggcaattcagaagcatatttaagccaagtcctcaagactagaaagcatgaagcaggggaggcgttttgaaagcgtaagaacgatagaccatgggcatggatggccgagtctggggatcagcatcgtaatttgttgagaaggaggccgtgctgtgctgccagttattaattggtttaatcggttgatacacagccctactggcctaaccagtagcccagggccctggaggatttgcaggtcgtgtcagaatttgattgcagttccctccacttggcataaggagacactatcagcctgattgggagggtgatggtgggatggagccggccgaggtggcggcgctgagctgaccacaccaccagccatagagtgggagcctttcctgccggcttaactgcagctaatatcaaaagcactggtatgggctgtctatctgtgctggaacctgagtttatctttgtctgcaattacgattcttctcggtttattttgccagctcattatccagcctcctggaatcaggcctcccaaatttagcaggtgctggggaggaccctagggagtggtttatgggggctagctggtgaaactgccctttcctttctgttctatgagtgtgatggtgtttgagaaaatgtggggctatggttcaggcgcacttcacatgtgcaaagatggagaaagcactcacctacacgtttaggctcagaatattgattgaaacattttgaatgatcaaaaataaaatgttattttt

SEQ ID NO: 241360 - DNA, 623 bp, Homo sapiens
ggatggttaagcaaaggctataaaactgtctgaagtagttcaaagtttatgtagaggaagtagttaagataactataaatggatgagggcaaatggacatagaggtgaggtttctatgcttaacttgaagtggtaaaatgacatcagtagactgtaagttacgtgccaagaacagccagtaaaaaacaacctatactaagagatacattggaacacactattgacaaatcaaaatggaattctaaaacacttacataacccataggaaagcaggttgggaaaaacaaagaaatcagaaacagaacagatgggaagaagtaaaatgaccgactgtatattcaatgtaaatggtctaaataagccaattaagagataaagattggccaggtgcagtggctcactcctgtaatgtcagcactttgggagctgaggcaggtgtatcacttgaagtcaggagttcaaaatcagcctggccatcatggcaaaaccctctttactaaaaatacaacaattagccaggcatggtggtgcatgcctgtaatcccagctactcgggaagctgaggctacagtgacccaagacatgccactgcactccagcctgtgcgacacaagaccctatct

SEQ ID NO: 241361 - DNA, 825 bp, Homo sapiens
  misc_feature (32)..(32): n is a, c, g, or t
  misc_feature (53)..(53): n is a, c, g, or t
  misc_feature (94)..(94): n is a, c, g, or t
  misc_feature (117)..(117): n is a, c, g, or t
  misc_feature (138)..(138): n is a, c, g, or t
  misc_feature (181)..(181): n is a, c, g, or t
  misc_feature (202)..(202): n is a, c, g, or t
  misc_feature (281)..(281): n is a, c, g, or t
gatgtatctgagtgttgtgatgtgaataactntcccctggactccttggatgntttccatgaaaatagtgtccttatttatccctatttccctncttaatatgtcattgcggaggancttaaaaattggtccaaggtntgaggtattttcagtctgatccttcatgatgtaaatattttanccagtaccagttatttatgantaatcagcttccttttatatatttatcatgttggatcaagcattaaataaaaatcaatatattctatatgctaaatgtnttatgtgcatttcattatttaactttcgtgccactttatgtagatactattcctattttataaatgagacattaaggcttagagaggtgtataacttgccccggagtgtatacatctatacatatatgtatagtatacatatatgtatactatacgtatagtatacatatatgtatactatatgtatacatctagtaattggcaggagttgaaatttaaatcccaggaatcccaagctcttaacagctctatgaacaaaattttgcatggaattacagaatcatgaatagttgatactatttgatatggagtttgggggtttgttttaaaactttgtttgatttttgtagtccattgattaaaatatcaactcactttgtttccatttttatgtagagagccttgggattttaaaagaccagcctcactcagcttttaccttagaaaagaaagtcatcaaaacagaccctgaagattcaagatagctgtgattctctcaccgttctctggaaatggcatcagatttaaggataatactccatca

SEQ ID NO: 241362 - DNA, 361 bp, Homo sapiens
taaaaccatgaaaaccttgggttacttaacttatcctagtttactgaccattacctagggacctgacttctctaacagttgacaaaggaaaacagtatttacacaacaaatcccaacttcctggtttcatccaaaaagggctgtttgaagtctccaaagggccaagggcctaaaacgaaacaaattccgccctacacagaaaagcaaagtcaacatcatcctgttacgaccttactagcgacgacaagggccaccggcgaccgtgcagctgtgcccttaacgctgcgcagctgccgcgcgcctcggccgggtgtttatggcacacgaggggtggagagcgccccgccatgggggcggccgc

SEQ ID NO: 241363 - DNA, 375 bp, Homo sapiens
cctctgtaaaatgaggtgaaacaatatggttaaaaaaagaaatctgtgtataaatgttgatgagagaaatgcttcaaagggtaaaaactaaagtgatgacaaagtggctcatttaccaaagaatctcattagtgtaacatatggatttccatgcactgcctacgacctcataataagatatttcttaaaataacttacaatattttaacaaaatttctttggttaatgaattcagttgatagcagatagcaacagaatgcccacagctagcacatgtgggcaaagcattggcataagaaatctgataaaatcaatctattagtgtctttaactaactaaaacattacctacctcccagccagtactctgtataat

SEQ ID NO: 241364 - DNA, 340 bp, Homo sapiens
agttcgagaccagcctggccaatatggtgaaatcccctctctactaaaaatacaaaaattagccgggctcggtggtacatgcctgtagtcccagctactcaggaggctgaggcaggagaattgcttgaacccaggaggcagaggttgcagtgagccgagatcactccactgcactccagcctgggcaacagagggagactctgtctcaaaataaataaatgaatgaataaatgaatgaatgaatgaataaaatccttaatcatgaagggtgctgaccgattaataaaaagtggattaacagtaacatacagatcatgtttttaaaaaagaatatttgtac

SEQ ID NO: 241365 - DNA, 422 bp, Homo sapiens
acagattaattcaaagtcctaggattagtgtgatgttggtgtggtctagaagtgaattgtggatggaaatgttctcagccaagtgtattcactttgggagagcttcaaagaacagaatgattttgaaataagaatatataatatatagtcttactggaacctatgaaaaactcatgtgttatctactactcaagccaaaaaaataattttttatgcttatgttgttaaggatttacttgcatcacttcattaattagcaatttgtattgtatcaagtgggtctaatccttttaatagattccaaacaggctacttggctattaaattctagtttgttttatatttattcatgagaagaaaatgccatagaaagattccatgaaggaaaatgtttgctttgcattcagtctttcaacaataaa

SEQ ID NO: 241366 - DNA, 484 bp, Homo sapiens
ccaataagatcactaaagtacctcagatcagatttcaaatcagcctactcatcaggtccactctaccatgccagaccaggcatccaagttataaagatgagattccaaattacccagctgccataaagctcgcgttcccgtgtgaatcctgaactctggctgacgacatctggagtccactgcaatcatgtgttccctcaatgactgaaaaacctgagcataatgactacctaagattcatatctgtacatacccaaaatgtttattaaatagaaataaagataaaataatgtgtaggtttatggctgtatttttgcttttatggcatttgggtcacttctatgattatctctgttccatctttgatcacaaatgcaagctctattgttcctttaaggaaatacaaaatctttcatgacaatctcttttaggatgtgtctttctaggaacactctgaaaaataactagaattggcaatgctaag

SEQ ID NO: 241367 - DNA, 442 bp, Homo sapiens
ctagaagagaggattttgaatgttttcttcactaagaaatgataaatgaatgaggtgatggatatacaacttattatacaatgtatatatgtatcaaaacatcacactgtaccccataagtatatacaattattgtgtcaattaagcataaataaaaaggttcatcgatttaaatcgttcatctatttgaacagtttaaattggcttatctgttaaatatttctcataaaattgaagatttacttctcttgatgtatttctccatagatgctgtaaaaaattgctcacaattctccagaaggaaaaaggccacattattatttagagctttgtaataatgaagaactgaaacaattaattgttcaatagccaataactagataaacagaagttaatttatttatgtaattctatcctgcaataaaaaaggaataaactgtat

SEQ ID NO: 241368 - DNA, 313 bp, Homo sapiens
tcatgtgccatatttgctgttggaaatcattatacaatgaaaaatatgtacaaagttcagtatgtcacataaaccaaatattgtagaataattcaaattggaagagttgcaactattaaatgggatgaagaaagtttattgtaccatcattagtctttagcattgtacttgttattttacaaaatatctgtttatatagctttcaatccaagttgatcatacattcagggaaggcagaaattgtgttactcacttttgaaccatcaacatacagtgcaatttataaaaaccactaataaataattgctgaatg

SEQ ID NO: 241369 - DNA, 365 bp, Homo sapiens
catgattattaagcattttctccaaagtctgaactacagtttgttgaggtttcattgaaaatgatactaaaacaaatttgcttaaaagtaaaatggagttattggcatcacaaagatcatagtcaccttcttaagaattgcataacctttaatgactgtaaaggatttttaaagacgatccttgcgactagttattaatacatttttttgaggctgtggaaatcagataatttgggccgggcacattggctcacgcctgtaatcccagcattttgggaggctgaggcgggcggagcacctgaagttgggagttcaagaccagcctgaccaacatggagaaaccttgtctctactaaaaaaaaaaa

SEQ ID NO: 241370 - DNA, 339 bp, Homo sapiens
atttcttcactcttgttgctgtgatgttttataccatataattacacccactacttatctattctattgctgttagacatgtgaatcgtttcaaatttggggctattatgaatagtgttgcttggaaaattctcaaacttgtcctttagcactcatgtggacccagtttctattgactatttaactaggagaactgttgggttatatggtatgggtatgctcagcttcagaagcataagtattttttattatttttttaaagaaatgggtgcaaactatttgctgcatcaaccatatttaatctatctgtatgcattttttttttctagatggagtttc

SEQ ID NO: 241371 - DNA, 877 bp, Homo sapiens
tggatcggttgacaggattgggtgtgtgtatacatttataaattgggtggatgcatgtattcatggatggttggatccgttcagtgatggagggtcaggtgcatgtatggatgggtggatgaatgcatggatggatggatggatggatgtgtgggtgtctaggtagatggatgtataagtgaaaggatgggtgagtagatgcatgaatgcatggattagtagatgggtgggtaaatgggtttatggatggatagatgaattgatgggtggatgggtaagtggatgagtgggtgaatggatggttggatggatgagtgggtggatgggtagctaaacagagggatggctgggtaagcataaaacagtcacctaagtttgacaactggtgcatattatatgcccagtggcatggctcagaaagtttatgatttaggaaagcagaaaaacttatggtccccaggagatgtggaacttggtgccaatgactggaagagaccctctgaagtagtgcacaaccctgggacaccaatatatcactgctaaaaggaagaccatgaactgatcagaagacccatcagaagactaggccttgtcctacagccccagcactcctgagcagcaggacacacccgtagggcaaaggaattttgtttccgagggaaagagcatttggtctctgtggacccttcatcaagggtcatgttgctatgagggaggggagcagaggtacagtcatgtgagcctggtgcagccttgctgcagcatgaggaacttagggcagatgtagtaaggacttcgggctatgaggatgattaagtagaggaggaggctgtgactcagtcctgcaggctgtgggagcagagctgtttctcatggt

SEQ ID NO: 241372 - DNA, 949 bp, Homo sapiens
aggatcctacaggacattcaatcatcacgtctccttaggcccctctcaactgtggcagtttctcagacttcgttgtttttgctctttctctttcacgtggggagagtgtggaacggctcagtttctccagcaaggaatcctcctgtcctgtctaaaaggcaacctgcatcctaggagcaaagagagggaaaagcactgaggagtacggccatgccataggcagatttgcaattaattctctcgcttgcagccctatgactaattctgggccaggccgtgcatattgtctccaaatcctgaggctcttgcctcccattctccaaagaataatcagcctcctgcctgggggggtgattacacagctgctagggttctatgcctgagccgtaagtgaggtacacagactgtttcccatgttaacatattcttcagtttattcccacactctctgctgtactggattcctcagtttcggagcttctccaggagtctacaggactaacttattgtctccttgttagtaccaacttcttgcttgtcctttaagatatgatatcctcaatctggttatatcagacacctttcctacattcctttcctgtcttttgaaatatgattgaaatatttcatcaattaatgtcttctctcctattctctttgtacttgcaagcttaagcctcttttatcttttcaaatattttagcaggctctctgaaaggagaggctataaacttctatgtctattcttctatctttaaattcaacaagaggcagaacactttcatggttaagttaggcctgcatttaaatcctgcctctgtcacatacttttctaagacttagcaatttgctaacctctggaaaccttgacctcctttctgtaaaatgagaacctacctcattgggttgttgtgaggatcaaataaaatatgtatggttggcacgtact

SEQ ID NO: 241373 - DNA, 314 bp, Homo sapiens
gatgcttcttccagggtcctgcccagaagatggattgtgacatctcactggaccagcacccacccaggaggcattgcagcatatatgtgaggccagatcaaaggctgaataatgacccttgtacctggagccaggatgtgcaggatggtgattctcctccctgaacctttttacagtgtcctcagaagagatcataacatattgctggattcatcatctaggttatgtgtctctcctctcccgcctgaacactgattacagtgaagattgtagcatttctctgcactgcatccaaatgacatgattctgttgca

SEQ ID NO: 241374 - DNA, 499 bp, Homo sapiens
ttaattgttatacattcatttttgacttatttttatcattataaaatgttgtttgctcagaattttttagtctgttaataatattgataccttttttattttgctggatatctcttctctccttttttaaatattaagtatgttattttaaatatgatatgtctctcccaaagagcaaagctgagccaagctgaatttcattatttgactaaatattagagactttacctttttaactgaggagtttaatacatttatatttcttgtggtaatggatgtgcctgattttaattattttgtactttctatttttgcttctttaatttttttctttttgattgatttccttccctcttgcactagtttttgttcaaattttattgaccttttttccttctagtattctagaaaatgtacatatggtttctaattatagtgatttgagatacaaatatgttcgtatcagatcagatatatttctgttgaatgcaaaaataaa

SEQ ID NO: 241375 - DNA, 471 bp, Homo sapiens
aaggtcagttttcttaatggagaaaatcccaaagagaaagaggcaaatccccatctttcatgttgtaactatcaaagttccagacatgctttgtctgtatcttccttcaggacaaatccatttacttctactggtgagaggctggacttggtcagctgtgcgggaggaacctgtgctgtctgtaggtaaattccagccacgctcctcagccctcaccgcttgggcttcctcttcttcctgactcactgtccctgtgacgtgtgttcatcagcacagtccatctctttttttctgcctcccccaccccttggaacagaaatgtattggctgcatacaaaaattagccgggcgtggtggcgggcgcctgtagtcccagctacttgggaggctgaggcaggagaatggccgtgaacctgggaggcggaggttgcagtgagccaagatcacgccactgcactccagcctgggcga

SEQ ID NO: 241376 - DNA, 1338 bp, Homo sapiens
  misc_feature (71)..(71): n is a, c, g, or t
  misc_feature (143)..(143): n is a, c, g, or t
  misc_feature (187)..(187): n is a, c, g, or t
  misc_feature (230)..(230): n is a, c, g, or t
  misc_feature (655)..(655): n is a, c, g, or t
  misc_feature (724)..(724): n is a, c, g, or t
tttcctgcccaaagtttggggttgggagggaattcccaggggttcccaggacttgggctcgcctcccagancccgcaacctttgcgtgcctagcctcggcaatgaccgcccatctgccacgagggggcggcagcgcaccgttnagacgctgcgcccctggtgcattatgggtcgcgtagtctcaaangtggcataagcatcctggaacgcaaacggcatttcccagaaanctacgcgacaatctgagcctggtcttgcccagagctggaagctgaggtctcgcccctgccggcgttgcgggggattgtgggatgtaggcatttggctccgcgctccgcgaagggcggtgcagcgcaggcgcgggcatccggtacagacagccgagcttaatctgaggcggggaaccagcgtcccgggggaggcgccgaagctgactttctggccgcagtggaagtgaggcgagcgagctcccttagtggctggagccggctgggcctccttcctgtcctcctgctttcctgcatctctacttgtccctttccccgggctcctggtccgctcccaagcctgttcaagcacgaggcgtttccatctaaaaaaagaaaagaaatctcttttgccgggcgagatgtcagagccccgggagcgaaagtgntggtaatgttagacagaatgagttcctcttcaaaaatctaacttccttgtcctttgctctatgaactgnccttcctgcagaaactgcccttaccggggaaactgcccctccccgccgctgcaacccataccccgcctctattagaaataggcaatcggaatcagcttagattgtgaggtccaaccctagccaacgggggttaaaaacccctgctctcctttattaggtgtgcttttggtacaggtctgggcagcacgcttctgcagaagtaaactttgccttgctaagaaacttttctccgagtgctggtctctctctgtggcaccaagaacttatttctaacagtaagaagaatttactgaggacagcgtaggcttgaaaaagaaaagttttactagaaagaatgctgccgggcactcacgcctgtaatcccagcactttgggaggccgaggcaggtggattgcctgagctcaggagttcgagaccaacctgggcaatacagtgaaaccccatctctactaaaatacaaaaaactaactgggcatgccagcatgtgcctgtagtcccagctacttgggaggctgaggcaggagaattgcttgaacccaggaggtggaggttgcagtgagctgacatcatgccactgcattccagcttgggtgacagaatgagactccatctc

SEQ ID NO: 241377 - DNA, 568 bp, Homo sapiens
ctacgtcttctctgaaatttaatgatctctatggtttttgctttaaaatatgtaccccagtttctgatcactattaaaatttttgatagtatataaattaatattaagtaaatttcattctagatgaccaaaatgctttctgtatagtgataaaatgcatacggttttctagtctataatcaaatgaagcaaagatcataataaataaaaactaagattttccagattcacttatttctaagacactttatcacagaaatcatatttgctactataagattaattgggccgggcacagtggctcacgcctgtaatcccagcactttgggaggccaaggcgggcagatctcctgagctcaggagttcgagaccaccctgggcaacatggtgaaacaccctgtctctactaaaaatacaaaaattagccggatgtggtgcatgcctgtagtcccagctactcgggaggctgaggcacgagaatcacttgagccctggaggtggaggttgcagtgagctgtgatcatgccactgcattccagcttgggctaaagagtgagactccatctca

SEQ ID NO: 241378 - DNA, 782 bp, Homo sapiens
gtgagtcagacagcaagggcatgtccttgataaaaggctgcacagtctcatcagcctggccaggcctgtctcagggtgtggtttcaggagcagaaggactggttgacctaccaaggctggggacagggatgtgagaagaatccttttcttgttctggtctgaaacctgcaaataacttgatgggagttgagacaaagtggtcctcagcttctctccagctttccagactgccatatctggcagaggttctatgtgcggagaggcccaagagtaaactgaaagcaaaaacaattgagctagctggtggattttgaaggcctctaatcatttaattaccttgcaagaagcttttgcatttctgctttttctttcttgtttgctcttcttgtaccaaatttctttcttttaagtatagaagaggagcctccttctgttgctcagaaagagggaaaaagaaccagaagggaataaaataaggccaggcgtggtagtaccagcactttggcaggccaaggtgggaggatcacttgagtccaggagttcaagaccagtcaggacaacatagtaaactctccccaatagaaaaatatttttatttttctacaaaaaataaaagtaagtaagtaagtaagtaagctgggcatggcgatgcctgtctgtagtcccagctacttgagaggctgagatgggaggattgcttgagcctgggagattgaggctgcagtgagccatgagcaagccactacactctagcctgggcaacagagcaagatcctgtctca

SEQ ID NO: 241379 - DNA, 524 bp, Homo sapiens
caaagagatcttctcaagtgcttaggattacctctcaacacacagcaagcatgtccctgcctcccaaagttctgggattacaggcgttgagttatcgtgcccagcccataagtgtcttaatgccatgaaatcctagtgagaagaaacttcaggacacatttgaagcagatcaatggtccccctcaaaagacattcttatcctaccaaaatctttaaataagggtatgtgtacaaggctgatcattgcaatggtgtttgcggagatttttacaatgaataagggaattgttgattacagtgttatgtcaatacactggtgcaagtaaaaagaattaggtggttttatcattaagcttttttgctaaatcaacaaatacttattaaatgcttactgtgtgccaggcactttgtttggtgctgggaccacagagggggaccaaatagacacattcccggctccattccattcaactcctagttgatctgacagcaaggaggatttgtgtcctttcattcattcagtg

SEQ ID NO: 241380 - DNA, 346 bp, Homo sapiens
gacaccagcctggggccagaggagatgagaggagccccagtcactggagtccagggaccagaaagttgtagagtaagtggggacctgtgtgggcctgttcagagggagtaagggcattgatctgaaagcaaacagggctaaaaccaggactgaaatccaggccactcgttctctcctcaacacccatccatacccttctactgccacttaaccctcacacagctttgcctgacatggacaagtttccagcataggccaaacccagccacagcgtcggggagcaggagccgtccaatgtcccacagggcagctcccaggctgggctggtgacaggagaggagcttgg

SEQ ID NO: 241381 - DNA, 303 bp, Homo sapiens
tattggtttagctgctatattgtttggtgtgtacagtttttattccttttcctgtaaattgtatcttctgtgccattgtgtaacattactttgtctcattcagtacatttaactttaaattccactttttcagagaggaatattgccactcttgcttttcatgtgtttgtttgtatttggctgggattgctttgcccagctctttatttttaaatcatttgaaaacctcagcctctgtctcttaatggtagaatttggttcaaacatttggtgtaataatcgacaatattattttactccttc

SEQ ID NO: 241382 - DNA, 439 bp, Homo sapiens
  misc_feature (8)..(8): n is a, c, g, or t
  misc_feature (18)..(18): n is a, c, g, or t
gggcgaantagacctagnggatcccccgggctgtatgaattcggcactaggcctaatccagtccaaatcgtgaagatttgtgcttatgattttttggagttttgcgccttcctctctttccagtaggttttggtccatattgagtcagcgtttgcatgtgatgtaaggtaagggcctgccttcactcctgcacgtgcagacccagttttctcaggaccatgtgttgaaaacactgtattttgccagttggcatcctcttggtgcccttgctgaaaatcgattgaccgtaaacctaaaagctcatttctggatcctcagtttggcttagtgactgcatgacagtcctggtgcccgttccacgctgttcaggacactgaagcttcgcagtcagttttgaaatcaggaactgtgagtcctctaactgctctctttcaaaagt

SEQ ID NO: 241383 - DNA, 436 bp, Homo sapiens
agcccggggttagggcatttcgttgtcacctggcgacggtgaagcctagtttcctccagagagattatgctgctctccatccaagtgaagtggcaatggtgccagcctgagatttctgccctgagttttaagtacgagagtgtgggctgacaataaactcctttattctaccctcttctgttctcataaggagaaatttaaattctggaagagatgaagcttgcatttacccaggcctgttaatgaagaatgttggactaaattttgagaattcagactgcttaagaaatttgcttcagaatccccaaaggattctgcaaggagctagaaagaacattttctaacatcagttacttgttttaataaactccttcggggtaagattttgattcccaccactgatcatatcattaaaaagtgtattctctgcactaac

SEQ ID NO: 241384 - DNA, 363 bp, Homo sapiens
caagacaggaaaaaaagaaaatatctttctcctatatcatcatacaagtggcaagtaggtattaataataaaataggactgggccgggcgcggtggctcacgcctgtaatcccagcactttgggaggccgaggcgggcggatcacgaggtcaggagatcgagaccatcccggctaaaacggtgaaaccccgtctctactaaaaatacaaaaaattagccgggtgtagtggcgggcgcctgtagtcccagctacttgggaggctgaggcaggagaatggcgtgaacccgggaggcggagcttgcagtgagccgagatcccgccactgcactccagcctgggcgacagagcgagactccgtctca

SEQ ID NO: 241385 - DNA, 493 bp, Homo sapiens
ccagtgaaaagaaaatgaaattgtccagatttgggcacagaagaggcaatttagaagaatgacaatttagtattgaactatttttagagtaaagagcccagagaccctgaccagctttacagcacgctcaagagcatcctccagcaggtgaaggatgcaaaatttttccaagggatgtgcatctgcagacagttttaagggactattgtcaagaactgtgaaggatctgagcttacaagttagcctgcttcagttttatggatgttggcagaagacacataactgtttggtcagagacagaaagacttccattatttgcagtacagcacagagttgcacgagcttcatctttgctctggttcctgttttccctcaagtttactggagatgatgacaaggagttcaagttgatgctacacacagtttgtgtcacagatgaagaactccaagtaaaggaaacttaaatctttaataaatgagcagtaagcacaaa

SEQ ID NO: 241386 - DNA, 417 bp, Homo sapiens
ccttaaaccattctcctgcttggcctcccaaagtgttaggattacaggcatgagaccactgcacctggcctcagtgttcttttgcctggaaattagcaaaccttcttcaactatcactgacagatgtcattataaagcatacttttaaacattactccttacaagtgaaaatcctaaatgattcctattgccgagtggggttctaaccctttagcctggtgtccaaggctctctaccctctaatgccagccttatctcctgcctatgcccttggtgaaccttatattccatctagccaagaacacaagttttcagcatgccctgcacttccccccatgacccaagtctttgttcttgctattgcttctctctgtaattccctttcttccctatctaaccccccttctcatatgtgtc

SEQ ID NO: 241387 - DNA, 510 bp, Homo sapiens
ttaattttgtgtaatcagtgcagcagggatagaaagaagcaagacagttagctggactggtctggagagagaggactgaatgaaagagaattgagtgagtgctgatttcctagtatgtcacagagatgacaattctgagaattattggcaatcttgcactgcattcgaaataaaaggggtgaacaaacacattacaattctcagggcttttgctatagaaacttattgtcagaatagggacttattgccaaatgcctgaagcatcttcataataaaagacagtaaccttgatgaaccaattattaacaatgtattacagaaagctgaagggaattatgattgagtaaccataggttagtggttgaattttaacactttaacagttggtgaatgaggatggagagtatagtaagaaatgactgtgtatgtcaggccaggaaaggagatttctttctattctctctgtttctaatcctattttggaaccaatctagtgagtctgatgctaaa

SEQ ID NO: 241388 - DNA, 2903 bp, Homo sapiens
  misc_feature (15)..(15): n is a, c, g, or t
  misc_feature (372)..(372): n is a, c, g, or t
  misc_feature (432)..(432): n is a, c, g, or t
  misc_feature (665)..(665): n is a, c, g, or t
  misc_feature (809)..(809): n is a, c, g, or t
  misc_feature (1195)..(1195): n is a, c, g, or t
  misc_feature (2478)..(2478): n is a, c, g, or t
aaaaaaaaaattcantattagctttgactatagccaattttgaatttggtccttatggagcaatatttttcttcagacctcactataaagcagaatagaatggttctagacaataacttttcatggagggtatagccagtcatcatcaatggccatggataaaatcctaactaaaaattccactttgacaaacatggtctcctaaatatgtctaccaggatgcattagctgcaaagtgcatccatccatgggttacagggtaaactgaccttctctatggagttctcttataattcaccagttatattggaaactatgctgaaaacaatgcctgcacttagctaatgctcagtctaattcctggaaataaanaatcacccaaattattttccttttcccccaacatctttttcttcgtattatactaattcntgttcattgaggaaaaattagaaaatggagaagaaaaaaaaatcacaactctatcatgtaaagaaacaatactaacattttactcatgctgtcaaatattttcctacccacatatattttgcctgtgtctgtctttaagctataagttgtgttgatcctgcttcttacaacctactttagatcagctttacttccatcctacaccatatggaagtgcattctccaagattccnggaattccccagagattcatatttatctttgtctctttgtcaacattggttatgacatctcatttctttcattttgtagctatttccttttctccacttcgcaaatagctccattctccccaaacacatacaatatcactcacnaggtagctctaagttctttggccactgactaccttgttcctatgctctttctctgttccttctctcttctctccttcccacatccgaaattcctgtttatttcttatttatggtaccttaggaacatgccttgatgagatagttcagaatatgagggcctgggtgggaaagaggcaaagaccctaaaagaaaccatagtgatagctagtaaaatactttttttttttctcacaccacatcatgtacttgacttaaagaaggaaaatagagtcatatgactttggcatacaacttctccattggtcaggctgaagctttcttggaaccccactctaatctgagactcttcccacttgatcttccttccttcctcgactcttttcaantgttagaactttattatgatcttaagcttcttcttgccttcttcagctccttctccttgtccttcttgaatattctaccaataaatcttctgcaataattctgtcttggcatctgcttctctgaagaacccaaaataatacacacacacacatttaccaagtgaccataaagagtcacaaaacctgttcttgcaaaacttggtgatgtgccaagctcgtttcttttaggtacttgaagttcctttcatgacaagtttactagaggcagacactaaaatattctagtgctaactgctcttgcggtttctatcatactcctattaatgcaagagcagatgtgcttgtacatttttccaacaataaaatattttgagtatctcttttgctagttagcaaacccgatactgatggagttagttctcattgaagcacttgcagtagctgcttctaaagcacagatttgtggagtgcttgctctgaataggattcttcagatatcaactaaccatccctgtggagcagattcgccccgtgcatgcatgtacatatcacatagcctatgcatatttgaaataaatttcagtataatgtcgactttacccatgacagtaaacaacagcatgtcatgactgcataatggtcaattgcatgaatatcccacttattttaataaattctgcaagataggttattttgggctcctaagttttcactgtttctgatttagcaaatctgtatactttgcagtgtccaacttttcatagactatttcctagaagaattattggcttaaaaagcatggccaattttaaggtttttgatatttgttgccaagaagtcagccaggaagtttgttccaatttacacttgaaccatttctatatgagtaggcttatttcttttccttttattttctgcatgtgaaattatgtgtaaaatgtacagtccaaagaacaacagaaaaaaacctaacccttgaatcctccaccaaggttatgaaatagaatttattaagttggtgcaaaagcaattgcggtttttgtcatgacttttaatggcaaagaccacgattacttttgcaccaacctaatagaatcctcctgcatttgctgattctcatcatacttcttcatgcctcccctcttcacaggtaaatcatctagaatttagggttatgcattcccttggttttcttcatagttttcatagttaaatgatagagtgtgtgtgtatatataactatttgtagtcctaaatattatatagattttttaaatgtgggnggcaaatacaaagctagttgtgtgaggagggtatggtcaccgctgttaggtaaagttgtctaggacaagatgaacttgcagtcttctgcatcctgggactttataagggggctttctggtatattcagagggagagaccatgaagctcaccacagtccatacatttgcaaggactgtaatgcaaagcaggtactaaccacgtgatcagtgggagtggcatgaattaccctgggtttcttgctgctaagcttgttccagctcgcagaagtcagtgataacagaacactttggcagaatgaataaatgtccacagttgatttaggcagcaggacctggaagaaagaataaggaatttattagcaaattgtcaagatcactagattcgtatccgggccagtctcaccagaacatttctccaggtgttt

SEQ ID NO: 241389 - DNA, 551 bp, Homo sapiens
ataattcaaagataacagagacctactccctttctgtgcaatattacaaataaattggagggaaataggaagtgaaaaatcactctaatcccacaaccatgatttcaacagtatgccgctgtcaagtattattttttgtaaggagtgttaaaatactttgcatttatatagcactttacatttttaagtgttttgggctgtatattaatttcattctaataataatcatgtacatttagtatatgtttcttgctctatccagaaataattttctctgggcatatttccatactgaatagcaaatagatattattattactgcaagagaaacttgtaggaagctgattgtatggggaagattgttaggcgtgtgagtgtatggagttttttatatgtaaaggtgatatgaatcagccaggtttgtgtttacttttgcctccacctggccatagaatcactgataatacctatcttgcattgttactgagaagtttgagtgaaatcgtgcatataactcacatagcatgttgcctggcacctagtaaattgtc

SEQ ID NO: 241390 - DNA, 342 bp, Homo sapiens
gcacacagggcagaaccacagagtgattacatacaccctaaaggggttcaggagctcagaagcttatatacgatcttgaggttaaaaaagaatgggaggccgaggcgggtggatcacctgaggtcaggagtttgagaccagactgaccaacatggcgaaaccccgtctctattaaaattacaaaaaaaaatctagccaggtatggtgacgtgtgcctgtaatcccagctacttgggaggctgagacaggagaatagcttgaacccaggagatggagattgcagtgagctgagatcatgccacttcactccagcctaggcgacagagcaagactctagctcaa

SEQ ID NO: 241391 - DNA, 546 bp, Homo sapiens
ctcaattagatagaaggaatatgtttgactttttttagatctattacacaacatggtgaatacagctaataattaagcactgtatgtacatttcaatactgttgagagtacatttcaaatgttttcatcacaaaatatgtcaaatatttgaggtgatggatagattagctttatttaatcatcccacattatattcaaaaatcataatgccacttcgtacctcataagtatatacaactataatttgatatataataaaaaatttttaaaggtagtctcctaacaatcatatgaggattatcctaaaatgtcctttagtaactgtcatggactgaaaagtatcccatgaagagacaatgtctactcagaacatgtgaatacaaacttacttggaacatgggtctttgtaaacataattaagggtctccagacacaatcaccctagatcagggtgggccctacattcaaagacactgtccttaaaaggtaatgaaaagacagagggaaaggccgtgtgaacgcagaggcagagactggagtgaagat

SEQ ID NO: 241392 - DNA, 593 bp, Homo sapiens
aagtgtcatagtaacatactaggaacaaccaagtcagttttgaaaaagcaagagtatgtgctttatcaaataccaagatacattataaatctataataattttatcagcataggattgctacagtaactagaaacaccgatggaagagaataaaaatctcaaaatgcaccactgatctaagaattgggcagctgacagaggcacattatttataatgaaagaagaatacacagttcaataaatgatgctagaacaattgaccaattgaaaattggtcaactgaacaatagaaaatggtatgcaaacatcacaccatgcaaaaaaattaagcctagagaagtcaaagacctaaacagaaaaagcaaaattttaaacactcttgaagtacacatagaagagtataagactttgggatagagaataagttactaaagagtgagaaaaaatactgataaaactttctacattaaaattgcactttttgaaaaaatcaaaaagcagccaaagttaaaatataagccacagattgggaagtaaatttttattatgtataataaacaaaaaatgaacatccggaacatattatgcattcc

SEQ ID NO: 241393 - DNA, 282 bp, Homo sapiens
attctgtggccatttgccaagttttcttaagagccgttcagctgttgtgtgattcattgaattatgattcatcgaggtttccatttaactcactcagccttggtgaatctagtgccggtggttgagagtttcttctgcaccgggaggtgatggtgttgggggaggggcgtctgtctcattcactgagctgagcttcctctctcctccttccctttccagcacattgctattgagcgccattcactgagtccctctgattcactgggggtcccgtttagtgca

SEQ ID NO: 241394 - DNA, 280 bp, Homo sapiens
ttttttttgtggaatgctcacagcctcttcagtgttttcgatcccaacaaccagcacataaacatctttcaatgtatgattaatgttaagcatatttccttaactgaaaaagaggctaaataatcacattggctaacattttagcaggtaataaccccatgcttgtaagccctttacatgaattaactcacttaaatgcagagcaactctatgaagtaggtacttttttttatagtcatagagaggttaagtaacttgtccaaagtaatacagagtatta

SEQ ID NO: 241395 - DNA, 2543 bp, Homo sapiens
  misc_feature (1454)..(1454): n is a, c, g, or t
  misc_feature (1681)..(1681): n is a, c, g, or t
  misc_feature (1685)..(1685): n is a, c, g, or t
  misc_feature (2429)..(2429): n is a, c, g, or t
agagtttgggggtgtgctgggagacagctgcagggattaggactctaccaggtgctgagtcagaggctggttggaaatcctcctcctccaactccgcccctcgccagctgtttgactgctgccaagtcccccaactgtgggaaccccaggccttcatctgtgaaatggccattcctgtgtttctgacaaggctgttggaagacttcattgaagacactgtattggtttttcagcactttaacatctctggactcaagttgtgtcataaaattgatcacaagccatagtttaattgacggcatttttttttttctcccttagtggtttataaaatgatgctggtctaaggtttgatgatgtcttagacttgaagaacatgaacctgtttttgcaaaagttttagagtttggcattttccaacaaaaaggcagttgctggacttttgaattggtcaacgaaattccacttgttaccagaagatttactagttgcatttctagagttgttggcctctcttttctgatttgattcagtggtcagatcatccagggttcttgtgttcagagacccagagtgctataatgcttccgaaataagcctgacctaagactgagacagaaggtgagtatggcagagaccaccagctgtccaccaaagggccctgcttcccttccaccacctcaagtatctgtcggaggctccatgatagttcccacatggaatgtgggtggcaatgtgtgtcgcttcccggcagcactaattaagaaacaagtgtgccttgctcagtttttctcctgttgactgtcagctggatgtggaaaatccagcagagaatgcctaggtgctaggggaggattctgagtgcctgaatcactctgtggagcagagttgcccattaggaacatgagcctgatgttcttgtgatttagaaatcaaattctaatgtgttgagctgatacacaattttaggcttgtttgttaaagcagacaatgtgaacgtaagtagtacagtgagttgggtagttccaacccgccgctgccccctccctgtcctacacttgcttgggttagatagaaagcagcgccgtctcccattcaccagcctaaatgaacctcatggcttcacttcactcattcttgctcatttattcactgagtcctgtagattctgcccctcccttctgcccttgtttgggggcctcacacctacccaaatggcatccacctaaacactttgggttcggctaggtgcccttaaagcctgattttcaaacgttggagaagtttagaagcaagtcgggctgtaaaattgcagcaatgacctggcatggtgtggcagccatgaagacgctcctgatcttctgcttctgggaatgtgagtgactggtggccccagctgctacgttctgaatcccgcagtggaaatccagcatggcgttcccagacagcctgcnctctgcgggctgctcccagccggggacagcaggtgaagactcctcctccccagcctcctgccttccctgccatctcatctgcatctgctgtcagacttgcgtctccctctgcctccccgcctgtctgcctccccaagaagtctcttccagagctgatcgtgtcttggcttcggtttttggaagagccgagccaacacacatcgtatttgagatacagtgggtcggangcgntacccagggattttctccagcttggacagcgagccctttgccctctctgggtggcagggtgcctccctctaaaatgagggggcgatgcttggcagtttctagaacctgttcagatcaaggcaacctgggagttagagttccgctagtcttgtctggcagtacagtcggtctctaaatatgcttttattgtaccttccccaccatctgggtgaagcatcagtaatgaaaatggagtggaggctgcattgaccttttccagtgtccacgcactatattttaactgggaagttgcatgtattttctatacttaatactttaaaagcttcttgggcctcttgagaggcttgtaagtgcagcccacgtgtgacttgagctgggaacgcaacttcagattgagaagtcccacttttataggacacagcatttaacagcagctgcgtccaagtcgtgtggcatttggcagcgtgtttccaagtggacctgtggtaatcactttgctcttggggaaccgtggccaagggctgccctgcctccaaagaggctcagcaagggaaggctagaagtcctgtgggctggccaggcatggtggctcacacctgtaatccctgcatttttgggtggcagaggtgcgtggatcacctgaggtcaggagttcgagaccagcctgaccaatatgatgaaaccccatctgtactaaaaatacaaaaattagctgggcatggtggtgtgcgtctgtaatcccanctacttgggagactgaggcaggagaatcacttgaacctgggaggcagaggttgcagtgagccgagatcatgctattacactccagcctgggcaacaagagtgaaactctgtctc

SEQ ID NO: 241396 - DNA, 454 bp, Homo sapiens
caagtcattttcaaatcaattctgaaatacacctggtttgggtgagacagcaccacacaagacattcaagccaattcatcgtcttagaggaaacatccaaaatacatttgagcctcctgctctcctgcgagaagccatgcgactcctacgctgttattgccaccagtgtaacagtccgtaccggggctgcttactcttcatttaaggcacggagggccgccacagcaggatttctcaacctcggcactactaacattttgagccgagtattttctcgtggggctgctctgtgcattgtgggatgtttagcagctctagatgcccactagatgactacagcaaccctggtccccttcatgacaatcaaagactccagacatttccaaaagtcccctggggggcaaaatctccactggctaagaacagctgctccagagtacgagaaaagaaaaaa

SEQ ID NO: 241397 - DNA, 819 bp, Homo sapiens
agcgcgcggctgcggcgcgggaagcaacccagagccctcctcccgcctgctctgtgtaggagacagcctgcggagcccactgccggcgcgcagagagcccagcagctcttgagtccaggaagcaagggtgggaggagggacgagccagtggcaatgacccagacccggacgacccccattgctgagccagcggagctgcttgggtccacgaggctggtgtcagacctattgggagaccctctgcgttagtgagaaaaacggcaagaaatgggagcacgcggaaacctccaagactagagccaccagatgccaccgacagcacgcagctggaccagcacgggggagggccttcgtgggtcgagagctcgctcgggagatagttggtgcttttctttcaggagaagaatccctggcggagtctgaccgttctctggcgcacagccccgggggtgggcacagcagccgcccctgctgaagggactgacgcctccgacgaccagcagccaagttaaacgcactgttccgtgagcagctttgttggagacagcgcggttcacattctcttccaacggagccgctgactgcggagctgggaggggacgtgacagaacccagccatccaacgtccccccacccctccccagctgggacctccggctgcttccgggctgcgctgggtggcgtcaaggagccgcccctctgggccgcgtctctccctcacgccctgcacactggccctgtgtggccggcggggcgcctaaaagggcggaaggatgcaggggcggagggggctcgggattgcacgcctagctcagaccc

SEQ ID NO: 241398 - DNA, 779 bp, Homo sapiens
agcgcgcggctgcggcgcgggaagcaacccagagccctcctcccgcctgctctgtgtaggagacagcctgcggagcccactgccggcgcgcagagagcccagcagctcttgagtccaggaagcaagggtgggaggagggacgagccagtggcaatgacccagacccggacgacccccattgctgagccagcggagctgcttggaggcagaggttgcagtgagctgagattttgcgactacactccaacctgggcaacagagcgggactccattccaaaaaaataagaaaaacagaaaaataataattacatctgcaaagaccttatttccaggctcaagcagagtcttcctcctggtgttccagaaggagttcaaggtcctgctccatatgggacagctagattctgagggcaatgttgagatcctcatctccagaaggtgctggtgccagaaatatgacaaaaggctgattgacgggccaggcgcggtggctcacgcctgtattcccagcactttgggaggccaaggcgggtggatcatgaggtcaagagttcgagaccatcctggccaatatggtgaaaccctgtctctactaaaaatacaaaaaattagctgggcgtggtggcacgcatctgtagtcccaactacttgggaggctgaggcaggagaattgcttgaaccgggaggaggaggttgcagtgagcagagatcgtgccactgctctccagcctgggcggcagactgagtgagattctgtctaaaaaaaaagaggcctggtg

SEQ ID NO: 241399 - DNA, 528 bp, Homo sapiens
agcgcgcggctgcggcgcgggaagcaacccagagccctcctcccgcctgctctgtgtaggagacagcctgcggagcccactgccggcgcgcagagagcccagcagctcttgagtccaggaagcaagggtgggaggagggacgagccagtggcaatgacccagacccggacgacccccattgctgagccagcggagctgcttggaggcagaggttgcagtgagctgagattttgcgactacactccaacctgggcaacagagcgggactccattccaaaaaaataagaaaaacagaaaaataataattacatctgcaaagaccttatttccagagacagagttttgctgtgttgccaggctgatcaactcctgagcttatgcaatccactcacctcagcctcccaaagtgccaggattacaggcgtgagccaccttgcccggccaagatgagcaggcaagaagaatctgttggatgattacaacattgctggattgatagcagcctcacctgccaggctcaaactccag

SEQ ID NO: 241400 - DNA, 757 bp, Homo sapiens
agcgcgcggctgcggcgcgggaagcaacccagagccctcctcccgcctgctctgtgtaggagacagcctgcggagcccactgccggcgcgcagagagcccagcagctcttgagtccaggaagcaagggtgggaggagggacgagccagtggcaatgacccagacccggacgacccccattgctgagccagcggagctgcttggaggcagaggttgcagtgagctgagattttgcgactacactccaacctgggcaacagagcgggactccattccaaaaaaataagaaaaacagaaaaataataattacatctgcaaagaccttatttccaggctcaagcagagtcttcctcctggtgttccagaaggagttcaaggtcctgctccatatgggacagctagattctgagggcaatgttgagatcctcatctccagaaggtgctggtgccagaaatatgacaaaaggctgattgacgggccaggcgcggtggctcacgcctgtattcccagcactttgggaggccaaggcgggtggatcatgaggtcaagagttcgagaccatcctggccaatatggtgaaaccctgtctctactaaaaatacaaaaaattagctgggcgtggtggcacgcatctgtagtcccaactacttgggaggctgaggcaggagaatcgcttgaacccagagtgtggaagttgcagtgaaccaagatcatgccacttcactccaacctgggcgaaagagcaaaacttcatctc

SEQ ID NO: 241401 - DNA, 364 bp, Homo sapiens
ttttgaagagatgtggtgtcgctgtcacccaggctggagtgcagtggcgaacatggctcactgcagccttgacctcttaggctcgagcaatcctcctgcctcagtcccccaagtaacttggactataggcacccaccaccacacccagctaatgtttatatttttcgtagagacagagttttgctgtgttgccaggctgatcaactcctgagcttatgcaatccactcacctcagcctcccaaagtgccaggattacaggcgtgagccaccttgcccggccaagatgaggtattattacatcattattgtaaggtactgttgggccctctttctattttgttattttgtatgtgatcatcattg

SEQ ID NO: 241402 - DNA, 405 bp, Homo sapiens
cggaagtggcggcgaccccgccggaagcgcgcggctgcggcgcgggaagcaacccagagccctcctcccgcctgctctgtgtaggagacagcctgcggagcccactgccggcgcgcagagagcccagcagctcttgagtccaggaagcaagggtgggaggagggacgagccagtggcaatgacccagacccggacgacccccattgctgagccagcggagctgcttggtgagtggcctccaggcggcatctcttgctctcagcccggagggggttttggggacccaggctgtggggctgcctcttcccatgccttcagttcaccccgatatggggtgaaaaaccctagagaccctcgggtgtcggtccaccaagggaggtccagactccccaggaatgttgcctg

SEQ ID NO: 241403 - DNA, 523 bp, Homo sapiens
cgatctttatgaaatttcatctgtggcatcttttccctgaagccttttcgttggtttctcactgccctccagaagctgcccaggctccctgtgaagtaatttcaaaaatcatggaaagtcgtaagtgagcctgtaattgcagcattttgggaggctaaggcgggagcatcatgtgaggccaggtgttgagataagcctgggcaacatagtgagaccccatttctacaaaaaatagaaaaattaggccagcgcggtgcttcactcctgtaatcccagcactatgggaggccaaggcgggcagatcacgaggtcaggagttcgagaccagcctaaccaacgtggtgaaacccccccgctgctaaaaatacaaaaagtagccaggcatggtagcacgcgcctgtaatcccagctactcaggaggctgaggcagaagaatcgcttgaacgctggaggcagaggttgcagtgagccaagatcgcgccattgcaccctagcctaggcaagagagtgagacgccgtctca

SEQ ID NO: 241404 - DNA, 561 bp, Homo sapiens
tgagacggagtctcgctctgtcgccccggctggagtgcagaggcacaatcttggctcactgcaagctctgcctcctgggttcatgccattcttctgcctcagcctcctgagtgagtagctgggactacaggtgcctgccaccatgactggctatttttttttgtatttttagtagagacggggtttcaccgtgttagccagggtggtctctatctcctgacctcgtgatccgcccacctcggcctcccaaagtgcgggattacaggtgtgagccactgcacccggcccacattttcttagacaagaaccaattcactggctaaagctctcagtttccaacttttgcaacatcgtcacatttcttcttgcctgtggattttaaaagttcatctctcacttatttacttacccattcatcaaaatataattgtcatccattagcatgcttagtgtctggccattttagggggatacagtggttaaaagtaaacctagtctctggctccatgaaaattttggttagtgatgaagacaggccttttacaaataagataagctgtc

SEQ ID NO: 241405 - DNA, 671 bp, Homo sapiens
ggtatcaaagccctcatttccactaccctgaaaggcagggaaacccctcgtcaacctcaagatgagactggaattttattttctgaagagataaagacagagtttctgaattgaaggacatgagtcaaaatagatcacaaggctgccacacagaaaacaggaaataaaggcaattttatgagctgcatattgagactgccccagccctcttcacctgcagaggacaggtagacagatctgtagctttcaggtacagattcaaggattctgctctgggaaatctgatcagcccaagagaagacacctgatatggtttggctgtgtccacccacaaatctcatcttgaattgtagctcccataattcctgagtgttgtgggagggacccagtgggatagagttgaatcatgggggcagttcccctatactgttctcatggtagtgactaagtctcatgagatctgatgattttataaggggaaaccccttccgctcatctctcattctctcttgtctgccgccatgtaagacatgcctttcaccttccgccatgatcgtgaggcctccccagctacatggaactgtgagttcattaaacttcttttcttttataaattacccagtctcgggtatgtctttatcagcagcatgaaaatgggctaatacaacacc

SEQ ID NO: 241406 - DNA, 633 bp, Homo sapiens
tctgagacggagtttcactcctgttgcccaggctggagtgcccaggcacaatctcggctcactgcaacctctgcctcccgggtgcaggagaattgcttgaacccaggagcagatgttgcagtgagccaagattgcactactgcactccagcttgggcgacagagtgagactctatctcagaaaaacaaaaaacaaacaaaaactgtttaggtggctggtcatggtggctcatgcctgtaatcccagctctttgggaggctaaggcaggaggatcacttgagctcaggagtttgagaccagcctgggcaacataatgggaccttgtctctacaaaatttttaaaaattagctgcccgtggtggcatgcacctgtaatcccagctacttgggagacttaggtgagtggattgattgagcccaggaggtggaggctgcagtgagccatgatcacaccactgcactccagcctaggcaacagagtgagaccctatctcaaaaaaaaaaaaaaaaactgtttaggtgattgaggtgattgttgtgcccgctgaagtatgagaaagattttcttgggggggaaaagtttctagaggaaaaggatttattgctgcctccctgcttgcttcctccttgaga

SEQ ID NO: 241407 - DNA, 520 bp, Homo sapiens
gcagcattagttctagtgaaactgtattattgattaagcaaatgccatttaagcttaattaaaaaataaaaaagacccggttactggtagccgttttgagctgctgagaaggacctttcacttatgtcttctagagtaaccgccatttggatacacagcccagaaaaagagggcctgctcaagttttcgcgggtagtgtgagagttactaggaatccaacaacctggcttcctagttcactgttccttccaccaatcaatctgcatctccagcagagaatggataaaatagcaaacagttctggggttttgtatcaatctctgactgcaaccattgggaaagactggcttagctgaagttctaaccttcctacctttcaatgcccagaaagaaaaagccaagtgagtctgtgccaacctctcctacaagagcctctgtttgcaccttgctttatttgctacctgctaacttccctcaaaagacgggaattaactttggagaaaataaggtgtttgcgatt

SEQ ID NO: 241408 - DNA, 420 bp, Homo sapiens
gcggatattgctcgccacagtatcttatcaattaattgcattcttggatgtgctgggagtcagcttgcacaagttaaatccttgaggaaggggctgccagtgaaagagccgagatggagtctgtctggctcttagctaagggagagtcaattcaggtggaaccaaggctaggtgattaaaggaaagagggagagtctaaaaacagggttagtgaaaacaagcttggggattacagtactaagcactgggccacacgctgcctccactttgctctgccgcatgtcttcatacttttcttgccccagttaaattttttttttaagacagtcttgctctgtcacccaggctggagtgcagtggcacaatctcagctgactgcaacctccgcctcctgggttcaagcgattctcatgccttagc

SEQ ID NO: 241409 - DNA, 648 bp, Homo sapiens
caggtggatcacttgaggtcaggagttcaagaccaacctggtcaacattgtgaagccccgtctctactagaactacaaaattatccaggcctggtggtggcacatgcctgtaatcccagatacttgggaggctaaggcaggaaaatggtttgaacctgggaggtggaggttgcagtgagccaaggttgcaccattgcactccagcctgggcaagagagcaaaactccatctcaaaaaaaaaaaaaaattattaaacatggaacatatgtgtaagagagagagagagagagtgtgtgtgtgtgtgtatgtgtgtgtgtgtgtgtgtgtgtcttcctatttgatgtggagggaaggcaaacttagactaaaagtgtagagcttggggaatgatggtgcagagccaggaaggccaggctaacaaaggacatatccaaaagcaatttaataaaaagatattgtacaccagccatgtgcctactttatgctatgtcccgtgaagaagacagaagtaaatatgatagttatgagttaaatggataagcagaagaaaaaaaaaaaacacataatacagagcgtggccattatatccaaggcttttaccactttaggcgggcaccaaccgggatacaaatcatttcctagccaaac

SEQ ID NO: 241410 - DNA, 451 bp, Homo sapiens
ccccttcccccgccccagtgctgggcttccttcctgcaaatggttcagagctattggtccagattcaaagctgcccgttccacagacactgggtgtctccatggaaatgtttagcttggacgcatcctcccagaggctggggatgtctgcggagacagaagccccgctgggtgtgatgaagcggggtgccagcgccctgccattttctaatctgagctgggaaacaacgctgtgaagttaagtggcagagaacagggtgagctttgtttggccccagcccgtggggcattgtgtctggagcgacttctgactgggtggctacttacaggcctgtacttctctgcgttctccatgaggaagcaagcccggggccttcaggaaccacgacgcctaatgagcttccacccagatggtcccgaaacccgagggacgcaggggaggcgcccaggtc

SEQ ID NO: 241411 - DNA, 477 bp, Homo sapiens
aagatcattaacaaaggcaggttgacaaaaccaggggtgcataacaaaagatggtctcagatgtcactggatcaaacagtgtcacttcctgaatagatatgtcaattaaacagtaataaattaggtatttattctatgttcatcactgtgttgagcatgacgagaaacagataattaaaatacatcatcactggtcttaaaatctaaccaagaaatctgaaggtaaaagacaaaactattgaaaataataatagctacaataatttaagggatacatagtacaaaaagatgtaaattgtgacaccaaacacataaaatgttattgggggtggactataaaagtgcagactttttgtttttttgtttgtgactgagttttgccctgttgcctaggctggagtgcaatggcatgatctcggctcactgcaacctctgcctcctgggttcaagtgattctcctgtctcagcctcccaagt

SEQ ID NO: 241412 - DNA, 423 bp, Homo sapiens
aagatcattaacaaaggcaggttgacaaaaccaggggtgcataacaaaagatggtctcagatgtcactggatcaaacagtgtcacttcctgaatagatatgtcaattaaacagtaataaattaggtatttattctatgttcatcactgtgttgagcatgacgagaaacagataattaaaatacatcatcactggtcttaaaatctaaccaagaaatctgaaggtaaaagacaaaactattgaaaataataatagctacaataatttaagggatacatagtacaaaaagatgtaaattgtgacaccaaacacataaaatgttattgggggtggactataagctggagtgcaatggcatgatctcggctcactgcaacctctgcctcctgggttcaagtgattctcctgtctcagcctcccaagt

SEQ ID NO: 241413 - DNA, 457 bp, Homo sapiens
gaccagtatgtggtcctttttcatccatcccaaccataatttcctctttcctgtagaattaaaagaaaattgcaaagaggatatgaacttttctggtaagaaaacctcctgggtatagtgctcccagttatgagatttatgcagattgttatataaagtttttttaaatcaagcaccttaggacaaactattaaaaagactgctaaaagcgttgtgacacaacaaaagtctctaaattctgtagcttaaaaagttttaacaaagtacttatcttttgcaagctaattgctacaagtctataactaaaacatgtattgactgatgtcttaggtctccctaaaatatataaaaccaagttgtaaaccaatcaccttggacacatgttctcaggacctctggagactgtgccttgggccatggtcactcatatttggctgagaataaaattttaaaaata

SEQ ID NO: 241414 - DNA, 372 bp, Homo sapiens
tgtccatttctgtttcccaagaaaattataaaagtatgcagaaggctctagagagggaaatgaagtatctagaagagaagggaagaaaaaagttaaatcaagaggagggtgcttaagatgaagctaaaagatgagtaccagggaagataaatagtatctgaaggcgggggaattgtgagataactggtagctacaaattgaattcctgattgcttggtgaattgggaatgtgacaggaggtaaggctgcccttctgtaagggcagatcaagagttgtcatgctagggagactattctgcctaaaattctggggtactattttgtgtttaagtatgctatgtatattaaaagggtacatatttgaagtgttcg

SEQ ID NO: 241415 - DNA, 426 bp, Homo sapiens
ttaaaacccttgttgctcaagggtctgctatatttttatattcaatgacattaattatggaaaacaaaccttataaaaatatttctcattaaaattcactttgtaaaactcctaaacccagaaagaaagcaatttttgtcttactctttcttttgtcaaaactgaattttgaaacactttcccaaccccgttaacagtgccatcctttccaactggtatttctttgtttgttttatctaaaacactaaagaaattattggggatgggtggggactttcctgcgtctttatcatgcctatgaaaattttacaaacttggtatccctcttaatctcaatcctctagtaccccttaaagtgtaactttgaaagagtaattttagagatactgagcttgaaaaggcttttgaaatatttcatttctgagc

SEQ ID NO: 241416 - DNA, 407 bp, Homo sapiens
aaactcctgacctcaggtgatctccctgcctcagcctcccaaagtgctggattacaggtgtgagccactgcgcccagcaaatgtttataattatatcagaagaagatttgttattgtattggggctggagaaaacatttctatgcaaaattagagcttgtgagcttttagggaaataattacagattactctctataaaaaatttaaatttctataggttgaaagacacttaaagacagttaaaaggcaggtggcaggctgaaagaaactatctgcctggtgtataacaatatacagaatatataaagagaactcacaaatcaataagaaaaattgcaatgacctaagaggaaaaagtgagcaaaaactatgaacagatatttcatagaaatggaagtctaaataat

SEQ ID NO: 241417 - DNA, 464 bp, Homo sapiens
  misc_feature (295)..(295): n is a, c, g, or t
gaattcggcacgagtagaagcagagttaggaaagttgcttaataattggtctgctcaaacgtgtgagctgtttgcactcagccaaaccttaaagtacttacagcatcagaaaggagccatctataccaattctaagttaatatggactgaacgaggtcttattaatagcaaagaataattgaaatcccaaacttacaaggtttttgacaaaagtaaagcttgctaaaagttaacagtgtaacatgtattatcctaacttctaatcttgaggaaatcactcgtgccgaattcggcnggggtttttgttatattaaattttcaccactggttcttttgccaaagttttcccagggatctcttaattagatgaagcttatctgctagtaggttcctcaggaatgtcttatgtgtacagtagtctctaaatttttgcattaaaattttttcctgtaatcttcatactt

SEQ ID NO: 241418 - DNA, 293 bp, Homo sapiens
agccgagtcgcaccagcgccccctccacgcgccgcgcccagcaagcgagtggtggtaactcgatggcggtcccggaggcgcggacactttcctcagccctttcgttctctgtggcgtttcgaatggctatttaacgagagaaggtgcgggccgcgctctgcctttcaccccgagcagcgggtctgaaaaccagaggtctgtggagccgactttgcatttttccttcaactcttgcgactttcttggtctgcctgtgtggttttaataaaatacagcatccgttgtgaccgctt

SEQ ID NO: 241419 - DNA, 377 bp, Homo sapiens
taaaatttccttccatgttatagagctgatttttatcctgaccacggatgcttacactgttcacataaaacttaacattcattgttaccagtaaggtgtgtgatcaacatcttgagctgtggtttactgcgtttgaataagcaacaatagctgataactgatgttagtagtttatgaatttcttttaatccttagggttaaggaagtagctttagtgactgattgtacctttcctaaatcctagttttatgcctaggagatcatattttaataacaaaataatatagttcaataagtcctatccatgttgcactaaaagatgtaagaatttaagctaaaagttatcactgtcagtttggattattgggacttaaatt

SEQ ID NO: 241420 - DNA, 1917 bp, Homo sapiens
ctgagagtcagggcggacctggactcggcgcgcctagctcctcggctccctttgcggggactccaggagtctgcccgctcgcgccgtttcgtcctgtcaccccggcaacgggaccctctaagaggcttgttccaaaaatgttcacaatggggtttttaaaaacggttttgttagggacaagtgcttgtgtgagtcctccgacaatgcctgctttcttctctctgcccgcggagcggaggctccaggcctggccccagtccgaggcgcctctgtcggtgtcgtcctgcttccaaaaccggcctccagaacccgcctccttccagaacctccgtccagaacccgcctccctccagaacctccgtacagaacccacatccttctagcacctgcctctggaacccacgtgctttcagaactacctgtttgtagaacttgtttccagaacgaacctgctttccgaatctctttacttccagagcttgtttcctggactgacctattttcagaacctactttcaaaaccagcttgcctccaggaccacctgcttggagaactggcctgcagccccaggactggacgacctgagactgcacagctccctgcggggctcacccggctgtgtgtgtccttccgggccttccatacttccctaggtgtctggtgactccggagcccgctcggatttcgtgtgggtctcgcctcagctcagaacacaccctttgaagagcaggaaggccagggcacaggcggtaaccacggctcctggtcatcaagttcctctgaagcccaggtcttgtccacgttcactgccccaccacaggcccagcggagccttggagctgagccctgggatcattctggtgcctgtgctcccggctccgcaacaagcacacaggagcctgtcatccccagatctaaatcctgaaggctaagctccgtggtctgccgcagccatctgcagcaggcccctcccagcaacagccttctcataaggcccctgccagccacgtgaaacctcctggctagggcctgtcttccactcctggccttttgagacagggcctcactctgttccccaggccggagtgcagtggtacgatcacagctcactgcagcctccacctcctgggctcatgtgatcctcccacctcagcctcctgaatagctgggactacaggcttgcaccaccacacccggctaatttttgtatattttgtagagacagggtttcgccacattgcccaggcccaggctggtctcaaacttctgggctcaagcaattcatctgcctcaacctcccaaaagtgctggattacagggatgagccaccatacccggcttttttttttctttctcctggccttttggggcccttgaagtgtctgctccctgggagcccttcagcttgtcgtccacttggtgggttcccacccgtccttctcacttctgcctgaatcacacaggctacatgagaccttcacccacccccttcgccagcagctctgtggttcaagtttcctcaagggcaggggctcctggccatcttacctgtgggcctgagcatgggccgatgcttccaaagttcacactgggtgcacttgtgtggggacttccatgtgagtcatctccttgcaggctgccaaggtcctgtacagcagagacccaaaccctcttagcagtcttcagagtcagctatgtgtacaggaggcattaccatatcagtgactgtcagcaagcatgtgtgactgaaatggtatccagttcttacgtatttgttttgcaggcttcttggttcagcagacagaggccattgggaagttaagagaggctctcaaactttgagggtcataagacttcccctccctgcagggtgctgtttcctgaaggaaaatattcaattactattttctttattt

SEQ ID NO: 241421 - DNA, 352 bp, Homo sapiens
gcaaagaatcattaatttttcagaagcttgtcaaaatagccctgggtttacatgaacacgtcagactcatttacaagaatgctagattgtgcatatgtggcatgttaataagtaacctttggtagaactattatgatggattcaatacaatccatctatggtgcaaatcaatgataaagaactctcatgcgtctaccatgtatgactgtagaattgctggtgtaagcagaactatagcagagcaaatttcaacatgcccttggccacctgggttgtaggggacactttactttttgcattgtgctgtgaccatttcatgcataatcttggatcttcatactatttgacaacc

SEQ ID NO: 241422 - DNA, 531 bp, Homo sapiens
agaactgcatttttggtattatactgcatccatatgtgttacatattgtgcatagaatttcgtttggtggggagaagagctcactcgccgctaaactcttgaagcttctggtgcacttgagttctaaggtcctctgcactccagctctctgagagcagtgaaatgagctcctttctgtttccatccccgagcatacgggcatctagctggcactggggcctgtcaccagcctagaaagcactccgtggcttggcagggtttggggattgggctggcacatagcacctcttggaaagggcttggcaggtttctcccttgcagcataatctccatgacacaatgaggcaaattttgggtttagtgtttcactggctgccggttgataagctactatttataaagtagaacgagcagggtttctgcccaccttcttttttgctgagactatttaaaattaactattttataaattaaaaataaaacttttaaataaacttattttaattaaaaatttgtaaaataaaaatatca

SEQ ID NO: 241423 - DNA, 925 bp, Homo sapiens
gcatgcaaagaataacttgcacaatggatagaatatatattgattaaggtttagggtcaagaggtatttctctaatctggtagaaaagttttctcctcaggatgtaatctttggggcatgagggaagaccagtttggttcaaatgatttaagaccctgatgtggtagcacaactttcttaaatatggttaacatctcagcacacagatatacaccatcttgtgttgttaactgaagggtacatggccaccctctaagaagcaggtcaaaagggatggctcatcctctccttccttaaaaaataggagaagaaagtcagtactttttaataatcaggtattgatatgataggatcactctctggtgtctttctccaatctgctgcttctcattatatgaatatatttggtaaattttaatttgcattgatagcatgttgggcattgtttttggaagctaaggttttccttgttcttcaagaaaacctctgatttgtggaatattgatataaaaataacttattctgtgtctacctcggtgaaagtactggaattataggactactcacttttcatatactttagatttgggaagaccatgatgaaataagatgaattacatatacttagccatgtatttcctccatttcttctgaatattacttacacatttaagttaaatattagaattatacattattctcttgaattgggaaggtttattttttaatgcatttcttcttatagccaaaggcaaatatttataagactgtatgttcacataaggtgattatatcaggttttgtcactagctttaaatcctcaatagagtatataaagaatactttccaaataatgttctaagtattatcattaataaatatggttcttgggtaattaaaaaaatattttacatccaaaaaaaaa

SEQ ID NO: 241424 - DNA, 557 bp, Homo sapiens
ttttgagatggagtttcactcttgttgcccaggctgtagtgcaatggtatgatctcggctcaccacaacctccgcctcccaggttcaagcaattctcctgtctcagcctcccaagtagctgggattacaggcatgcgccaccacgcccagctaattttgtatttttagtagagatggggtttctccatgttggtcaggctgatctcaaactcccgacctcaggtgatccgcctgccttggcctcccaaagtgctgggattacaggcatgagccaccctgcccagcctccagtgcattcttagcttcagatatgtttttaaatcttggaatgtctatttgattatttgtatagatttccaattctgttgaaatgctccatgtattcatccattttgtcctttatctttccttttttaaaaacttattaaccataattattttcaagttggctccttgccagtcaagctgctttgaacaccctagatatgccaagtggtttctctcactggttcttgacatttcagccatctgtatttttgaaagtttacatttctctt

SEQ ID NO: 241425 - DNA, 338 bp, Homo sapiens
gcattctgggttgtgatgttatcatccacattctcttacctggtactcatggctctgggcatgttttgtatgttgtttggttggaggggcttggtagccccaacataaagaaaaaggcctagtttctccctttgtctcaggagcacattactctatcctgggaagttctggctgttaagaaagctctttgggttgggcgtggtggttcacacctgtagtcccagctactcgggaggctgaggcacaagaatcacttgaatctggaaggcagaagttgctgtgagctgagatcctgccactgcactccagcctgggcaatagagaaagacttagtatta

SEQ ID NO: 241426 - DNA, 414 bp, Homo sapiens
agatacagcatttaacatactctgtttggaaacattaatatgttatatttattgtcagtatgatgatttatatgttatatttattgtcactatgatgcagaaagttgtctgaattatatgcctccataggtcctctgagttctttctaatgtcagatatgaaggtgtttctttaagaattagattggaaggtcgttaagcattctaacatgaacccttagtaaaactgtatcctgtaaaatattcagtaattttgcaaaagtgtgtgttttctcttttaaccttgtgttaaagactagaaaatgtggcaaaaatattaagttttgaatctgggaagtagatatatggggattaacgatactattctttctactttcttatatatttaaaattattataataaaaaataaaaata

SEQ ID NO: 241427 - DNA, 492 bp, Homo sapiens
gtcagatgtatcatctcttatcatctccgggatatcgatcctcagatttcatacatgtgtctcttagcttgatgaccggtgctctaaacaccctcagtattgatagacacacccatacctttgcatacccatttctctgtctggtgagccaacctgtatggaccacatcagagatgccttgttcgcttttgctaatgcaaagccccagcagaagacagacaggaggaaggagagtgaattataccattccccttttcctccctgtgctcatcttggcctggctgtgtccctggcctgcaaccactgctcctctcaagaaggccacctctagccaactctctcctgtgctttggtaactggtcttcttcttgtctcttcaagtctaagggtggtaatagctctcttgttgtttggagtaactgtgttattccttgcagttcccctacatactgctctcccctttttaaaataaagcctccttttattattcta

SEQ ID NO: 241428 - DNA, 460 bp, Homo sapiens
gtgtatgtataggtgtctgtatgtgtgtgtttgtggcatctttgactatgaaaaatgaggaaagtaattattcatttataactggtagacacggtcctttaaaatggtgattttgagactttttggtgttaaggttttaaaaacatggttgcatagaggctaccaacatcataagttggttgtttttcatttcaatgcccttttgaaatctttaactatattgtgatgctcagaaataatatgcagaattttttatttgtgtcctaaaatggtatgtgagtggttatacactttacatacctttctgccactttctttggtgtattttgtattatattttccagatgtacccacattgatatgattatctctggtttaattcattttacacttttcattgtattctcttataccactttaccacatttagttagactctcctgttgctgataaatgaaga

SEQ ID NO: 241429 - DNA, 407 bp, Homo sapiens
gctggatttttcaaacacaatttcaaaaactaagtgaatgactctgacatggtaaattaaagcttgagcctaatgactgcaagctaaggttaattttgagccagcagacggaggttattaaaggcccagttagttccttctggaaagcctttcctgcagatgtcccagcctgcttaccgcagccatggaagaagcctctatagtgagagaagctacagagccctggaaagctggggccccacaggcagatgcagttaaggttaagatagaagaggtttgggggtgtcttacggaaccctaaacctaaccctaaactgaaccctagccctaaattgttaaacagtaaattgttactgttttgaggcagattcgagaggttttaaaataaaccagttagacgtacatta

SEQ ID NO: 241430 - DNA, 171 bp, Homo sapiens
ccctcccctggaaagcctgtcttttaaaaaatgattttcatttaaaaaagtttttttgcttaacacagtggctcatacctgtaatcttaggaaggcagaggcaggaggattgcttgggcccaggagttcgagatctgcctgggcaacatagtgagatcccgttattcacaa

SEQ ID NO: 241431 - DNA, 393 bp, Homo sapiens
tgttttgacgtcccaaagttctgggattacaaagtactgtgtcatccagtgtggcttgattaatatgaaaatgtttatagagataagacaacagaatacttaagaaaatagctagtgtgaagcatacacaaataaatcaggaagggagctgtgttttttttttttttttggttttgtttttttgttttttttgtttttttttttgtttttttttttttgagacagtctgactctgttgcaggggctggaatgcagtggcacgatctcagctcactgaagcctctgccacctgggttcaagtgatcctcccacctcagcctcccaagtggttgggattataggcatgcaccaccacacccagctactttttgtatttttagtagagatggggtt

SEQ ID NO: 241432 - DNA, 904 bp, Homo sapiens
ggcactgggcatgggctggacgggaccccggccaccatctccttcgagcctactcgtggccggtgaagaaagccaggcatgagaggagcaggaagcgagtcgctcaagggcgcaccgagtcatatcccaagatctttgaaggaggtccagggatccgcggagccaccgtgagaatacagctcggcagagaggccgaggtccctgcggggaggccggtcccttcctcctcggccccgcggtccgggcgccccgtgggcctagctcccgcccaccggccgggagtcctcggggctcgggctccgacggaggagtccccagggccgggggcggagggcagacgacttccaggaggtcacctggatttcctgcgcgacgtggaaggagaaatgaattcagctgcggccgaacgtggcgcaaagagaaggctgagcgcggcgcccccgggaaggaggccgcccgctcgcgccggcctccgccaagcatttgcaatttaattgacattggcggcaggaagccaatcagtctaagtcaattgacgttccgagataaaactaatcggcggccggcgctgcccccgccggcgcggccgcggcggggcccggggcgcagcgtggaggcggcggcgcgccctgcaggtcccagcgctggcgcgtggctcggcccgctgattgccgcgcggcccgcggcggccaggagaggcccgtaatgaatgactttatttgccggggccccgctgagaacaattgagtttgttatgctaacaacggatgccagctttccggggccccggggggcgcgggcgcggcggcagccgggagctgggcagcggagcagatgatgcgcgccggggcgagggcgccggacgggggtgccgggcgggggtcggacggagctggcgtcggga

SEQ ID NO: 241433 - DNA, 431 bp, Homo sapiens
tctttggtcgtccagatcctgcccacatctaaacagaagccctggggaagaagtgaaactcctccaaaggcggctcaggttcgtcaaacctaagggatcacgggcatctatggctcactccagccaacaagtgctctggggagctcagatggacaagggggaaaatgactgccaccaacctgttagtacctgcctagcaagtcgggaaagggctcttaagatccagtggtgaagcccaataatcccaaccagcaactaggctgcttggaccactggggcagacagcaatctcttaaggtaagaccctgaggtccacaaaagtagaaatctcattttccactttatctcccgtgtctagcatcacaactagcacatagcaggtgctcaataaatacttgtcaaataaaatgaacaaacactacaagcgtggc

SEQ ID NO: 241434 - DNA, 422 bp, Homo sapiens
tctcctcaggcccctgccaataaggcaaagcccagagcgaacacatctcaccaggaggaaaagcagaatgtgatggactgagggcagtgggagtgaaggttctcaggaagactgaaatctctccaccccagcccttggtctataaatgatgaaatgctgttgactcaaaagggggccaaggcaaatactatagggataattcaggatgtgaagcttctgggccacctccacaagagggccagcatcaccccctgctcagtcctgctttatatctgtgtgctgatttgcacgggtgacagtaaagcaatggactgctatgggtggctcttggtaagttttcctttacaaaacttcagcagtgctttgtgatagtggacactaaagtacatggactgatgtattaaaacaaaaccaaaacaaac

SEQ ID NO: 241435 - DNA, 430 bp, Homo sapiens
gaaaggaactgaaaacgagacagacgttggcctctcccctcctggtgtccctagtcaagagtcgagtctacttcctcctggtctgtgaacatagctgagtgtccagtatttggagccctcatgaagcttccagaagccccctcctctctaatgggtgggtggagactccaggctcacaaatcctcccatagaccctggtggggtctgtggagggccatgagggagtgctggcatccaagtttcccagggcctgatggaatgtggacggaccagcctgctactcccggcccgctgcctcttcccctcccatggcctctaatcctgagtcgcatcgcacattcctccttattccagccccttttccccacagcccccaccttctcccacacttctgacctctgcaaaaaaacgctgatttagccacttgata

SEQ ID NO: 241436 - DNA, 386 bp, Homo sapiens
cgattagcatagcttttgagaagtcttaattcaggtcaaagatctttcctgtttctcaaggaaagggaagaggttaggcaagaatcctattaacagttcatccaggccgggcgcggtggctcacgcctgtaatcccagcactttgggaggccgaggtgggtggatcacgaggtcaggagatcaagaccatcctgattaacacggtgaaaccccgtctccactaaaaacacaaacaattagctgggtatggtggtgggtgcctgtagtcccagctaatcaggaggctgaggcgggagaatggcgtgaacccaggaggcagagcttgcagtgagctgagattgggccactgcactccagcctgggcgacagagcaagactctgtctca

SEQ ID NO: 241437 - DNA, 407 bp, Homo sapiens
gtgtgatgttgattcaatgacattttttgagacttgtgttatggccacgtacaaagtgaattcttacacatgttttattcttagatattttggaaaatattatgctatattgttgagagtaaagttctatatatgtccatcaaatcaaaccattgttcaaatcttctataccttaaagactttattatttgatctttcagttaccaaaaaattgtattaaaatctctcaatctgattataaatttgtcattttaaaaaatttgttgtttcttcttatatcttcagtttctggtgaagtttttttttgacatgttgagactatgttattaaatgtttagaagttttaaattgttttatcttcccagtaaactgtaccatttaccattaaaattaccattagcattaaa

SEQ ID NO: 241438 - DNA, 810 bp, Homo sapiens
gacggagtctcgttctgtcacccaggttggagtgcagtggcatgatatcggctcactgcagcctccacctcccaggttcaagcgattctcctgtctcagcctcccgagtagctgggattacaggattacaggcgtgtgccaccacgcccagctaatttttgtatttttagtagagacggggtttcacttgaactcaggaagcagaggttgcggtgagctgagattgcaccactgcactccagcctgggtgacagagccagactctgtctcaaaaaaaagaaaaaagaaaatatgcaaacaatctcaacattcaccaacaggaaaacagtcaaaaaatgtccagaatgtccacgaaaccctgctgcatagtcatggggcagaccaagctgctgacaaactacagagccaaagggaacggcctcattttaaatagtgttgttataacagggggcttactttcttatttgtgtgtttttattttatcaactttcaaaacttatttttaaagaaatcacttatgcgtgtgggtagtcatatcaccgcatttctcttcaagcgtcattaggccctgtactctcctcgttcctccacgtcctcctccttgctcaggttcccctcgccccaccccacccattgtcagcagtaattgttagtggaggtagatgatagaaaatgagccacaccttgtcatccgagttctcatgtcatagttgtctgactaaatagatcttctgataacaagccagtgcgaaagcttgtattccgactactttgactgtcttggatggcatctcttttgatgagtgacac

SEQ ID NO: 241439 - DNA, 756 bp, Homo sapiens
gacggagtctcgttctgtcacccaggttggagtgcagtggcatgatatcggctcactgcagcctccacctcccaggttcaagcgattctcctgtctcagcctcccgagtagctgggattacaggattacaggcgtgtgccaccacgcccagctaatttttgtatttttagtagagacggggtttcacttgaactcaggaagcagaggttgcggtgagctgagattgcaccactgcactccagcctgggtgacagagccagactctgtctcaaaaaaaagaaaaaagaaaatatgcaaacaatctcaacattcaccaacaggaaaacagtcaaaaaatgtccagaatgtccacgaaaccctgctgcatagtcataaatagtgttgttataacagggggcttactttcttatttgtgtgtttttattttatcaactttcaaaacttatttttaaagaaatcacttatgcgtgtgggtagtcatatcaccgcatttctcttcaagcgtcattaggccctgtactctcctcgttcctccacgtcctcctccttgctcaggttcccctcgccccaccccacccattgtcagcagtaattgttagtggaggtagatgatagaaaatgagccacaccttgtcatccgagttctcatgtcatagttgtctgactaaatagatcttctgataacaagccagtgcgaaagcttgtattccgactactttgactgtcttggatggcatctcttttgatgagtgacac

SEQ ID NO: 241440 - DNA, 351 bp, Homo sapiens
ttgtctcaaagagcctgccaaattataggagtcactacattcagggatgtccagatacaactttctatttgatttacagttctccaagtccagatgcaatttactattcaggtgtcacttttattatgattatctaaggtcagtggttctcagtcaggatattttaccaacaggggaaatctggcaatgtttagaaacagttttgactgttacagctagagattgtacctggcctctaggaagtcaaagccagggatgttgttaaatatcctacacaggatagtcccctatagcaaagaattacccagtccaaatcgtcaataattccaaggtttaaaaactctgctatag

SEQ ID NO: 241441 - DNA, 337 bp, Homo sapiens
ctttaactaaatgtggcacatcaacttaatgaattattaaaaagcaactgaaggccaggcacagtggctcatgcctgtcatcccagcactttgggaggccaaggcggatggatcacaaggtcaggagctcaagacgagcctggccaagatggtgaaaccccgtctatactaaaaatacaaaagttagccgggcatggtggtgggcacctataatcccagctactcgggaggctgaggcaggagaactgcttgaacccaggaggcagaggttgcagtgagccgagatgatgccaatgcactctagcctgggtgacagagcaagactccgtctcaaaaa

SEQ ID NO: 241442 - DNA, 453 bp, Homo sapiens
tttcctatattgaattattgtttaatcttctaatattccaatggaaaaaaaatgactaaatctttgttattttcacacaactttcctcccaatgcatttattttaaaatctcatttatttatatattttcaactaggtattggttagaaagaagcatttaaaaaatgcagtagttactagggccatttactggcagcaactgtgatgggcttacttaaatgcgtgacactgaggatctcactgactgagcagtgttatgggatcacaaccctcttcaagactttgcttttatgcccttttgatagcaacaaaacgcatttcactgatatatgtatgcatttcacattatcttttctcttgtataatcagttactttaaatggattttatgctcctatgttgattctcatctgatatatctttgggttgaattaaacccagatgtttataagat

SEQ ID NO: 241443 - DNA, 383 bp, Homo sapiens
gccagctgtggtggctcacacctgtaatcccagcactttgaaaggctgaggaggatggatcaccggaggtcaggggttcaagaccagcctggccaacatggggaagccccgtctctactaaaaatacaaaattagccaggcttgatggtgggcacctgtaatcccagctgcttgggaggctgaggcaggagaattgcttgaacccaggaggcagaggttgcagcgagctgagatcacatcactgcactccagcctgggcaacaagagcgaaactctgtcgggaaggggagaggaggggaggggaggggagaaggaaggaaggatcgaaagaaagacaaagaaggaagggagagagagagggggaaagaaagaaagaaaagaga

SEQ ID NO: 241444 - DNA, 517 bp, Homo sapiens
tcaaagctctccaaatttccacttgcagtttctgcaaaaagagtgtttcaaaactgctcaatgaaatgttatgttcaactctgtgagttgaatacaaatatcacaaagaagtttctgagaatccttctgtctagtttctatgggaagatatttccttttccaccttgggcctcaaagcgctccaaatgtccacttgcagattctacaaaaagagtgtttcaaacctgctctctcaaaagaaagtttcaactctgtgagttgaaggcacacatcacaaagaagtttgtgagaatgcttctgtctagtgtttatgtgaatatatttccgtttcaaacgaaggcctcaaagcagtaaaaatatccacttgaaaattctccaaaagactgtttcaaaactgctctatcaaaagaaaggttcaactctgtgagttgaatgtacacatcgcaaagaagttaatgagaatgctgctgtctaatttttatgtaaatatattcccgtttccaacgaaggcctcaaa

SEQ ID NO: 241445 - DNA, 510 bp, Homo sapiens
agataaagattgaactaaagcatgcccaacagaagttattagacagcacaaagatgtgctcttcactcacggcagagtacaagcactgtcagcagaaaatcaaggaactggagttggaagtacttaaacacactcagagcattaaatcacagaacaacctacaggaaaagctggttcaggagaaatctaaagttgctgatgcagaggaaaagattttggacctgcagcggaaattagaacatgctcataaagtctgtctcacagacacttgtatttcagagaagcagcagctagaggaaaagataaaagaagcaacacaaaatgaagctaaagtaaagcaacaatatcaagaagaacaacagaagaggaaacttctatatcagaacgtagatgagttacacaggcaagtgagaaccttacaagataaagaaaatctactggaaatgacctgttctcagcaacaatccagaattcagcaacaagaggccctacttaaacaactggaaaatg

SEQ ID NO: 241446 - DNA, 507 bp, Homo sapiens
tggtgggcaccatctaatcagctgccagcgaatatacagcaggaagaaaaaggtgaaaaggcaagactggcctagcctcccagcctacatctttctcccatgctggatgcttcctgcccttgaacatcagactccaagttcttcagttttgagacttggactggctctccttgctcctcaagcttgcagacagcctattgtgggaccttgtgatcatgtaagttaatacttaataaactcccttatatatatatatatatcctattagttctgtccatctagagaaccctaacacaagtgttttcttcattttccttcatatttatgaagtgtgctttcttgccatcctttccagactcatcaccttatgttattagttgactttttaaaaatcattattattatttgagatggagtctcgctctgtcacccagactggagtgagccaagatcgtgccattgcagtccagcctgggtgatgagcaaaactccatttcaacaacaaca

SEQ ID NO: 241447 - DNA, 298 bp, Homo sapiens
tgccaagaacagtagaggatgaactcatgtggatgggtatgcaggagtatttcccacagtcctttgatttgagaccaccggctgctgtcatatttggagtaattgtggtgtaaggcacactggactgagagtcaggagacctgggtgtgactcatggttttgctgctaatgatctgtgtgaccttgggggaagtcacttaacttctccagacctcagtttcttcatctacaaaataagggaattactaacactctttcagttctggaattctaattctaaagtaaatcttctgcagag

SEQ ID NO: 241448 - DNA, 324 bp, Homo sapiens
aatggttaacaattaatgtattcttgtagaattttctatgtacatatttaaagataatgtttcctaatgttttattttgaaatttccgaaacacgtagaaattttgaaagagaccaccctggccaacatggtgaaaccccatctctactaaaaatacaaaaagaatagccaggcagggtggcgcacacctgtactcccagctacctctcgggaggctgaggtaggagaatcacttgaacccgggaggcagaggttgcagtgagccaagatcgcaccactgcactccagcctgggtgacagagtgagactccgtctcaaaaaaaa

SEQ ID NO: 241449 - DNA, 208 bp, Homo sapiens
catccctagagatttatggagtactatctgcatctctacattgtcacagatacagatataaaattaggctcctagacttgaagaaattgcaaccaaagctagaaacaagatatgataatatgaaacttaatcatgaagtacgtaaaaacagttaacatcaatgttatacatatgactcattgcttaattaaaattgttgtagttctct

SEQ ID NO: 241450 - DNA, 488 bp, Homo sapiens
aagaccaaatgaccacgaagaaagttaaaagctttaaaagcctaagcagggggaacttcatcatctctgttacttttaacagaaggtaaaatgagaacagagaagtttccattgcattggcaataaagaagtatttactgatcattggggtaacatcagtagagaagtgaggaggaaagcaaagttgtagtaatttaaagagtaaatgggagatatactagtagtatatagaaaacattttcaaaaaggccttcttatagagagataaacatgtggagtgatagaggaggatgtaagcttaagaaaaactgcattggtgatccaaaaatagagggaataaagttcttaagaaaattagaagtccgggcgcggtggctcacgcctgtaatcccagcactttgtgaggccgaggcgcgcagatcacgtggtcaggagatcaagaccatcctggttaacacggtgaaaccccgtctctactaaaactacac

SEQ ID NO: 241451 - DNA, 424 bp, Homo sapiens
gtaatgtggcaaacaaattatgttttgcacagaaagtcatgatttttacttttaggaaggatatgatctaagtgagctagcaaaataataaaagacatttataaacatttagcagttagttaaaggccactggaatattgagtaattgctaagtagtcaactataatttatctaatcttctccaatcatcatgtccctattcacttaaaaattatttggagggctctatggatatgaaaaataattatgtttacccttgagttttaggggttgtggggacaatcagaagatcagaagatctttaattgtctttaatactattcaagcccaccacccatttctcaaccctaacataaattatctgcttttgtcaaataggccctaagccattttttcttgttcttcccctccccttcttttactc

SEQ ID NO: 241452 - DNA, 844 bp, Homo sapiens
ccaggataaaatacttggtccaaatatctttccttttgtccacttcctattacactcccaccagcatctgtatgcttgaaataatgtgccaagaagctttgaattttgttgaagagggaaaagaaagttggatggttttcttttgtttgggagatccaacttgcgacgatgagaatgtaaaggctcaaagggtggcatggtgtctatgcttactggacactgaactggtttggagcttctagacagctgaagatgaaaatggtgtttttatgagggaattaataaaacacttgacaggaattgtgctgccgtagggcccagatggcaacacagcagagggtaaaattgaaggccatttttcaccagttgtgcacagaatgtagcaggactctggcagcccaagagttgatgactttgagagcatcaggagatagtgtcagcataaaatagtacatagtagcaagagtaaaggcattccagttgactataaaggcagaagtcatggacaaattaaatcggactgttagagaaagaatggcctatggtggtcctatgaaagagactggcttgcaaaccatccctttagagagtttaagaaacaccttgaactttccaggatgctggaagtctcatgttctgaggtgcaaataaaagtaggaatttatgagttattttgatatcgagaggcttctgaggcctaacaaggtttcaatcacaagagtaattatggaagagattatttagatataattaagataaacatttacttaccaacagtaagtttcaaagtgtttgaaaatagtgcatgaactataggattatgtagctgatttcagttatcttg

SEQ ID NO: 241453 - DNA, 790 bp, Homo sapiens
ccaggataaaatacttggtccaaatatctttccttttgtccacttcctattacactcccaccagcatctgtatgcttgaaataatgtgccaagaagctttgaattttgttgaagagggaaaagaaagttggatggttttcttttgtttgggagatccaacttgcgacgatgagaatgtaaaggctcaaagggtggcatggtgtctatgcttactggacactgaactggtttggagcttctagacagctgaagatgaaaatggtgtttttatgagggaattaataaaacacttgacaggaattgtgctgccgtagggcccagatggcaacacagcagagggtaaaattgaaggccatttttcaccagttgtgcacagaatgtagcaggactctggcagcccaagagttgatgactttgagagcatcaggagatagtgtcagcatagtcatggacaaattaaatcggactgttagagaaagaatggcctatggtggtcctatgaaagagactggcttgcaaaccatccctttagagagtttaagaaacaccttgaactttccaggatgctggaagtctcatgttctgaggtgcaaataaaagtaggaatttatgagttattttgatatcgagaggcttctgaggcctaacaaggtttcaatcacaagagtaattatggaagagattatttagatataattaagataaacatttacttaccaacagtaagtttcaaagtgtttgaaaatagtgcatgaactataggattatgtagctgatttcagttatcttg

SEQ ID NO: 241454 - DNA, 463 bp, Homo sapiens
ttagagcaattaggcaagagaaaaaaataagatatccaaatcagaaagaagttaaactgtccctgtttacagatgaaataatcttgcgtacagaaaactaaatattctacacacaaaaaactgttggaactaataaatttagaaaagtcataaataaaaatcaacacataaaaatcaacagtgtttctatacacaaacaatgaaatatctgaaaataagacaacaattccattcatgatagctacgaaaaaataaaatgtagaaatacatttaaccaaggagttaaagacctgtgcattgaaaactataaaacactgaaaggagttgaaaatacaaataagtgaggccaggcgcagtggctcacacctgtaatcccagcactttgggaggccgaggcaggtggatcatgaggtcaggagattgagaccatcctggctaacacagcgaaaccccgtctctacta

SEQ ID NO: 241455 - DNA, 451 bp, Homo sapiens
tcatcctttattcaatgatttattcgtttcagaaaagtttattgagtatctactgtgagcccagaactgtgccaggtactgggaggtctagtttaaaggcagcttgcccacaaggacagggatttccgccaagaatgttctgtcctcattgctatagtgtaagaagcagctggattcccaagtcagccttgacattcagcagaacttagcgtgtctgcctctaaaagcacaaacctgtttgctagactgttcttgtcattgccaatgtatttactattgtgtaaaagtcacgttttgaatataaatttttgtcgtatcttgaagaagcagtacaaagccctaagaaacagttcatagaaaatagttttaagtaattcgaagaaagtacctgtaaatgtagagtaattgcgaagctgtcaggaataaacaagatcttgtaaagctatagaaa

SEQ ID NO: 241456 - DNA, 835 bp, Homo sapiens
gtgttatgaattgtgatggggctgtagtctgggtgtactttaacagtgttgagaaggatctcagttgtctgtccagccatcactgggtgcctttaggctccatgccaggtcaaggggaacattggcacccaaagatacctaaggctgcccatgagatacagagactccacaaagaaaagcaagttgcagtgtcacccagcatcatccaagaacattcctagagactcgcagagttccttatgataaaaaaaaggttttgttgtggccaggtgcagtggctcacgcctgtaatccagcactttgggaggccgaggcgggcagatcacaaagtcaggagatcgagaccatcctggctgacagggtgaaaccccgtgtctactaaaaatacaaaaaaattagccgggtgtggtggcgggtgcctatagtcccagctactcgggaggctgaggcaggagaatggcgtgaacctggaggcggagcttgcagtgagccgagatcgcgccactgcactccagcctgggtgacagagcgagcctccgtctcaaaagaaaaaaaaaaagaaaggttttgttgctccaaaaataggaaagttcaatgtgtgtatctatctacccagtaatgttgttacaagatgtataaaggagtatacattacagatacacaagaagaaatagacaagtccacagttgcagtgggagattttagaatttttatctcatgttatttaaatagtagagaaaaatgaagataggatgtacatttgcgagagatgagcacactgcctaatttacctgtccagtgttgtgtctgctaaatgaaggaaatcacagggtgc

SEQ ID NO: 241457 - DNA, 701 bp, Homo sapiens
ctgttccagacagaggctgcttggactacagtagattaaacacagtgtagagaactatttttttttaagcattaacagttttagttagttaaactaaacatgttagtactactttagttaaacatgttggtagtggaataagactgtgtgaagacagttttaatggaaattgtattatgttctaatatagtgtggtggtaattacctaattcctaattcagattttactagatcatatttccattgttctttctaagccaggtgatgggaatggattaacagtgtggggagcaggatagaggaagggcattacagggaactgcaggagcaaatacctagcaatgaataactcttctgaggatgggtagtagtctagtcttgaaaataatgactagtgtggagaaaagggaacccctgtgcacttttggtgggaatgaaaattaatacaatcatcatggaaaccagtatggagatttgtcagaaaaccgaaaatagaattagcatacagttcagtaatctcacttctaaaaatgtatccaaagaaatttgatctgaatgtagaagagatatgtgcactcccatgtttattgtgtccttattcacaatagctcagatatggaaacaacctaggagtccattatcagatgaatggataaagaaaatatggcatatacacactatgcaatactattcacccttta

SEQ ID NO: 241458 - DNA, 672 bp, Homo sapiens
ggttttatccttactaaatatgtcagtggtaggtcttgatataagattttaacttaggttgctatcataagctctgtcttttggttgcaaaaaccaggtcactctcactcaacaaaagggttcaagatatagatctcctgagacctcaggttgggaactggcttcagtccagtacttgctttctgtggcagacttggcccatgatgattgtcctgagcttaagtgttcctcttgacctttcaccatgacatctaactggcaagttcctttagggtttcttgattctagttcctgcagcacaaatacctagcaatgaataactcttctgaggatgggtagtagtctagtcttgaaaataatgactagtgtggagaaaagggaacccctgtgcacttttggtgggaatgaaaattaatacaatcatcatggaaaccagtatggagatttgtcagaaaaccgaaaatagaattagcatacagttcagtaatctcacttctaaaaatgtatccaaagaaatttgatctgaatgtagaagagatatgtgcactcccatgtttattgtgtccttattcacaatagctcagatatggaaacaacctaggagtccattatcagatgaatggataaagaaaatatggcatatacacactatgcaatactattcacccttta

SEQ ID NO: 241459 - DNA, 444 bp, Homo sapiens
taggagaacagatgttcgggcaggcaggcctgggacccgctggagggagtcaagaagacactacctcctaattaataggcggtaaatgtctgaggaacagactcctgtcccatttcttcaaacatctggggttccggacacttaggccctctgccaggagacatgaatctggggattaaaagtttctgtgcttttcttcaaacagaacaatcctaaaaccacatactctgaaagtatcattgaaactgaccgagaagagaatcctcagccagattttccatggagaaccagacctgtctaaaccagtatgagctttcattacagtaaagtaatggcaaaagaagcctcggggcagacaattccagattcactatttaagtggccttaggtgactggattcacctctctgagcctccatttttctcatatgaaagacaggaagag

SEQ ID NO: 241460 - DNA, 311 bp, Homo sapiens
acctcccccctctgttcattctaggagacatgaatctggggattaaaagtttctgtgcttttcttcaaacagaacaatcctaaaaccacatactctgaaagtatcattgaaactgaccgagaagagaatcctcagccagattttccatggagaaccagacctgtctaaaccagtatgagctttcattacagtaaagtaatggcaaaagaagcctcggggcagacaattccagattcactatttaagtggccttaggtgactggattcacctctctgagcctccatttttctcatatgaaagacaggaagag

SEQ ID NO: 241461 - DNA, 283 bp, Homo sapiens
taggagaacagatgttcgggcaggcaggcctgggacccgctggagggagtcaagaagacactacctcctaattaataggcggtaaatgtctgaggaacagactcctgtcccatttcttcaaacatctggggttccggacacttaggccctctgccaggaaactcaggcattgttctgctggaaggagagaaggccaggaggcaaccctcaaaacctgggtgtgtttggccaaggccaagtagagatttaagggtcttcgagtaaagcattcaggattcttact

SEQ ID NO: 241462 - DNA, 463 bp, Homo sapiens
tttgttctttttgcttaggattgtcttggttatgtgggctctttttttggcttcatatgaattttaaagtagtttttttctgagataaaataattttctgaactaagcatgggcttttcagttaggctgactttggattttgctgtttgatcatgggcaaagcacttaacatgtctgctatggtttgaatgtgtcccccaaaggtcatgtgttagaaatttgatccccaatatggagatgttgggaggtgggatctttaagatatgtttgggtcatgagggctctgccctcatgaatggattaatgcagttattgtgggagcgggttcatgacaacaggaaaagtttaaccccatcttaagtgtgctttagcacctgcacagtatgcaggttaattctcttggcaagaatcttgcccttaactggtttgtttacaacaatgccaacagcgtgcagggtaacat

SEQ ID NO: 241463 - DNA, 349 bp, Homo sapiens
tgtgcctcctgattttcttaaatagacagacaaatacttatctctgacatttttgtcactagcctgagaaaaaaagtgtttatggccaggctcacacctgtaatcccagcactttgggaggccgaggtgggtggattactaggagttcaagaccagactggccaacatggagaaagcccatctttactaaaaatacaaaaattagctgggtgtgatggcgcgtacctgtaatcccagctactcgggaggctgaggcaggagaatcgcttgagcccaggaggctgacattgcagtgagccgagatcacgccactgcactccagcctgggggacagagcaagactctgtct

SEQ ID NO: 241464 - DNA, 533 bp, Homo sapiens
caatactaaggttcgagtgaagataccattgttgtattagtggagacggtataatatattctcagtaaagacctcagtctttactcagttctcatgctccttgatgtcttagcatttgatatattagatttgccatgtactagatactctgagctttggtttttgtatcacaacattgtcctacttctctattgttcattcattcttttgtttaaagaatggccagactatgctgctgaacaagacagacacagcccttgccccttggagcctgtgagcatcctttcttcctctcctatagcctcttttcatgttttctctgtggatattagtccttagctaattgctttgtttcttttagtcttgatttgccttctgtaagaactgttttattctcctagcttaagttgcaaattctaatgccaacaacttacacatctttctctacttctgatctttaccctgaattttattcacttagccatttaataaattttttttttttttttgggcgacagagcgagactcttgtt

SEQ ID NO: 241465 - DNA, 413 bp, Homo sapiens
ctactactactaatactaaattcgcggccgcgtcgacggtttttgtatcacaacattgtcctacttctctattgttcattcattcttttgtttaaagaatggccagactatgctgctgaacaagacagacacagcccttgccccttggagcctgtgagcatcctttcttcctctcctatagcctcttttcatgttttctctgtggatattagtccttagctaattgctttgtttcttttagtcttgatttgccttctgtaagaactgttttattctcctagcttaagttgcaaattctaatgccaacaacttacacatctttctctacttctgatctttaccctgaattttattcacttagccatttaataaattttttttttttttttgggcgacagagcgagactcttgtt

SEQ ID NO: 241466 - DNA, 430 bp, Homo sapiens
atctaagaccttaaataaggaaaattctacaagaaaacattggggaaactctccaggacattggtgtgggcaaagacttctttttatgttgttgttcttgtttttgttttctttcaaacaagataggctttatttagatcaccaaaactaacattttacagaaaggtagccataacattacacagcaaagtatagctgtaaaatctcaaacaagaaacacaatgctttctttagatcaccaaaaataatgtttcatagagagggaactgttagaagcaaacgtgtagctgcaaattttcttttgccgtcaatatcgagtccctctaaaatactttgagactactttgtggtttccaagtacaaactaaaccttgttggacagagttgctcagcttcatcaaaagaatgaaaccaatttgcaaaaaaaaaa

SEQ ID NO: 241467 - DNA, 665 bp, Homo sapiens
ccgggaggcggagcttgcagtgagccgagatcgcgccactgcgctccagcctgggcgacagagcgagactccatctcaaaaaaaaaaaaaaaaaaaaaaaaaaaaagagggaaaaggtatgcaattagaaccagattggcattttggcaggtatttatttttccaggatgaacgtgctttcaaaaattgccagtagttgctaggcagacttcaacaaacacaaaagacatttcccaagcatctaacctggctggtttctccatttatattttgtgatcctggctcgcagtgtagtaaaccctattactatttgaactcgaaatacagaatacttctgccagcagtcccattggcattttgcggcagtcatgaagttaaattttcttcgccaggaggccagttgactaactttaaacgaaggcacattgtccaagattgtgggcagatcatttgaactgccttgaagttgaatagaaactatataaagaaaacaactccatcttgccagaagcagttgcctttttatttggtgttctcctttctgatcactgaattttcctgctgagtttatgcttattgtatctttctctttcctctggcaaatgaacagaaccctcacatacgcagttatggtcagtcctttacttaaataactttgctggatg

SEQ ID NO: 241468 - DNA, 152 bp, Homo sapiens
gttattttttaatgttttttaaaaaatattttcaatccacagttggttgaatccacaaatgtggaacccatggatacagagggctaactgtatacttaatgatttgtatacttttctacacatatgttgtactccaataaaatgttcattta

SEQ ID NO: 241469 - DNA, 253 bp, Homo sapiens
aaaataataaaaggatattaagaattattactacaaaaataaaatacaagtgagcaattatttttgtctttaggaatggtaaggtgtaggcacgccttcacagaattaagaaagaatcatgcttcagatatccttttgagatccaagcaaattaaaaaccaaagaagtcactttgggaggccaaggcgggcagatcacaaggtcaggagatcgagaccatcctggctaacacggtgaaactctgtctctacca

SEQ ID NO: 241470 - DNA, 380 bp, Homo sapiens
aagtgtcagctgtcaaatgaaatgatggggactgacagttcagaattttaaaagttcagctcctttcaaatgcattaaatgaacaagagctgcctaatttgggctgaagaaaaagcaacaaaaatcccctgtaagtatgcaaggttttattctacttttgcatgcttagtatgcatagagaatgttaaatacttttcagctggatacactgttaattctatgagtgagaaagatttcattaggtgagcttcaggcaagactaggctacaaatggaattcccttttattttctgaaattcacagtatatgacccatatccagtgataaatggtctataaattctcttgctgtatttaattgcataaacttccattatattc

SEQ ID NO: 241471 - DNA, 272 bp, Homo sapiens
tctctcagggtaagacctagacatcagtagtcatttacaaactcctcaggagctagagaccagcctgagcaacatagtgagacctcatctctacaaaaaaaaaaaaaaaatttttttttttttttttaattagctgtgtttgatggcggacacgtgtagtcccagatactggggagggtaaggtgggaggatcacttcagcccaggagatcaaggctgccctaaggtgtgattgtgtcactgcactccaacctgggctacagagcctatctc

SEQ ID NO: 241472 - DNA, 547 bp, Homo sapiens
tttaatatcatggaggcactggatggactgctaaagttcataaaatttcacaaagattgggatgatatcttggatggaacttatttcagtgccttactcttagaaagggctcagtaaacaccattgtggttgctggtacaatctgaagtctaggtacaacagcaaaccccagggaacttaagctgtggtcccttgagcatttgctctgcctctctgagctttatttttcttatctactcagtggagataacagctataagcctcaaaataacctatattttagcatgacaatttttaaagagttactacctattatttccttttagcttcacaagaccatgaaatagaacacttactccggttcccattttgcagatttagggaaaaaacactaaaaggcagaatgatttgcagttacattgattcagcaaacatactctaaattgtgaggatagatacagagaagaaaggtcgagtttctgtcctccaggaactctcagtttagtgagtgagtcatagttagtcttgcttgctctaagcaagacag

SEQ ID NO: 241473 - DNA, 316 bp, Homo sapiens
caggagctggagtgggtgccacgccagttaccatagtctcccgggtcctggaattgtgctacaggagtccaaatgggattctccagctctgcaaactcaggagtcacagtttcggttcatagtgttgatatttctggtctctgtataagaaatatattttgttgaactatgtgactaatcaagttgtaatgttttttaaatgaaagaagaattcctatcatagtcatcactttgatttgtgaggatgaacacttcgttctctttagaagagataaaagattacatgaggaaaaaagtatgtaactagagttatata

SEQ ID NO: 241474 - DNA, 475 bp, Homo sapiens
aaggagagggtcatgtagatctctggggacaagagcctttcaggcagagggaccacctgtgtggaagtccaagggtcttgagtgttcaggtatggtcacagccaatgtggcgggcagggcacgagagaaggaagagtgaaggaggaggtgaggttagaggggaggtgacagggtccaggactttggcttttctctgagtgaaatgggagcctggagtggcagtgatctgactcacattttaaaggactactaacctgctgtgttaaaatgacaccaagtctggggaggaaggtgtagtgttataagcaaagagatcaattaggtgacaagcaggggtggctacagctggagtggtaagtgtggacagagtgaaagaaacaggacgtgatgtgaagtagatttgctaatgggttgtatgtggtgtcagagaaagagtcaaggatgaatgtgtggaaaagttaaaatacagataagc

SEQ ID NO: 241475 - DNA, 312 bp, Homo sapiens
tattcaacaaatactgattgaacactttgattccatgtgtcagtgtttaaactacttgctgcgtctttagctctatctcttctgctgaataagaaattgtagagagatatttcagattttgctaaatcagtttacaagctttgttctttatttatcattccaaattaagccagaataaaatatgttttttaattgcattgacataaactaagaaaccaatgggagtgatttagattttgagaaataggaaattaaaatagaaacttggactcattttcatcaaccttactggttctagggaagtcattgtca

SEQ ID NO: 241476 - DNA, 359 bp, Homo sapiens
gagatggagtctcgctctgtcacccaggctggagtgcaatggcgcgatctcggctcactgcaacctccacctccccggttcaagcgattctcctgctttgtatctttagtagagacggggtttcgtcatgttggccaggctggtctcaaactcctgacctcaggtgatccgcccgcctggacctcgcaaagtgctgggattacaggcgtgagctaccgtgcccggcctttccatgttttaaagaacatattttgccaccccctggtggacagtggctcaccaccggcacaagaggctacacaggcagatgtcaatggggaccaggcagggacaggtattgtcgtgagcctagccctacc

SEQ ID NO: 241477 - DNA, 342 bp, Homo sapiens
catgaaaggtgtttccctcctggggaagccagggtgaacacggtcttgcccacacagggcatacgattcgggaggttcaatgaggataatataaaaaatgtaccacaacttaagggccatgaaggaaacaatgccttctttcacttgtgatattagctacttttgaggaaaatctggctaatatatgtttcttggctacctgcctccttaaatagggtgtaagggggatattctaatcttaactggaggactcagcattgcaactggtcccataaagtctgacacttgcttctttataatgatttccaagaggtgtatgaacctttttatgatcacgttaaa

SEQ ID NO: 241478 - DNA, 1308 bp, Homo sapiens
  misc_feature (670)..(670): n is a, c, g, or t
  misc_feature (801)..(801): n is a, c, g, or t
atgggcgactggagtttcctggggaacatcttggaggaggtgaatgagcactccaccgtcatcggcagagtctggctcaccgtgcttttcatcttccggatcctcatccttggcacggccgcagagttcgtgtggggggatgagcaatccgacttcgtgtgcaacacccagcagcctggctgcgagaacgtctgctacgacgaggcctttcccatctcccacattcgcctctgggtgctgcagatcatcttcgtctccaccccgtccctgatgtacgtggggcacgcggtgcactacgtccgcatggaggagaagcgcaaaagccgcgacgaggagctgggccagcaggcggggactaacggcggcccggaccagggcagcgtcaagaagagcagcggcagcaaaggcactaagaagttccggctggaggggaccctgctgaggacctacatctgccacatcatcttcaagaccctctttgaagtgggcttcatcgtgggccactacttcctgtacgggttccggatcctgcctctgtaccgctgcagccggtggccctgccccaatgtggtggactgcttcgtgtcccggcccacggagaaaaccatcttcatcctgttcatgttgtctgtggcctctgtgtccctattcctcaacgtgatggagttgngccacctgggcctgaaggggatccggtctgccttgaagaggcctgtagagcagcccctgggggagattcctgagaaatccctccactccattgctgtctcctccatccagaaagccaagggctatcagctnctagaagaagagaaaatcgtttcccactatttccccttgaccgaggttgggatggtggagaccagcccactgcctgccaagcctttcaatcagttcgaggagaagatcagcacaggacccctgggggacttgtcccggggctaccaagagacactgccttcctacgctcaggtgggggcacaagaagtggagggcgaggggccgcctgcagaggagggagccgaacccgaggtgggagagaagaaggaggaagcagagaggctgaccacggaggagcaggagaaggtggccgtgccagagggggagaaagtagagacccccggagtggataaggagggtgaaaaagaagagccgcagtcggagaaggtgtcaaagcaagggctgccagctgagaagacaccttcactctgtccagagctgacaacagatgatgccagacccctgagcaggctaagcaaagccagcagccgagccaggtcagacgatctaaccgtatgaagtgacgcc

SEQ ID NO: 241479 - DNA, 456 bp, Homo sapiens
ctagcctgtcatgccatgacctgacccacactcagagcagagggtaccctaatgtggccacagcaaattccaggcagtagggagctgttttaaggtgaataagacacagtcttctccatcattaacccccaaagtctggtgagagatacagactgacatagtatgagaggtgttgagatggagcacagagaccacagagagaaggctggccatgtggaacagacctcagagaagctgcttacaggaggcaacatctaagttaattttgaagaattagaaacagttttccagatggagagactggaaaacacatgctacagagaaagaatgtgctcaaagatccaggattgcaagaaacacttaaaacctcttcatcttgaagccccatctcattttaaaccgaatataaatacatacatagcacatctcacattaaaattttaagtttcaaatgtg

SEQ ID NO: 241480 - DNA, 401 bp, Homo sapiens
attttggtgagaaaaattgttataaagacaggagacaggaggacatatttttgttacaaagtgattcaaaattatttaaaagttgtttcaaaatatggatttaagaatgaaatagggctgggcgcagtggctcacactttgtaatcccagcaatttgggagaccgaggtgggtgcatcacctgaggtcacgagtttgagaacagcctggccaacatggcaaaacaccgtctttactcaaaatacaaaaaattagccaggcatggtggtgagcacctgtaatcccagctactagggaggctgaagcaggagaatcacttgaacccgggaggcagaggttgtagtgaggcaacatcgtgccactgcactccagcctgggtgacagagagagactctctgtcta

SEQ ID NO: 241481 - DNA, 435 bp, Homo sapiens
ttgcatagtagttgtttttagagacagatgcttcactaactgaatacttagtggaaatggcatattcctggaaatgactgtgtgtcatttgggtagaattgtgtggtttggattcagtgtaagagttaatagattgcaaataggaatttcctattaaaaaggattaggtattgctatactttctgtaactcatcacagcccacatcctccagttagggaatacagcctttcttcttcaaagtcagttgttacctgtttgaaacgatctcctatatccaagcaaagccctgagtgcttagagccataggtcttccaccattttctatgctcatgatgatatttagttactgtaccagtattctgtgttacagaaaattagtactaaatgaaataggccaaacaccagtaaataaaataaattttaaagtaattgta

SEQ ID NO: 241482 - DNA, 330 bp, Homo sapiens
ttttttttaggataaatttctaggaatgaatatctttagagctcttgataattattacctctggtaccacattgttctccaaaaggattttagtggtgaaaaaaaacctaaagtttataactataaaagtttgttatttttcttagaaaaataacacgaaaagacttctggactgaaattctccttttcctcaaaattaattatgcaaacaaaaattagttttcaaaaaactgccagcaagtaaatgcggatagaggaatagtcaaataccttaaactttgaaaagtacatcaaagaaagagagagagattggaaaggaaaaagaaagaa

SEQ ID NO: 241483 - DNA, 274 bp, Homo sapiens
caggcaggctcaagtggctggagtaggccccgcctgcctcccctctgccctctgcggctgttttgtatcctgccagattcctgaagtgtcaggcctcattacagccccgtgccccagtgagcatggagaggcagttgacaggtatacaatctgaccgcggctcccttcaaatcatcaagttgtcttcaggcaggaacgtgccgggaagctgggcagaggcccctggcttggctgcataatctgatgcacattaaaaacatctttcggatgcctt

SEQ ID NO: 241484 - DNA, 389 bp, Homo sapiens
tttatccattgccctattactagtcatttataacaattttttaatagtgtgtaaatagtattgccatccattgaccagcaattgtgtttctataaatctgtcttatgggccggatgtggtggctcacgcctataatcccaacactttgggaggccgaggtgggtggatcatgaagtcaggagatcgagaccatcctggctaacatggtgaaaccctgtctctgctaaaaatgcaaaaaattagccgggcgtggtggcgggcgcctgtagccccctactcaggaggctaaggcaggagaatggcgtgaacctgggaggcggagcttgcagtgagctgagatcgcgccactgcactccagcctgggtgacagagcgagactccgtcccaag

SEQ ID NO: 241485 - DNA, 506 bp, Homo sapiens
ctgatattcactttgttgatttcaggaggtcctggtataattcctctaggacatgttcactgctgaagcattacttctgcttgtgtgggtcggggtcccaacatgcattaatgctgatgactagggggatgtatgagacctaggtaatacactttgcaatataacagacatgcattgtgctgtatgtatggtctcatttcagccaccacccaagtggttcagcccaaaaatattgaaaagaaatttcatgtttttgtgtatcttcacaggcattaaagaggatcaaatccataatttctggcaacactgctcttttccacttccccttgcaacttccttgtggacttgtgaaacttcactgtggacctgaggctcctactgtcctggaagtccccttgtggactttctggggattttttttgccaaaacttgtcccctcccaacacactcctttttgttctttttttatgtagaatgactgaattcgtggaggtgaaaccttttct

SEQ ID NO: 241486 - DNA, 619 bp, Homo sapiens
tagccaggcttggtggcgggcacctgtagtcccagctacttgggaggctgaggcaggagaatggcatgaacccgggaggcagagcttgcagtgagctgagatcgtatgtggcacctccctcctctctctcttcctgctgccctggccatgtgaagttcctcactccccctttgccttcctccatgattgtaagtttcctgaggcctccccagccatgctgcctgtacagcctgcagaactgtgagtcaattaaacctcttttctttatgaattacccagtctcagatgtttctttatagcagtgtgagaatggagtaatacaaacggtaagttggagaatgaatggaacgtgaagagcgagctagtaatgagtatagactactaaggagtttaactgtgaatggaaggttaaaggggttcatatgtagaggaaaatgtagaatgaaggagaggctttgtttttagcctgtgaagaaggagctatcagagaaatgttgccatggctagaaagaaagggaatgatttttaaaagcaacaacctaattagagcccaggtagaaggattagcctttgttttcaagctgggaagtggtgggaaatgagtgtgcgtggatggcct

SEQ ID NO: 241487 - DNA, 524 bp, Homo sapiens
gatctcagctcactgcaacctctgcctcccaggttcaagtgattctcctgcctcagcctcctgagtagctggcattacaggtggatgtcaccacgcccggctaattttttttttttttcttttttgtagagaagagttttcgccttgttgcccaggctggtctagaacttctgcgctcaaacaatctgtccacctcagcctcacaaagtgctgggactacaggcgtgagtcaccatgcttggttgactgcccttctcgcatcaagtccacctttagtggtccccaagacccccgtcaaggttcagtaatttgctagattcacagcagttactgaaagctttttgttttgagatggaatcttgctctgttgcccaggctggagtgcattggcacaatcctagctcactgcaaccttgaactcctgggctcaaatagtcctctcaccttggcctctcagagtgttggcattagaggcatgagccactgtgcttggccccgaaaaatggacattttcctctccccct

SEQ ID NO: 241488 - DNA, 559 bp, Homo sapiens
gtttcacagttgaggaggagaagctgggactagcaggcttcacgagaaacacaaaggtatagccttgctcactgcatatccactgacctgacccatagtacaactccagtaggaattgttggacagatgactgaatgaggagactgaactgtagccagctctagagattaaaaaaagtcatggagattcagaaagacaggaagttactgcatataaaggttaacacccaccctcaccttctacaaacagcctcagctaaagatacctgggaggagcttgtagaagatgccactctctgcaatccagaggaaaatgtctttccctttgagcggatcatttctaccaaggtcaaactcatattttacattgagtttgtatgaaaaaaaaatcagatgtttaatttttcatgtaatcaaagaacaataacaaaagcaaaccttcacttgaggactgactctggactggttctggaagctgtacaagggacatccccagccacgtggtaactggcatgagcccacaattaatatgcattaaatcagtcactcctcaagtcaaa

SEQ ID NO: 241489 - DNA, 429 bp, Homo sapiens
tatttgctctctcttgacatggtagcttcacgagaaacacaaaggtatagccttgctcactgcatatccactgacctgacccatagtacaactccagtaggaattgttggacagatgactgaatgaggagactgaactgtagccagctctagagattaaaagtgagtatagggataattatatctgtaagtagctattattacatctctttttctgcaatcactagtaatgttagtattaataatttgtcagtgcttgaaaggttgcaaagactttgtatttgggaatcagcaaagattgttctccaactcctccatctgagattcctgaccagtggggagtggcccagagcagctggtttgagggaggtgatggagacggtgcagtctggtgactccaccagcattccccaccagcacccgccactgg

SEQ ID NO: 241490 - DNA, 354 bp, Homo sapiens
gtcatgccagtggccccaggtgggctgcatagccctgaagaagggacacaggctccgactctaacagaatcggctgtgaaccctgactctgccctcttaaaaatgaagggcagtagaataggccgccccaacacatgccgctttggcgtaaggattattctgagctcagggcacttgaaaaccagcaggtgcaagaaggagaccctgactttcctttttcttcctgtaagcaagagatgaaaccctgtgtgaaagatgccccccctccaccaggagaaaggaagagatccttgtcatcagagtcaaagcccagggtgctctacaaacaaaccttgtgaagccaacacttacctt

SEQ ID NO: 241491 - DNA, 460 bp, Homo sapiens
tgcaaatttaaaaggtgaatgtagtgagggggatggcaagtggctggtacaggctgtggtgattccttttactcaagggtttttgtggagtatagggagaaggggttgatatttatggacacctatgtgtcaggcactgtgcatcattttatccttacaggatgttgtgaggtaggtattattgttttcatttttacaggtgaagaaagcaggtctcagagggactaaaatcctgcccaaggttagtggtagagctgggatccaaaaatctgtcagaatcctgagactgcgctgttccactgtgccacgcagacagttcattcagtttagatgtcacatagtcaagagggaactctatgcatcctttaattttttagactatgatattctttttaaaaattagcctttattttctaactaccaaaagaaatatgaaagcattacagaaacactggaaaat

SEQ ID NO: 241492 - DNA, 561 bp, Homo sapiens
gcaagcttttacttcttcccaagtcagcaaataattcctcctcctcacttaatagttgactatgaagagcaagccattttgattttgcctccaatgagctttcacatttcattcctccttccactcccatgactaccaaaccaatgtaggttctcctcacttcactctaagacaacagcgtggccctcaactactgtcacactcttctaggctctgtgagcacaatgtgtctcatattctcttctgctgtcaccagatttactttacaatagtttctttactgtcactcccctgtttctcaaccagttatacagaaagatgaatagccagggtgatagtctacttagcagaggggaaaaaaaaaaaaaaagatctgtggccagtccacagacctgtttaagtacaagatattacatcagcactatttcctaaaactcttctacatgagtcctaccctccttgtgttatagctcaaactggtctggtatactctgagtatctcattctctttcctagataactgattgtgtttacttttcacctatgtaaatcattttcctt

SEQ ID NO: 241493 - DNA, 569 bp, Homo sapiens
ttgagatagggtctggctctgtcacccaggctggagtgcagtggcacgatctcagctcactgcaacttctgcctccagtgttcaaatgattctcgtgccttagcttcctgagtagctgggactacaggcgggaaccaccatgtctggctcattttttgtgctttttgtagaaatggggtttcgccatgttggccaggctggtctcgaactcctgggctcaagcaatctgccaagcttggcctcccaaagtactgggattacaggcatgagccaccatgcccagccaactggtgagtttttataatgttctgaaaaaaagtgcattttaaaagccagcgtgttcacagtgtataaagaaagtattgcttaagaagtacttagatgggaagcgacatgaaaatcttaactaaaaaaactcttacaagcccaaaatataatgtaataaaaacgctcccaagcaaggcaaacttctagattccccaagtgcatacaggtaatggggaagccctgagcctttactggcatgaggtgctctgaagagaacagggggaaccctcttctcctcatac

SEQ ID NO: 241494 - DNA, 542 bp, Homo sapiens
ccaagttttcagtgagttagactttcagggtaatcccggtttgccttgcaaagctgaggaaatgaggaatgtcatgggtatcaatatctttcctgagaactgaaatttaccagtagcacattcctatcgggcatttatcaaaacaaacatataggtcaaatgaccgtttactcagcagccacctgtcagtgccttgggacgtcagcagtcccggggatgcccgtcaaagcagctgagtgatctcggccctgaacattgccaacttcccgcctgatgccctggagctgaggctccagcttgaggcttcccagtgctttggataaaaagatgggtctgcacctgagagccatatacatctcgctctggggagaaaacccaggcagggctttcacacagaggaagagtgaggccaggatttatactcagagaggatgggcaaatagcattcacgcgtgtgtcctccagggtggaatctgccaggctgacttacagtgcaggaattttgccagtcagtggaggtagatgtgtttatagataacgtt

SEQ ID NO: 241495 - DNA, 386 bp, Homo sapiens
gcaagataatctatttaatcattcccatatatgaagatattttattattcctatttacttataaacaaaaccatgttaacatcatgtaagaacatatttgtatacttctctgattatttccttagaataaatccacttttttggaattgctaggtcaaagagaacagacacttgagttttgaggtacattgtggacttcccatctggaaagagtatattagattaaactctaactatatatatatttccctaaagctatgtcaatatattatgattaaaaatacattttccaatttgagagacaaaagtcatctctcattttctgtaactttattttatgacaaaaataatgtgttcattacagaaaacataaaaaatctagacac

SEQ ID NO: 241496 - DNA, 471 bp, Homo sapiens
gaattcaagcaattcttctgtttcagcctcctgagtagctgggatcacaagcgcatgccaccacgcccggctaatttttgtattcttagtagagatggagtttcaccatgttggtcaggctggtctcgaacttctgacctcgtggtctgcctgccttggcctttcaaagtgctgggattacaggcgtgagccaccgtgcccggcctacatggttttttattcataacagattcttccatatgtgttactaaaactaattaaaaactaggctattgaatatcaggttatttgatattaactttgcctaactttattattatcatagaacatggatgttccatgttctgttaagataatagcacttttctgcctttaaattgtgatcatagttgttgtttttgccttttaagaatgtgtgttattatccatgtgcaacttatgcttactgtagaaaattaggtgtgataagca

SEQ ID NO: 241497 - DNA, 475 bp, Homo sapiens
tgaagatattccatgtagaagtctgatttcaggctgccatggactgagctgagtcctctgaaaattcatattttgaagctttaacccacaatgggactgcatttaaagatggggtctataaggaggtaataaatgctaaatgagattacagagttctaatctgatacaactgacattcttataagaaaaggaagcaacataagagctcactctctccatgtgctcacagagaagaagccgcgtaaggacacagtaagaaggaagctgtctgcaagccaggaagagagccctcaccagaaactaaccctgagggtgccttcatcttagacttttggccttcagaactatgagaaaatatgccactcaggctatggtattttgttatggcagcccaagcagatgaaagtgcagaccctcctctgcaatgtatcatttgtaccaaaagtaaacaccaataaaagtatgattcctaacc

SEQ ID NO: 241498 - DNA, 676 bp, Homo sapiens
cttcatccataaagtgcattgtcttaaaatcaaggcattatcttaggtaaccacacacacagtaccattattaaacctaagagaactaatatcatctaatatcagctctatttcagtttttcaagctgtccccaaaatggctgttacagctttgtttttcaaacgaggatctaatcaagtttactcattgcattttgttctctccctttcatctcttttaaggtggaccagttcccgtggtttgttttgtttgtttagactttttagagtctaagccagttgtcctgaagaggatgcaattgttctatcaattttggggtgtcagacttcagtttctccagaactgttaggaaattaagttgttaatgtgttactgagtttgatcagggctgaagaagcacagccaacctttgagagcttattgcttgaaatgatggcatccttggaccttttcatggcatgttccttctgaagtctctaggtctgggcctagacaaactttctactggcagatcataaggagatgcaaatgaagaggtagtatctgaccatgagacatttaccgtctaacaacttgagatattttttccctcctgggaagtagatttctgttttaggctcagattaaggagggggatagaaattgagacacttaattttacagcccccttggcta

SEQ ID NO: 241499 - DNA, 412 bp, Homo sapiens
ttagatcataccaccccaacacaatttttttgttgttgttgttggagtctcactctgtggcccaggctgaagtgtgtgatcataggtcactgcagcctcatcctcctgggctcaagctaccctcctgcctcagcctccccaagtagctggaactacaggtgcatgccaccacacccagctaatgttttgttgttgttgtagtagagatggggtcttgctatattgcccaggctggtctcaaactcctgacctcaggtgatctgcctgctttagactcctaaagtgctgggattataggcgtgaaccaccatgcccggcccataaattcttaataaaaaaagcagaagtgttaatttttatttttaaaacatcccgaaactttggaagactcacatcttgttaccactctagt

SEQ ID NO: 241500 - DNA, 346 bp, Homo sapiens
aatgatttcccgtgcctggttctataccctaggtgcgcagatgaatttcagctactctcttaacctagcccacacaaatcatctcagtgcttccattttaaccagtcatccaacaaaacagatttacttttttccttggcttttccctgttgctttgggatagaaggtctttactcctcagtgaacttatctatcatggctcaagtccatagagaaattggccgggcacagtggctcacgcctgtaatcccagctactttgggaggccaaggtgggcagatcacaaggtaaggagttcgagaccagcctgaccaacttagtgaaaaccgtctctactaaaaatacc

SEQ ID NO: 241501 - DNA, 367 bp, Homo sapiens
aatgatttcccgtgcctggttctataccctaggtgcgcagatgaatttcagctactctcttaacctagcccacacaaatcatctcagtgcttccattttaaccagtcatccaacaaaacagatttacttttttccttggcttttccctgttgctttgggatagaaggtctttactcctcagtgaacttatctatcatggctcaagtccatagagaaattggccgggcacagtggctcacgcctgtaatcccagctctcaggaggctgaggcaggagagtcacttgaacccaggaggcggaggttgcagtgagctggagatcgcgccactgcactccagcataggggacagaacaagactccgtctag

SEQ ID NO: 241502 - DNA, 441 bp, Homo sapiens
tgttttgggggtaacctgtgctttgacatgctttgctaaaaactttctaagtctccctctggtgctgggaccagccatgaccaacaacgtcatccatgcaggccacccctaacatagtccaggcctcatgtgggtctcagttcccttttcttctttcaggaagttctccagtgcatgcatagggttgaccagatgtcccaaggtgctctaggacttatgcctatgaagctgttttagggcttcctagtcagtccctggttccaggaaagcagcctgatgaggagatcattcccgctggctggtgtggcatttcttttatggcactacctgggattgggccaccagacctgcgctaacatgctgatttgatggactcttaacatcataggacaaagaatcgtcatgtgaaccaattagacaataaacaaatgcctaagtgcc

SEQ ID NO: 241503 - DNA, 423 bp, Homo sapiens
aaagcttaaaggaatacccactgaattccagctgctgaaggttgtcctgccctttccttgtggtctccaaacacaagcttgttttatgtcacattattttctcccctctttatgggccagattcaatttgtcactacttggatattgaacactttttgcaaattaaagagaaagtcacctcaggcaactttcaaatagaggcttattggggacttgatgatactgcaaatcattaaagaacttaggttctgtacctctgccctcactgatcaaatagaggccactcctttgaagccagcaaggacccatgggactgacctaatgctttttgccttcagcttctgaagcttatcacattactaatgtttgagtctctaatccagctggctagtttaatcatcttgaagtaaaacaatactatta

SEQ ID NO: 241504 - DNA, 298 bp, Homo sapiens
aaaggaaaactatttaaagtttggggaacacataaattagtctgccattgtattccggagccaccatttcaatccagggaagagagccatcctacagtggtgtccaggaaaggacaatcttggaaacaaagattttcaagggaggcatttccagcaatgcctaacctcttcaggagagtgtccatttaatattcatttcaaaatatttgctcttcctatttgtgactgccctttgtgagataatgtattagcatagtcattttcaatttgcagggggacagtgggcagcaccaatatt

SEQ ID NO: 241505 - DNA, 433 bp, Homo sapiens
tatgaggaaaaatcttgtaacaagtgggaaagagaaaaaaaaaagcccttatgaatcattgtaacctctaaactgggtttcattagaaaatcatcaccttaaagtggatacatgctggtatttactctatgtattattagtgttaaattattgatggcaaccaacatcatatctgtgtttatgtacttgactttcttgtaaagacgaaaatgattatcagaggtttttgaatggttgtagaatctgtgatgatcttgtttatcatcatggagaaatctaacaaatatgagttttctaacttgtagaaacttattcctttaagcacagatggaaatctctttaacatgttaccttctgtcctacattaaaaacagaaagatatgttcctttctttatccctattctagggaacttggaaaaaatacagaagagt

SEQ ID NO: 241506 - DNA, 393 bp, Homo sapiens
gcatttgttgttttttaagatgagagatggccgggctcagtggctcacgcctgtaatcccagcacttcaggaggccaaggcaggcggatcacaaggtcaggagatccagaacatcctggctaaaactgtgaaaccctgtctctactaaaaatacaaaaaaattagctgggcatggtgacgggcgcctgtagtcccagctactcaggaggctgaggcaggagaatggcatgaaccggggaggcggatgttgcagtgagccgagaccgcaccactgcactccagcctgggcgacagagtgagactccttctcaaaacaacaacaacaacaacaacaaaaaaaaacgatgagagatgagcctggtgcagtggctcatgcctgtaatccctgtgctt

SEQ ID NO: 241507 - DNA, 464 bp, Homo sapiens
actattggggttgatttgctaatattttgttgacaattgttatacatatgttcatgagagatattggtctgtagtttttctttcttgaaatatatttatttgatttgggtattaagataatgctggccacatataatgagttaggaagtatttctccaacctatatttcctgggagatattgtagagaattgtatatttctttcttaaatgtttggtagaatttaccagtgaacccatctaagcctagtgctttcattttgggaaagttattaactattgatccaatggatatagacctgtttaaattgtcagtttctcctggtatgagtttgagtagagggtgtctttcaaggaactagttcatttcacctgggttatcaagtttacaggcaaagagttgttcatgatagttctttattattcttttaatgtattcttgatacagatatcatacagatattag

SEQ ID NO: 241508 - DNA, 456 bp, Homo sapiens
catagaagatctgtcaccagatcatgttggctctgtcttcaaaatgagagaatccaaccacttctcaccacctccacagccaccatcttggttcaaaccgctgtcttctcttgcctaaatttttgcagtagcctccccttgtttcttttcttgctcccctgcagtttatcctcacagagcagccattaaaccctccagtgcttctcctgtcattcagagtactttgctgacctcatctcctggtcctttttcccttactctgctccaggcactctggtctgccttcacttccttgaatgtgactataccaggcattcctgtctcaaggcctttgcacttttcgtttcacctgcctggaacactcttccccagatagcttcaagactttctctcacttccttcaggtttttgttcaaatgtaatcttctcagtgaacctcctcttatttgtcatgtc

SEQ ID NO: 241509 - DNA, 1213 bp, Homo sapiens
  misc_feature (714)..(714): n is a, c, g, or t
cgggtgcggtggctcatgcctgtaatcctagcacttcgggaggcgaaggtgggcagatcacttgagatcaggagtccaagaccaacttggccaacatagtgaaaccccaactctactaaaaatacaaaaaactagccaggcatggaggcacacacctgtagtcccagctattcaggaggctgaggcaggataattgcttgaacctgggaggcagaggttgcagtgagctgaaatcatgccactgcactccagcctgggtgacaggtttttctgagactccatctcaaaaaaaaaaaaagtattgtgcaaacaattgcttacactgctaccaaagtaaatttgacaagtgaaatagttataactcgccaagttagaaaagtaaatggattccacattaactaaatatttaaagttaagatttttaaaatatggaagatagttacattttcacaataagtaactaaagaatatgtattttttaggattctttttagtatgtcctttgagtatgtccttttgttaacattcaccacacaaattactattaaaagtagtccaaacaagcctgggcaaatggcgtaactctgtctctaaaaaaaaatacaaaaattagctgggtgtggtagcacatgcctatagtcccagctactcagggggcctgaggtgggaggatcaattgagcccgggaggagacctgttcaacaaaaaaaaacngaaaaaatggcctatttgccatttgcttaaaggagccgatcaaatcatggccggctttaaaaggtgggatggaaaacctgggttaccaactaatgcttggagaaatcccttttgccacgggcgaaagaaaggccccaccaaggttttcaaagtgccacttgagggaatggaattgagggaaatttgttaaaccggcaaattgtgaaacgctcttttacacaggcgcaatgtccttataatcgaaacccccctaaaggttggttgtccttccacaggcctttatacagggccttccatagggcccctctgagcgggccttccgagcacccctacaacttttgtggggcgtctcctacgtctatgggcctctatcgtcgggtctccactatcggcctccgctactccactctctcagtctgtctgctgccgctgggcgtctcgactccgccttcccctcttaccgcctctctacttgttccctcttcgtctccttctcctc

SEQ ID NO: 241510 - DNA, 1179 bp, Homo sapiens
cgggtgcggtggctcatgcctgtaatcctagcacttcgggaggcgaaggtgggcagatcacttgagatcaggagtccaagaccaacttggccaacatagtgaaaccccaactctactaaaaatacaaaaaactagccaggcatggaggcacacacctgtagtcccagctattcaggaggctgaggcaggataattgcttgaacctgggaggcagaggttgcagtgagctgaaatcatgccactgcactccagcctgggtgacaggtttttctgagactccatctcaaaaaaaaaaaaagtattgtgcaaacaattgcttacactgctaccaaagtaaatttgacaagtgaaatagttataactcgccaagttagaaaagtaaatggattccacattaactaaatatttaaagttaagatttttaaaatatggaagatagttacattttcacaataagtaactaaagaatatgtattttttaggattctttttagtatgtcctttgagtatgtccttttgttaacattcaccacacaaattactattaaaagtagtccaaacaagcctgggcaaatggcgtaactctgtctctaaaaaaaaatacaaaaattagctgggtgtggtagcacatgcctatagtcccagctactcagggggcctgaggtgggaggatcaattgagcccgggagggtaagttgcagtgagccgagatcatgccactgcactcaagcctgggcaacagagcgagaccttgtctcaaaaaaaaaaaaatgcggccgattcgggctcattggccaattgccctttggggggcggttacaattaattggccggctttaaacacggtggactgggaaaaccctggggtcccaattaaagcgttgggaaaaacccttttcacggttgggaaatagaaagggccccccgttcgcctttcaaacgtgggcaccttaaatggcataggaaatgcagggccaatattggtaaaaccggggaaaatttgttaaaaaggtctttttaaccacaggcccatatggcgaaaccctcatatcaacaaaaacaccccctaagcgcgcgcgtgtccctttggcaaaggcccttttcaagacggggctccctctcaggcgtcctttagggtgcgccacttggctcccccctgattttgtggggggccaccct

SEQ ID NO: 241511 - DNA, 756 bp, Homo sapiens
cgggtgcggtggctcatgcctgtaatcctagcacttcgggaggcgaaggtgggcagatcacttgagatcaggagtccaagaccaacttggccaacatagtgaaaccccaactctactaaaaatacaaaaaactagccaggcatggaggcacacacctgtagtcccagctattcaggaggctgaggcaggataattgcttgaacctgggaggcagaggttgcagtgagctgaaatcatgccactgcactccagcctgggtgacaggtttttctgagactccatctcaaaaaaaaaaaaagtattgtgcaaacaattgcttacactgctaccaaagtaaatttgacaagtgaaatagttataactcgccaagttagaaaagtaaatggattccacattaactaaatatttaaagttaagatttttaaaatatggaagatagttacattttcacaataagtaactaaagaatatgtattttttaggattctttttagtatgtcctttgagtatgtccttttgttaacattcaccacacaaattactattaaaagtagtccaaacaagcctgggcaaatggcgtaactctgtctctaaaaaaaaatacaaaaattagctgggtgtggtagcacatgcctatagtcccagctactcagggggctgaagggggagggacaaataaccccggaggggggaaatttcaataggccaaaaaatgccactggctccaactcggggacaaaaggagaacccttttta

SEQ ID NO: 241512 - DNA, 1119 bp, Homo sapiens
cgggtgcggtggctcatgcctgtaatcctagcacttcgggaggcgaaggtgggcagatcacttgagatcaggagtccaagaccaacttggccaacatagtgaaaccccaactctactaaaaatacaaaaaactagccaggcatggaggcacacacctgtagtcccagctattcaggaggctgaggcaggataattgcttgaacctgggaggcagaggttgcagtgagctgaaatcatgccactgcactccagcctgggtgacaggtttttctgagactccatctcaaaaaaaaaaaaagtattgtgcaaacaattgcttacactgctaccaaagtaaatttgacaagtgaaatagttataactcgccaagttagaaaagtaaatggattccacattaactaaatatttaaagttaagatttttaaaatatggaagatagttacattttcacaataagtaactaaagaatatgtattttttaggattctttttagtatgtcctttgagtatgtccttttgttaacattcaccacacaaattactattaaaagtagtccaaacaagcctgggcaaatggcgtaactctgtctctaggggcctgaggtgggaggatcaattgagcccgggagggtaagttgcagtgagccgagatcatgccactgcactcaagcctgggcaacagagcgagaccttgtctcaaaaaaaaaaaaatgcggccgattcgggctcattggccaattgccctttggggggcggttacaattaattggccggctttaaacacggtggactgggaaaaccctggggtcccaattaaagcgttgggaaaaacccttttcacggttgggaaatagaaagggccccccgttcgcctttcaaacgtgggcaccttaaatggcataggaaatgcagggccaatattggtaaaaccggggaaaatttgttaaaaaggtctttttaaccacaggcccatatggcgaaaccctcatatcaacaaaaacaccccctaagcgcgcgcgtgtccctttggcaaaggcccttttcaagacggggctccctctcaggcgtcctttagggtgcgccacttggctcccccctgattttgtggggggccaccct

SEQ ID NO: 241513 - DNA, 1120 bp, Homo sapiens
cgggtgcggtggctcatgcctgtaatcctagcacttcgggaggcgaaggtgggcagatcacttgagatcaggagtccaagaccaacttggccaacatagtgaaaccccaactctactaaaaatacaaaaaactagccaggcatggaggcacacacctgtagtcccagctattcaggaggctgaggcaggataattgcttgaacctgggaggcagaggttgcagtgagctgaaatcatgccactgcactccagcctgggtgacaggtttttctgagactccatctcaaatgaaatagttataactcgccaagttagaaaagtaaatggattccacattaactaaatatttaaagttaagatttttaaaatatggaagatagttacattttcacaataagtaactaaagaatatgtattttttaggattctttttagtatgtcctttgagtatgtccttttgttaacattcaccacacaaattactattaaaagtagtccaaacaagcctgggcaaatggcgtaactctgtctctaaaaaaaaatacaaaaattagctgggtgtggtagcacatgcctatagtcccagctactcagggggcctgaggtgggaggatcaattgagcccgggagggtaagttgcagtgagccgagatcatgccactgcactcaagcctgggcaacagagcgagaccttgtctcaaaaaaaaaaaaatgcggccgattcgggctcattggccaattgccctttggggggcggttacaattaattggccggctttaaacacggtggactgggaaaaccctggggtcccaattaaagcgttgggaaaaacccttttcacggttgggaaatagaaagggccccccgttcgcctttcaaacgtgggcaccttaaatggcataggaaatgcagggccaatattggtaaaaccggggaaaatttgttaaaaaggtctttttaaccacaggcccatatggcgaaaccctcatatcaacaaaaacaccccctaagcgcgcgcgtgtccctttggcaaaggcccttttcaagacggggctccctctcaggcgtcctttagggtgcgccacttggctcccccctgattttgtggggggccaccct

SEQ ID NO: 241514 - DNA, 417 bp, Homo sapiens
gctgagtgatttcattctgggagacatattcatacaagaggatgataaactggcctaattttgaatgaatggatgagactctgataatatgccaatacctctttactgttacaatcctttttcctgtaaaagatatgtggtcaaagaaaagtgggcaatctgagttatcacaaaaacatttagtctttgtccctggtttctcctaaaaaccttagactctcttgagtgataagagtgtctttagagtactgatgagaagactcttggctgagtggatcctggatatcttaagaacggtggctagctgccagagacacatacctgtgatgcgagggttatctttttccattttgtgttgctataaagaaatgtctgagactgactaatttatataaacgaggttcatgtggctcaaga

SEQ ID NO: 241515 - DNA, 439 bp, Homo sapiens
  misc_feature (28)..(29): n is a, c, g, or t
actactactactactaaattcgcggccnntcgaccccactgactttcttctggataaagtatcatcagattcttgtgtttcatcagaagacttggtttttgtacttttccctatccctttaatcatttggttatgatttagttttttggaatcttttattttgaaatttctttggaatttgttctttggaaagttttcaaattattttgaccaagattgaatgtaataccagtagttgcttaactagtgcttgtttgttttcttgtttttgctaatctatcaagatactctcttacctgtgtctttaaatactacagttaacacaaagtttatatttattcatacagatataaaatcatgctcatgcactttcttgtgtttggatttgtgaaaggaagtctttggttttttttttttttttttttgagaacgcccaggt

SEQ ID NO: 241516 - DNA, 252 bp, Homo sapiens
caaacattattggaataaaaccattgggaggggagggatgaggatactgccctgggctgacatcccctcaacttggccttggccttcctgccgcttctcaacagaaatacgaataaaaaaaccagaagtttggtcttcatttttccgattctccaaatttgttataatttgcaatttgtttcaaggactctgttttcatttcaactaaatccctaccaaaaaaaaaaaccataccaacacaaaaaaacatgt

SEQ ID NO: 241517 - DNA, 555 bp, Homo sapiens
aatcatatttattttaactgaggaattcacttaataggcctttgcttgacagcctacatgccaccacctaaagaacagatagataaagatcagttttacccttgaaaacctgtttcttatggaggagacaaatctgtaaaatagacacctgcatttcacaaattaggaattatttcaatgaatggaaagctcttaaatatgcatgaccaattttaaaaaaatcacattttagtaaaatgaacataatcattatgtaacacaatgtttttaatgattctgaaacccctttaagataccatactgccccagaatcattctaaaaaatcatcaatgatatgcagacatacgtatatgttaaaactatgtcctcgggccaggcgtggtggcacacacctgtaaacccagcactttgggaggccgaggcgggtggatcatgaggtcaggagatcaagaccatcctggctaacacagtgaaaccccgtctctactaaaaatacaaaaaattagccgggcgtggtagcaggtgcctatagtgccagctactcgggaggctga

SEQ ID NO: 241518 - DNA, 327 bp, Homo sapiens
aatggtgtattttaaaaatatttttataggaaagggaggtttttaaaaaatatctttataagtaagggaggtataaaatggtgcattgttctggaacatttactgaaaataagtttatattagtgtaaagtgaacgaaaacaatttttatctgcctgtttcacgttgcggattgacattttatgggtaagttttatagtgatttaaaatagattcccaatggaagattttaatcttatttaataaaattatgctagcatttaattatattgtgaattgtttgaatgacttaattccatccctcccttaaagtaacaatatgttcatt

SEQ ID NO: 241519 - DNA, 123 bp, Homo sapiens
agtgatgtggggagacagagagacccaaggagacttttggtagaggacacccccagtagatgctaaaaaagacttgatccacacatgcctctaacttgttgaacaaataaatatgtatcaagc

SEQ ID NO: 241520 - DNA, 433 bp, Homo sapiens
tattattctttggtagaaatgtactggaacagctgcctgctccctgctgttctgcatggaattatttcctggtactatccccaccgtgaaacgaatttcactacagcatctccagacaaaataaagaaatggagccctcgagaagttaagcagtttgcccaagatcatacagctgcaatttgtattgcaacaaaatttgtgacctgcctaaattttcaccatcattcatatttctgtcacactctggatcctccatctaccaaaaatgaatatagtgacatggccacgcacctgaggaatccttttacttcccacaggaggaagagaattcctcaaatcccacaaaggcaactcttcttcctgaagacagcagctttgccagtaatgagggcaacattcccaatacaggttggtggtcaagtgacttttgtga

SEQ ID NO: 241521 - DNA, 636 bp, Homo sapiens
attgctcattagagaaatgcaaattaaaaccacaatgagattccattccacatccactagaatggttaaaattaatgactgatattaatagcatcaagtgttaacaaggatgggaatgcaagatgttgtagcctctgcagaaaacatcgtgacagttcttgttaacagaaataacagtcactatatgatcaggcaactcattcctaggtattttctcagaaaaaaataaaaatatcgattcacacaaagacttgtacttgaatgttcatagcagctttttttcataatagcaccaagctggaagcaacccaaatgtccttggataagccaactgtggtttatccatacaacagagtactattagcaacaaaaagggctgaacggtgaatgcgtactagacctcatactgtatcattccattcatgtgaaattctagaagaggtaaaagtttattgatagaaagttgatcagtggttgcgagggcctggagtgagggtaaagactgactgcaaaaggacatgccaaacatttttgggataatggcaatcttctatatcaggcttctatagtggttatgtgactgtacacattgatcaaaactcattgatgtgcacatttaaaatgagtgaattgtat

SEQ ID NO: 241522 - DNA, 388 bp, Homo sapiens
ccaccatgcccggccagtgtatcttattgtaacagtgcagttacacgcatagattgaatcagcttccttaacctccagcatctaccggaaaacacctctcttctgggtttgtagtgtaatttgatattacactacaatatcaaattagagatgaaccagaagctttttggagtatggatagacaaagtcattgggatattacatgtaataaagtttgaaaacaatttctcagaccatttcatctgcttttatcagacagacctcactatatagataccaattgaactgctttaatctttactagtgtttcctgcatgtttataccagcttttctggttttgtgactcctccttccctccttgtctgtgagctgtcacttactgatgat

SEQ ID NO: 241523 - DNA, 532 bp, Homo sapiens
cagtcagatagaatatgctcatgtattattatgatttttttcaaaattcttagatttcagggaattttgaaacctggaatgaggaaaatctagtctatatgattattgagtaaaaagaaatcctactgacagcctgagatggtgagcaggaggtgatgggcaattagccttcctgcacctttaatcagtctttgcttgagtgagtcgcgccgtcagctcagtggcatgactcactcgccttactcagactcaggtcgctgaattgtacagagaagagaatcaggctcaactgacagcactcagcattgtgtcacctgtgccgtggaatactatgtagcttttaaaaagaatgaggtaaatcaatataaattcagatgaaaagatagctatagtatatatgaagtgaaaaaggaacttgtaaaatttacatatatttcattttatataaaatatatagtttgcgtattttttgaattatgtatgctaaactcttaaagtaaataaaatatctttggggtggaatgatggataa

SEQ ID NO: 241524 - DNA, 1016 bp, Homo sapiens
actaaaactcttttttggaaggctgtgcatttggaatccacagtattacaatgatttctctcagcagatacaagtgatgtaagtctcatttgttgaaagtgtgtggtgccagcttaagacttaaggggaaaatcacagcactttgaaaaagatgtaaatgttcaattggtaaaaaaggggaaaaaaccgtgctaaaacatgtgcctatttccattatgcttaatttactattcaaaacaagtttttcctaataagctctattgtttctttctgttttgtaaaatttaatatgtgtgagacaaaaaccagattcagaatgtgaatgaagtctgtttagcgaaagattgtgggagcttacagttcaagaaggcctcaaattaaaagaaacatcatcttctatcaccaaaaagatacaaagaagcaagtttcttgggtcatttctaggaccagttcctagattgccaacttcctccatcctcagagctcctcatggatgaattcacacactttaaagtgcaccaagcactagaatattcagaatgattatgccacgtttatttactgcatagctgtagctttcatcttattgtagtcctcttttctctgaagcatcaatcccctaataggactgaagtaagttctcaaacatgttatccccttgtcctgactatagagggttatgtctatctcaaaatcactcacacattttcagagaatctgtacctgattatgcaaccctttgacgtttaacccatctcccatggttgaatgtccccttggaatccagaaggcctggatatcctggcacttgcccatgtgtcctttgttgtttagggctataccatgaatacattcaaaaactatcttgttaatatcctttggaaggactgtaaaaataatgacttttcactttaaaataattcaaggaatagttgtttttaaaagaaaatgttaaagactgcctaattcaactttctttttgtgtggacaaaacaaacaataaagaaacaaacaaa

SEQ ID NO: 241525 - DNA, 489 bp, Homo sapiens
ggtttgaattggagcgtgttaagtgtagtgtcttcttcaccactgtgacgtgaggtcctggcgcaaataattgagcacagaaatacatgtcaggcattgctaggcacaagggtacagccagtgagcagggctgccatggtccctgccctcttagagctgaccttcaggtctgagggagactgaaaaataagtaagaatacctccagccgggcgctttggctcacgcctgtaatcccagcactttgggaggccaaggtgggtggatcacctgaggtcaagagttcgagaccagcccaaccaatatggtcaaaccccatctctactgaaattattaaaattagctgggcgtggtggtgggcacctgtaatgccagctactcgggaggctgaggcaggagaatcgctggaacccaggaggcagaggttgcagtgatccgggatcgcgccactgcactccagcagcctgggcgacagagggagactccatctc

SEQ ID NO: 241526 - DNA, 458 bp, Homo sapiens
tcactttttacttgaggctggccaaaacttgttgtccctattgggaagtttgagatagtgggttctaagaagtatctgtaattgctgagctgaccactgaagacccagtggtgttgagttagagaaagggagtaaggagtaggaagtaagaaaactgtctttggggtcagggcccatcacctggctcatgcctgtaatcccagcactttgggaagccaaaacaggcagatcatttgagctcaggagttcgagaccagtctgggcaacatggtgaaaccttgtctttacagaaaatacaaaaattagctgggtggggcggcctgtgcctgtcatccctgctactctggaggctgaggcgggagaattgcttgagcccgaaggcagaggcggaggttgcagtgagccaagattgtgccactgcactccagcctgggcaatgggagtgaaaccctgtctca

SEQ ID NO: 241527 - DNA, 335 bp, Homo sapiens
tgttctcttttcctagaatgtttccttttcttcttagcctggtaaagaaccattcacctttagagatccaagtcaagcttaatcacttaaccatagcccttccaatgttcatttattatagcatcaattttgtctaataattacttttgtccatgcttatcttttcactagattattattcacattaattttggatcttccatgtctaggaatgcaagtgggtcatactttacacataataatgttgattgaatgactggataattgaaggaatggatgaaatgaatatgtttgatctagaagatttggccgctgattttatatgcgatatatag

SEQ ID NO: 241528 - DNA, 218 bp, Homo sapiens
ctgtcatgataaatgcaaagcagttccagctataaatttcacctaaagtacagtaaaaggaccggccctgatggtggaatttcagagacagaggccaaggcagggaacagtgctgcgggaatgaggccctcttagatgctttgaaattgtaccaggaagaccacagcccctgaacccagttcagagtggagacagcagggcagggaagccctcacacc

SEQ ID NO: 241529 - DNA, 643 bp, Homo sapiens
tataagacatgatttacattgcagtaggtattgagtagatttttaagtatttgaaatactggaagtttgtgaaacaaatgtactaaacaattcctcaatgatacgagtttatagacatttgtctaaatttaaattatcatatttttaccaagtgagtgttacacacttttaaaaatacgcttcaaagtgaaatgagggattttctttttcaaaggaaacaaaaatactgttgttataatttcagagaaatgatgaaagtttcaaagaagcttggaaggagtaaaggggttatgccaaaattaatttctgacgggttttgaaacaaaaataaccttcccagttgaagagttgaaatatcagaatggaagataccgggacaagaatgacttaatcttaaatgttaatctgccgtgtcacttctaactaaccccaagtctgggaatgcctccaaaatgttgttgataaattactctttatgcaggaacacctattcaccgtaagttttcttccaaacaacccttgatgttgttgcagaaatcataggctgtgataccttagctacctacacattccttccagagcacatatcctttttccccaaacacaatccctgggtctagggggttatggtgtggcaatctac

SEQ ID NO: 241530 - DNA, 277 bp, Homo sapiens
acataaagcaagataaacccaccaccaaatgagatattaagacaacatgttttccaagagacaggaacatcacagaagacttcaggaaggaaggcagaagtatttaaggatagctatgctttcattaggcagaaacacaagtgaaacagtaacagttgacatttactgagctcttaccatgagatgtactaatcacttttcatgtaacaacatatttaatccttacagccacttcaggaggtaggcattaatactatcctcattttatagatctaaa

SEQ ID NO: 241531 - DNA, 465 bp, Homo sapiens
taaatcagacaaatctcttattcttcttatatcatgcaagatatactctggaactagtttaactgccattaatatccagtaagaacaaagcacacctctttgtagttttatacagcaatgttacaatttcccactggatttcaatgtaaataatttctatttgccaatataaaactaatctactggccaggcgcggtggctcacgcctgtaatcccagcaccttgggaggctaaggtgggtggattacctgaggtcaggaatttgagaccagcctggccaacatggcgaaatgccgtctctactaaaaatacaaaaattagccaggcatggtggtgtgcacctataatcccagctacttgggtgggtgaggcaggagaactgcttgaacccgggaggcagaggttgcactgagccaagattatgccactgcactccagcctgggcaacagagcaacactttgttt

SEQ ID NO: 241532 - DNA, 414 bp, Homo sapiens
aatactgttcttatcacaagaataaagacaacagagatttaaaactaggaatgaacctgacaaataaggttttgatttttctccctagcctagtggttctctgccctggctgaactttggaattgatgcctggggcctgtcaccagaaattaattggtgccagtgggtctcaggatatttaaaagttccccaagtggctctaatgtacaaccagccagtgttgagaaaagtcaccgtgctagagaaatcaataaaagacctccagaagtctagttatgaagacacaggctgggtacagtggctcactcctgtaatcctagcactttgggaggctgagacaggtggatcacttgaggataggagttcgagaccagcctggccaacatggtgaaaccccgtctctactaaaaatac

SEQ ID NO: 241533 - DNA, 802 bp, Homo sapiens
acttttgaactgtggacttttgggttaatgctgaaatgatttaagactttggggtactgttgggaatgcatgattggttttgaaatgtgaggacataagatttggaggagccaggggtgggatgatatggtttggctctgtgtccccacccaaatttcatcttgaattatactcccataattcccatgtgttatacgtgggacctggtgggagataatttgaatcatgggggtggtttcccccatactgttctcatggtagagaataagtctcatgagatctgatggtttcatcagggggttccgcttttgcatcttactcatttctcttgctgccaccctgtaagaagtatttttaacctaccgccatgattctgaggcctccccagccatgtggaactataagtccaattaaacctctttttcttggcttaatttcttgggtatgtctttatcagcagtgattctattcctatgaaatgtctagaacaggaaaatctatgagacataaagtaattaagtggctgttcaggggatacaggaataggggataataactaaagggttgggagggtgtttttgaaatgctaaaatattctgaagtttactgtggttatggttgcacatacttatgaatatacctaaaaatgttgaattgtacattttaagtagatgaattgtatctaatttgaaccatatctcagtaaagatataaaaatgtttttgggtactaagactaaactagaaagaacataagaggaaatacatattatataagaagaaaagagtaaaaataaatcttt

SEQ ID NO: 241534 - DNA, 415 bp, Homo sapiens
gcagatctccaggtatgagtctatctcaacaacattgtgtttgtctcatgatggatgctactcagccctgagaccgcaactcaactcaaaggaattgccctgagattttgagactctgtgggagggcacatgatggaacctgttgctgatcagatacctaaaacacaaaacacataaaaaatcatgtagaatgtaccttaaagttctttgagtattcagccatttggagtgacagataaaataccagtaaggaaacaatgtttgtctaccacacagaaaaagagaaacttgaaatttgggctcatcagtggctcagaatctcactcttctaaatatgaagttaacctgaccattgtgaaaagccatagcttggaacagaagaaactctaattaaacagagtctagtaaaattaaa

SEQ ID NO: 241535 - DNA, 399 bp, Homo sapiens
caaaagcaaaagaaccatcttgctgacccctttcacccacagatttgtgaaacataataaaaatggtagttatttcaatccacttactacttgcgtagtttgttgtaaaacaatggacaacgataacatattaaaagaaaaaaatgtataaggttatctttaagcttacagagaacccatttggaaaaaaaatctacatttattcatgattttaaaaaattctgaagcaaaacttgggatcagagagtagagttaatttccttcatctgataaaatccacaacaccccattataagtgatagcaaatccccattttgagatcaagataaagacaaaaatgcccactattaccactttttatcagaattatactgcaggttccagtcgctgcagtgaggc

SEQ ID NO: 241536 - DNA, 1997 bp, Homo sapiens
tgaaaaagatttgaaacagttggtttggacaacagctgagtcacacaatgactgtgagtgaaaagcaaaaactggttctgtgcccctcacagttctggttttgtacatcatgtggtctagctatgggctgtacctcttgcacaatatggagaggacattcagacatcttcaactgctcatctgcccctacggaccagacaggcttgaaactataggaagatgcatttgacctttcatttttcagttcagtagaatttaatatggactgtcagccgctgcggtgatcatggaagtagacctaagagaaaaaaacttgtgcaagttcacacgtggagtagtatatgaccatggtttcagagaactgaagcagttctttttagattcttcaaattaaatgtctccttggtgtatttaaacctgctgttactcacaggccaggctccaccaagctttcctacacacttcttcctgagctgtgaccattctcctgagcaagaggctgcagccagcctgggctggcgggcccatactgtctctcataggcattctctccccttgacctttcacctccgtaaattcaagagggtgaaaggaaatagagtgcactgtcaaagataattgggagagaaacacgaaaaggcctcgcagtggggatcttaaattatgagaacttgtgttttctgtgttgtgcctgctcctcattggcgtggatggttggtaggggcattctgcccgtagcgtctgaagtggtcttttggaaaagatttggccccttcatgttgggattccaggacttgccttcatcctcaggttaatattctcctgtgattgttacaagctctctaaggcatagttgcatttattgccttacagctgcgcagctgccgcaccgtccagataggtagtttcacattctcaggtgggtcagatgaccttgttagcgacttgacagacatgtcctggatgctctttgttcccaggaggctctcaggtcctcccccagggtcctgtcactcagccacctacagggatggggagacagtgaggctggctgataagccataaagtccttgactaatcctggtttcctggttctcacacagtggtaacaagggcttgcagccggttgtcagccaacagactgggaagggtggtgcttcttacaggccctgataacaggagaagcctaaatgacaagagaagagacagggaaagcataaaaggcaggcagattttcacaggcacagcaattgaaaatgattctgtttagaaggcagacattctcccacacccttgaggcccagggctcactgctggtgtacagcatgaagtggacaggagagttgattcagtccatgaacatttcaggaagttagaagtctatagttgtggattgcaaaatacatatctggcctgcctcccatttcctggctccagtgatgggcagcccctacgaaacttcagggtagggctagtcacagggccaaggcaggattagagggtttcagccccaccctccaattttcccagagtggagagggactgaagattgagctggtcaccaatagccaataatttaatcaatcacacctataccatgaagtcacacttttgccttcagtagttaacagcatctacagccccgtgtttccacatttgtacaaaggaatgttcagactgaaccacacttaagtacaattttgaaacagcatgaggctgggcgtagtgcctcacgcctgtaatcccagcactttgggaggctgaggcgggtggatcatgaggtcaggagattgagaccatcctggcgaacatggtgataccccgactctactaaaaatacaaaaaaataggccaggtgtggtggtgtgcacctgtagtcccagctacccgggaggctggggcaggagaatggcgtgaacccgggaggtggagcttgcagggagcagagatcgcgccactgcactccagcctgggcaacagagcgagactttgtctca

SEQ ID NO: 241537 - DNA, 591 bp, Homo sapiens
gtctttttgtaccctaatgagttgaccagtgatgggcagcccctacgaaacttcagggtagggctagtcacagggccaaggcaggattagagggtttcagccccaccctccaattttcccagagtggagagggactgaagattgagctggtcaccaatagccaataatttaatcaatcacacctataccatgaagtcacacttttgccttcagtagttaacagcatctacagccccgtgtttccacatttgtacaaaggaatgttcagactgaaccacacttaagtacaattttgaaacagcatgaggctgggcgtagtgcctcacgcctgtaatcccagcactttgggaggctgaggcgggtggatcatgaggtcaggagattgagaccatcctggcgaacatggtgataccccgactctactaaaaatacaaaaaaataggccaggtgtggtggtgtgcacctgtagtcccagctacccgggaggctggggcaggagaatggcgtgaacccgggaggtggagcttgcagggagcagagatcgcgccactgcactccagcctgggcaacagagcgagactttgtctcaaa

SEQ ID NO: 241538 - DNA, 353 bp, Homo sapiens
agttccaaggcccagaccttcttccttttggtttcccagaagccagaagaaaagttcaatagaggcccccgtgtggtggctcacacctgtaatcccagcactttgggaggccaaagcaggcggatcacttgaggtcaggagttcgagaccagcctggccaacatgctgaaaccccgcctctaccaaaaatataaaaaattagctgggtgtgatggtgtgcacctgtaatcccagctactcgggagtctgaggcaggacaatcgcttaaacctgggaagcagtggttgcagggagccgagatcacgccactgcactccagcctgggcaacagagcgagactccatctcaaaaaa

SEQ ID NO: 241539 - DNA, 383 bp, Homo sapiens
tagttctttcttgactaattctagctctgttcaaagtcactcttaaagcaaaaataacattaaaagtaaatatttttacatgtaaagacaaaggtagttttgtaactttgttacaccgtgtatttgttcagagggctatttcactgctcaatgaagatcccatagtggcttaaaggaaatggagatgtaccccttttccatgtgatcatcccaaagtaagtagtttatgactgacacgatccttccagggtgttggggaaccaggctctttcagtttcacactttgccatcctgaatgcataacttccatcttgcttaggttggcagctccagactccatctctacgttgcgttgtctaaaggtgacatagccagggcttgtc

SEQ ID NO: 241540 - DNA, 2029 bp, Homo sapiens
tgctcctccttccacctctccgattccacctcctcctcgcaccccgctgggaactcctccaggggctgagattggattcaccgagcctggtgagaatgactcaggagtggttgtccgagggtgtgcccctgcggttcctgtccgagtagtgttcacgcgtgcccagtggtggccgatggggtcacggcccctctccccaccccaggcgcgcggcgatgggatatgaaccagtcactgcctttgtgctttcctcctctctccgctgccccggtcaaccagcggagagtggggaactgcgggcaggtcggcggagttagatggcagcaaaggtgggccggcttggtgtgataaagttccaactgggtccttccgcgagccctgggtccataagatgtcatcggcgagcgctggacttgaccgtcaacttgggattgttaaggtaaatggtgtctccttctgtcgccaaggcggtggcatggtctcggctggctgcaatctccacctccttgcttccagcgattctcctgcctcagccccccgagtagcagaaattacaggatttgtcgctgatgccttacttcattcactttgtgaggtcatgttttcctggatggtgacaatgctagcagatgttcttcagtgtctggacattaaaactttggcatgcagcaccacataagatgtgaaaaaaagattttttttaaaaaaaagatgagcattaattgtagacttcactgtgtggggttattcgtagctatctttcttgggaaggatttccacatatttgaaaagaacccagagttgatctctgcaccacgccatcactgctggtggtgaggaaatggtgcctctttcagtgatatgaagttaaaaccaggagggaagatcagtggagccttctttctgccatcttgtgttacctttgcagccaagaatcagaatgaagaactttcaataagaaaagctttcagaaccaggaaggacgtagaagatgtcctggttctgtacgtttaacattggactgtttcttcaacttaggtgcataacagtgactaatcagggattatcatagataatttgacttggaatatagagttcattcaaatactttatctagacaatttaagtactggctgatttggcatgaaaatctgacaaactattttcttggtattcaattgatttttactctgtttgctgtagtagttttataaaccaatcagtcttcattaaagttctgggaattcttaccctgttcaaatgatatgattctaacgttgtcaaaaatctgtattcaagaatacttctcaggaccttttccatcctttcatgaaactccttaaagatacagtattctataattttgcaagcttgtaaagttttcagaatttgaaatgcctcacaattaagcaatttactgtagaaatgattttaaattttcatagacacagttgacaagaaaattttattatttacaggagtgacccaccacaccaggcctctgaagttcatttaataaaattttataaataaatttatcaaatgtgtcatctttgaatcccagatttttgtgagcctatgctttagattttcccccaactttctctatttatctagttgtatctattttttacttcttcaatttgaaaccttaagtaacttaaaaaaattaacacattttttgcctttataagttttctaatcaaaagtttatcttcacaagtctgtaatcccagcactttgggaggccaagacaggtgcatcagttgaggtctagggattgagaccagcctggccaacatggtgaaaccctgtctgtactaaaaatacaaaaattagcccagtgtggtggtgagcacctgtaatcctagctacttgggaggctgaggcaggtgaatcgcttgaacccaggaggcagagtttgcagtgagctgagatcatgccactgcatgccagcctgggcaacagaacaggactcggtctaaaataataataataataacaataaagaatcatatcttgctttttc

SEQ ID NO: 241541 - DNA, 398 bp, Homo sapiens
tccttctgctgcaaagaaatggtcataattccactaaatatagatactcgcacaccctcaacatataatactatatactcacaggtgcagctcaaattatgactttctagctgagcacagatttagactttctttccttttttagcattgccttgactttgtgactttaaaaaaaaatgctaagcgtattttgcttttttcctatcacaacagctcttgttctgtgggaacaggagggctgcagggagcctggggagaggagtggggaggggcgcgcatgacagcagccagggcctctggtggcagcttctattattcttccctgcactctatttgaagcctggagaaagagaaactgctgggctgttcactgggctgtgtggcagtgggaaaggaga

SEQ ID NO: 241542 - DNA, 553 bp, Homo sapiens
gactgggtgtatcagagccagatattgatgaaaatgcatttgtacatgttctgtactccggactgaattactctgttgccagcaataagccagggcacaaactgttcaagccttgattatcaatatgtgtgcactgggagtaatacatactagtattgagagcagtatccgtgcattctgacctagaatgactttagctgtgggggcaggggggtctcgatgattaatgtgctgtataaataataaacattttttaaatataaaatttttaatatttaacttaaaagacaaacataaaaagtgaaatgctttgtattttgtggttaacgtcccttattatccctttaaaatactgaaattctatgagtttcacttttagtattaccacagtttttaaaacgttttgaagactacatatcaatggcatattaaaatgtttctgtaatgttgtatgtttaataaattctgtggttgtttgttaaatgttatatccctttattctcagtttgattttgaaaattcatctacattaaaaacaaaaatactggccaag

SEQ ID NO: 241543 - DNA, 421 bp, Homo sapiens
ctcaatacaccatccttcttggccttaatcctccctccttccctctgctggtgttcccgcctccatcgctgacccgtcgctgatttttacttccacgtcctacttcccttattcatttcctcagaatgttttttatttttttgcttgtttgtttttttttttgagacaagtcttgctctgtcacacaggctggagtccagtggtacgatctcggctcattgcaacctccacctccagggttcaagcgattctcctgcttcagcctcctgagtagctgggattacagacctcactttccttttgctggccagaaatctgctcccagcatgtggctgtgctggagtctctctgaatctgctgtgattatgggggctgccagactcaggaatcgttcattgttaaactcctttaaatttaattt

SEQ ID NO: 241544 - DNA, 646 bp, Homo sapiens
ggggtttcaaagatacctcttgttggcctacacattctctctatgatgagcagcagaatgcttttatgccatttataagtgctccaaagtcgtcgcagctccatttctgaagctactaaaatgatatttacacaagcaattctcaattggtttcaaccaatcgtgcaggtattttgaccaatcaaaaatagaggccattttaaggtttttatttaaaatatttggtatatacagtttcttagttcttgcctaaatgattaatagaaagtaaaatacttaaatgtattacgtatgccacaaatgaccactcttgtaaataagtttgttataaattcattataatctgaatcatttaatgagcagattcaaaataaattgtttgcatgtagcatttctaagcttttattctcaatgctttcagtgaaagaaaaatcctaagcgctcttatttttataattaccctgcataaatgttggagatttatgaaggaaaagaaaagaaattaagtatggcaaattgacagtcattctgtattccatgcaaatttattgcaggatacttttaagtgaaagggatttgtttcataaatttaaattttatgatatacaataataactatttaaaaataaatgatgatttaaaatat

SEQ ID NO: 241545 - DNA, 560 bp, Homo sapiens
ctcagagttgtttgaagagagaggttcccaaacagttttaccataaccttagttcactgaatgttttgtggtagaaacactgactagtaagttcagtaacaatgcatggctcagattgtggaatatttctgatttaaatgtaatctgtagtacttcacacttcagatttttgaaccttttaacctacaatactgggcttcatttctgttatgccctaatctagtcatgctgaatatccatactgtataatggtagatgcaaaccatgtttactaaattagaactacatatgaattacagtttacttcaagtgttttgttttggtaatatagctttgccaccaagcttttacagttttccttgaatgtacagagactttttattctaataaccagattacagttatactatttctaaagctcagctcttattacatcaagtttcagtgatgtgttgaagtaggggaactttatatggcatttcaaaacattttcataatactggaattttatttattgtaaaatatttttgtctttaataaaataattttgaatgaagtca

SEQ ID NO: 241546 - DNA, 369 bp, Homo sapiens
tagaagtatgttacttattttcaaatatttgggaatttccaaatatatgtgaattttctatgaacatttgaaaagagagtatattctgctgatgttgggtggagcattctataaatattaactggcccaagatggttgatagagctattcaggtcttctgcatcctgtattcaggatgatagcgacattaagtggagggaggtgaggatcatatttggatggtggatcatatttggatgttggattatggctttcagtaatgagcttaattattacatttttatacattttaaaaatcccacaaataaggcatgaaccaatggtcagagtgtgttatgagccaaggattatgattgctatttctcagaa

SEQ ID NO: 241547 - DNA, 491 bp, Homo sapiens
atcatttatgccagtaatgatagtttatttggatgataattgaaagtgcaagagactctaataatgtctactttccaatcactttttaaattcatttaaatatattttggagaacctactgtgtgccaggtattgctcggagtgctaggggaagagacaatgaatagaacaatcccctgattttacaacacttacactctagtggaagaagggagacaataagcaaatcaatgagttaatatatcatatgttggatgatgaaacgttatgaaaaaataagttatggaaaaacagccatcctgagatggatcaagtggtgaggagggggtgctgaataaatgtttatataggatgatatgtaaaggtagatatatagacccaaaggaataaatggaagggagggcatgagccatgggaataactattatgaaaagtgtttcaggcaataccctgagatgggaacatatgtgatttgttaaagaatagcaaga

SEQ ID NO: 241548 - DNA, 1911 bp, Homo sapiens
  misc_feature (892)..(892): n is a, c, g, or t
  misc_feature (960)..(960): n is a, c, g, or t
  misc_feature (1461)..(1461): n is a, c, g, or t
  misc_feature (1625)..(1625): n is a, c, g, or t
  misc_feature (1821)..(1821): n is a, c, g, or t
ttattatatgcaaataatattttcccgccatcgttatggaaaattctatattttgtcaacgttcattttcttctcaaaagccttttgttattatttccaaatgaatattatgtgtgtctcagacaaccacagaaagttttgtttttgtcacattctactgctactgtgtcaatggcagcattttgatataggtggagggatgctcacatcaaccccataatttgtgtcagcttctcctgaagttatcagaagcatacaatttaagtaaaaacagtatcttcgctatccaaatgatgttccaaggtaaatctcctcagatcccttccagtacatgtatgctccaaggcctgctctatgtagaacttttggagccatcaacgtactgcttgaggttgctttgaacaaaaggtatttgacataagctctataagatcagggactcttttttattttattcattgttctttatcttctagagcaataatttgcaaaatgactatttattgaataaactaggacggaggtgaaaaggaaagaacagctcatccttccaaggggaagagagcagtatcccaaatccaaattgaagaaaataaacatatatctattcaccagaagagatagaagggagacagggcagaatttctgtggttcttactatctctgtcacctctacaggccaaaccagtgaggaccttggagactactaatatcactggatttgtgaatgagttcatcctcttgggcttcccctgccgctgggagatccagatcctcctttttgtggtcttctctctcatctaccttctgaccctcctaggtaacacacccagctaatttttgtattttttagtagagacagggttttgctatgttggccaggctggtctcnaactcctgaccttaaatgatccacacacctcggcctcccagagtgctgagattacaggcatgagccancatgctgggccaaaagaagtttattgctcacttaaaatctgaatgggtgctcctgattggcaggttcttcaagtgctgattctggaattcaggacttctctttgacttcatcatcttcataaatgtctttcaatgtcattgtgctcaatggtatcaaaaatcatcaaggcccttgtatgggtagggcctgaagtgttgcacagcagttttcattgttttctctgaactagaactcggtcacatgaccacacctaactccaaaggggacccagaaatgtgatctacacttgaaaaagaggaaatggatttgtctttttcacacaattgatatcttaacttctgagttgactaacatctaccttgtttgatctatatgtggagaaaaagagtttataagaaataaagatgggtagctctgtggatttctgggcataagatccttctggatttagtgggcaagatcttcaaactgccaattgggcaacatggatgaaaaatttngggtcttgtgaataatttaaaaagcaaagaaaaagaaacttgacattttggagacaaacctgtgtgagtgttttattggtacaaacgtatttaacactaggggttttgtacaattttttgccttttctactagaaaacaatgtaaagtgatttcacaatgtgangagaaaaaaaaattgccgctgtgaccaaacgcacagtctgttgtgcagcaacaatgggcttcgatcaactcagtcgtgattcagctgtagaaatgcttttccttcaccttgtttgagcttttcctttctttcctgttttgatttgcaaaagaaaatgtcttttttgtgtgaacttgtgttgtactctgtagaaaantacgggttttactttaatggtttaagaaaaaaagcaagaagagccctcgtcgcttttcttacctcatcacagagtttgtgtagtgaattt

SEQ ID NO: 241549 - DNA, 607 bp, Homo sapiens
tactttgtctttcatagactgctctttaatttggtaaagctctggtaaattattttcttttagagagttcttagaggcttctgttgtggagaacattttgggtatatttcaaaacagttacttgtccgaccagaaacacaaggtgatttttttggtctaattttggtcacttcctggggctttcaaagagctgtggggtttgtttattttttgaaaataaatatgagttttctcctggaaggtcattccacagaggcttgttctaaacaaactctttttccagaatctagaacctatacattgaaattaaaaatgaaattgaccagttctttagacatacagtcctctgactctgactctcttttttttttattagcaaattgaacccaaagaaagagaaaggtgatagaatatagatcagaagaaacaatccacaacaatagaaatgataaaggagtacataacaatagcaaagacgcaaaagctttgcacgcagcatggttatgggtactattctactgaagataacaagaatcttgaatttaaatcaaacaaataaatgataatcaaaacaaaacaaaaactataagcatcactgagcagacaa

SEQ ID NO: 241550 - DNA, 512 bp, Homo sapiens
gcattctcttaaaaagagaaaaatgagaagctatctcttctctcatgttaggaaagaggttgggtgggggaggggcggtttgtgagatcagggagttgagtggtttccaagagaagctgtgtaccctgcccctcagatagaggcccaggaaggcggcaagcccacaaagagagaagggctgcttggagggggccaggcttatgaagactgtgataggccatcaagggaatcaagaaagagcctgaaagagcctcacttaccagactgacattctatgtggaccaacggccagcgaccaaaaaggttgatatctactgacacaagtaagccaaagaccactttcttctaccctctctgctgaagaaagcaagaaacttgatgaaacaggaggacttggattaaggcagaatgaaacataaacatataaatttccaattgggttgaattatttacaaatatatatttattaatctacttgatttgtagaataaaatttatatatactccctggc

SEQ ID NO: 241551 - DNA, 425 bp, Homo sapiens
acacaggctttacatctacttgcttgcattatttagcaggaattgctttctgcgagaagctaaaaattgaagatgtcccgaacacagcgttcatactgtgagctggatctccttgtagggcttcaggcacagagtgttggatgcactgtgtgatgaattggacacgtagcatggcagtctgctcatgacacagagggtgggtggcttagtcatggctgaaagcaaagcagcattgttgaacagttaagagaaatgaacttattcacatcattggagggaaaaaagctttgcttatgttaagcagcgaagattgttatcatataattgacctttggggtagacaaacactttgaatatttccccgcaaaggcatccacaaagcagttataaaatgtagaatagagtctgctgccaagggtgttaaa

SEQ ID NO: 241552 - DNA, 479 bp, Homo sapiens
gcacgaggttttgagagccaattcagttataatgaatggttttaatttactttatattaaagggtgctgataaataatgttcaattagcattctttgggttctgagttaaatgctatgaaactcttatggtattggagaacataaccaataattttcaggggactaaattaaatattcaatatgtttaaaaatgagggccaggtgcagtggctcacacctgtaagaccaaaatgggaggactgcttgggcctaggagttcaagaccagcttgggcaacatagcaagactgccttgacaaaaatttaaaaattagctaggcgtggtgatccatgggtgcctgtagtccaagctactcaggatgctgaggcaggaggatcaaggctgcagtgagctatggtcacgccattgcactccagcctgggcaacagggtaagaacctatctctaaaataaataaataataaaaaataccaaaaata

SEQ ID NO: 241553 - DNA, 518 bp, Homo sapiens
aacatatgttgggaatttggatggggaaggatgtagaacagattgctttgagacagaaaataatgcaaaaagatgaagggaagtgaatacacagtaaaaatatgttagacaccaaagattagcttcacttacactgcagtttttgtgggcactttgacacttagaactcacctggctgttgctgtacagcaagagaccatgtgaactgaagcattggttagacctatacatttctacaaaccgctctagccctagttgaacttgggaaaataaatatctgtatgaaaaagttgtctagatctgttacacaattactatcttgtttaattgtagaatgcatgaaattggttgtaaaatggcctggttaagagtctcatgtcagggccaggcatagtggctcatgcctgtcatcccagcactttgagaggctgagatgggaggatgagatgggagaggctgagatgggaggccaggagttcaagaccagcccaggcaacaaggcaagaccccagctctac

SEQ ID NO: 241554 - DNA, 183 bp, Homo sapiens
ggagagttaagattgtggatggaattaagattactaatcagatgatcttataatagggagattatcctggattatcctggtgggcccaattcaatattttaaaaggtaggcaggaaaagagagggaattgtgactaaggaaactaaggggcagtagtcagagggatataacattgcgttcttt

SEQ ID NO: 241555 - DNA, 155 bp, Homo sapiens
aagccagagccctgggctgtcctggacggccagcagggggcttgctggcatgaacccttcacagctgagcctgtcagggtgagggcgtgcacaaaaaagtatccacagatgttgtgcagtagaaataaagaaacattctaaccttttaagacaaa

SEQ ID NO: 241556 - DNA, 497 bp, Homo sapiens
agagatgttattcttccctgtttgcggtacatggaatgtgtagaagaccatattcggaaacacagactatggagatgcagaggccttgagtttgaaactctgtattcctgtttcttcgctctgtcattagtgatatgttatccaactaactaactcagttaccagggaatggttctgtggtagagtctgtgagagggcataaaagaaatctctgctggctgggtgtggtggctcatgcctgtaatcccagcacttttggaggctgagatgggtggattacttgagcccaggggtttgtgcctggccaaggtagcaaaatcccatctctacaaaaaaatatgaaaattagctgggcatggtggcacgcacctgtagtcttggctactcgggaggctgaggtgggaggatcgcttgaacttgggaggtggaggttgcagtgagctgagatggcaccactgcattcaagcctggacaacagagtgggactccgtctcaaa

SEQ ID NO: 241557 - DNA, 339 bp, Homo sapiens
gagcatcgtaggacactaacacctgtcccacagcagttctctgtgttcaacacaatttggaaaccatggctgcagccttgctgtgggaccttccccttctgtgggtgtgacaaggaagatgacatccttcccatggctccctgagaccatgcggaccacgtgttacccaccacaaacttactgttacaatggtcataggagcagagctcacctgactgattcattccatttgggataaaaactgatggcccaacccattgttttatcctcagaaatcagttctttcaagagctcggtgaaattaaagtgggcccatataacagtgaacctggaggggag

SEQ ID NO: 241558 - DNA, 382 bp, Homo sapiens
  misc_feature (353)..(353): n is a, c, g, or t
gttgagcaggctgatctcgaacacctgacctcaggtgatctgcctgcctcggcctcccaaagtgctgggattacaggcatgagccaccgcaccaggcctgtgtcctgatttttaacattaaacttgaaagcagtggttaatgtagtctgaggactctcctggggatcccgagaaccttttagagagtacgtgagattaaaacagtcttctagcagtgttttaagacactacttgccatttttctttcttattcttagatatacaatggagttttccagaggctgaggcaggagaattgcttgaaccggggaggttgcagtgagccaagattgcgccattgcactgcagcctgngtgacaaagcgggactccatctcaaaagc

SEQ ID NO: 241559 - DNA, 717 bp, Homo sapiens
taggccccacttcccaacactgccatattggaaattaaatttccatgtgagttttagtggagacgacaaaccatatccagaccacagcagtacttttagtacttgctggtgagtaactaaatgaccatatccaaaaagagtatgcttttgtgtcaatctgtctctatcctagaatgtcgtttagttctttcatgttcaaaattttatgttgaactggataaatcttcagtttttcagatgacacatggctggaatggataactaacttatgactgaagggagtcaaggttctaaattatcttgattgggtatatataactgggctgaaaccaaaaaatgaaacttaattggaaagctgtgaagttttacttaggtatgagaagtcagttacacaaatacagaaatgggagtatctgatttttcctttgaaagggtctagaaatttaacacaagtctaatgtgaatcaagaacttccaccttttcataggattataaagctgaaagagaacatttgaatactagtcttctcatttacaaacaagagaatgtaatacatcttttatgtatttcttggtagttgggtgatcataaatgccattaaattcacctttaggcatgtgtgaaaagacaattgtgataatgacattccctcattttacaaatcctttggtaaaggatatataacccttccaataaaataacatttttaatgcaaa

SEQ ID NO: 241560 - DNA, 407 bp, Homo sapiens
ccgtttgtgagagaaaacctggtatctggcttctgacgtttcagtacaatcttctattgtgcatctggatgacatcactgttgtgtcctttgcagagatgtgcatacagggccctaactgtccaggagctgctacggacagagcccggtaatcccgacgacttagtggatcctgtgcctcccaagggtggcgcccacggtgactgcacacttgtcacagactggcaggccatttgtctgctgcagcccaccaaatcccacagatccttttggatcctttgcagcaggcttttcataccttgagtcttacttaatgttcacatgaaaaagcaactgctgtttgctgtgctcataaaagtcttgttagaaattaacaccttgtgtgaataaaaacatcaagtaagtatt

SEQ ID NO: 241561 - DNA, 421 bp, Homo sapiens
ttgtatctctcctccccatattcaaacacacacacaaattcgtatgctgaagccctaatcccccgcgtgaggtcatgagggtagggctcctgtgatgggagtagtacctttataagaagagacaacacagagcttgctgtctctttttctctgccttgtgagggcacagcaagaagacagctgtctgcaagccaagaagaaaggcttcaccagaacccaaccatgctggcaccccaatcttgaacttacagcctccagaactataagaaaataactttctgttgtttaagctatccagtctacggcatttggttaaagcagcccaaatgaatatagtgccacttgtaattcccagtgtagcttacttttagaaatacaacgtataatacttacttttgaagagccacactaaaacttgtgg

SEQ ID NO: 241562 - DNA, 367 bp, Homo sapiens
ttgtatctctcctccccatattcaaacacacacacaaattcgtatgctgaagccctaatcccccgcgtgaggtcatgagggtagggctccttttctctgccttgtgagggcacagcaagaagacagctgtctgcaagccaagaagaaaggcttcaccagaacccaaccatgctggcaccccaatcttgaacttacagcctccagaactataagaaaataactttctgttgtttaagctatccagtctacggcatttggttaaagcagcccaaatgaatatagtgccacttgtaattcccagtgtagcttacttttagaaatacaacgtataatacttacttttgaagagccacactaaaacttgtgg

SEQ ID NO: 241563 - DNA, 322 bp, Homo sapiens
ttgagagagtatctcattcctgttgcccaggctgcagtgcagtggcacaatctcagctcagcacactgcagcctcgacttctcgggctcaggtgattctcccacctcaacctcctgagtagctccaaatgcacatcacacctggctgatttttttttgttttagtagagacggagtttcaccatgttgcccagtctggtcttaaactcctgggctgaagagacccacctgctttggtctcccaaagtgctagaattacagatgtgagccaccatgcccagtctcttgtgttttattctggttttgttatcagcttactgctg

SEQ ID NO: 241564 - DNA, 487 bp, Homo sapiens
caaggaaaataggaaataacaaagtaactaaatttctcaaagcatgcagaaggaaactgaatgaaagctggtggtggggacagcagagaaccaacgattttacactcaggtctcaaaagactaggaattggtggcttcatttcttatctttagaattgggtggtgcagaaggagggagccaaaatggaataagttgaaattatgtttaagaagcaatactcgccgggtacggtggctcacatggaggctgaggcgggtgaatcacctgaggtcaggaattcgagaccagcctggctaacatggtgaaaccccatctctgttaaaaatgcaaaaattagctcggcatggtagcatgcccctgtaatccagctactcaggaggctgaggtgggagaactgcttgaacccaggaggtggaggctgcagtgagccaagattgcgccactgcactccagcctggacgacagagcaagaccccacatcaaaaa

SEQ ID NO: 241565 - DNA, 512 bp, Homo sapiens
gatttattcattctgtcagtatgttctgagatgcttggaactggagacagagaaatcaagaaaaggctgtagccaggcatggtgtcacgtgctacttgggaggctgaggagcagggatcacttgagcccaggagttcgaggctgcagtgatctatgatcatgagactgcacttcagcctgggcaacagagaggacaccatctctaaaaaaagaaaaaaaaaaaaggaaaaaaaaagaagtggtcatttgtccagtgtaataagcacattcttagaagtgaggcttgcaagaatgcggagaagtgagctaactctacctggtggcaaaagaaacgcttcacaaaggaagtgataatgcagctttgaaggtttgaagaatggggaaaaggaggaatgtgtggtggcatttcaaatataggatactgtgcgagatcacattattgtttccaattacttgttccatctccctgtgacaggtttatatttccctgccccatttaaggtcaattttgg

SEQ ID NO: 241566 - DNA, 140 bp, Homo sapiens
agttggtggatggaggcagtgaggtcagggccaaaagttctggttcatctgtaacaaccagcacggactctgaggcacctgtatatgcatgagaagaacctgctgtactatagggaaataaatgccccacttgagttttg

SEQ ID NO: 241567 - DNA, 413 bp, Homo sapiens
aaaatcatcctgttgcaaggattacttaggaacagtagcgaagttggtgagcatctccgcattagtcaactttgttcaactggattcacaaacatttccagagggcattctcagtcaagtagccctacaaaccattcatggcacgccaagcagctcttggaagtgcccatgttaacatgtgaccatgagtccttcctgtctgtattgctaacgtgtgatcatgagtcctgcctgcctgtattgctgacgtgtgatcatgagtcctgcctgtctgtattgctaacgtgtgatgactgtctgtctgtattgctgaccaacttttgaatggaaattggaaggagcatttgccacctccttgatgacttaatttcaaacattcaatacaagtaaaatattttctagtgctaaatgtg

SEQ ID NO: 241568 - DNA, 296 bp, Homo sapiens
ttttcttttttttctttttgtagagaaggggtctccctacattgcccaggccaatctccaactcctggactgaagcaatcctcctgcctcaaccacccaaagtgctgggatttcaggtgtgagtcagtgcactcagactcacttctcttaagttagctctttctaccaaaaagaacacaagggccgggcttggtggctcacgcctgtaatcccagcactctggaaggtcaaggagagcagactgcctgaggtcaggaatttgagacccacctggccaacatggtgaaacaccgtct

SEQ ID NO: 241569 - DNA, 704 bp, Homo sapiens
ccagaagcatcttcccaaagaaagatctgaccaaggaactccccagcttaaaacacttccatggctcccagtacccttggagaaaactctgatttctttcaggctctgctccagcatcacctcttccctctctctccccacaacccatgcgtcagccacagctgccttctttttggctcctagactataccaagcccattcctaccccaggccctttgcacttcctgtttcctctacagagagggtccttccccagccccttactcgacctttccgtcattcagctaacatctccatgactttgtctatactcctaccacccgatcactatctctttgtctcagcattttcactgtgaagatgtctccctgtgtgctttgtctatttggccgctaggctgccagtcccacgagggcagggacttctgcccacaacacaagtgtctctcaggtcctaacagagatcctggcccaggagagtcgcaggcaagacgttcaacaaactcctcccttcagtcttccttccgcagcaaccctctcatagggatatctgaaggctggcgaggccaatgttttggtttgcgtggcctttccctagttgttctatgtgtttgctcatctccccagaacgaggccagcattgcagcatctccagcacctaaaacatttgctactaaaccattaaatatttgttaaacaaataaa

SEQ ID NO: 241570 - DNA, 455 bp, Homo sapiens
cattctgcaaaatggttgcctgaacacctgctatgttggacttgaactcactaccaccccagatgaccaatgaatggctaagagaggtttgaatgttttgattaggcctgttaacatgtgcttagtcttccctctttctcctccctctcctcctctcaccttctatcacttgacttctgacacttgcctagccctggatggagggactcccttgtcttcactcaagaaagggcaagctcagtagctcagcttgaggctgttcctgcatcttcaagaaggagcccaaggccgggaggagcttcctctttccctgaactaactcagtcagtgataggccctggtaatttctctctctctgaaagaaaaagaaagaaatgaagaaaagagaggaagaaagaaagagaaagaaggaaaaaaagaaagagaaaaaaaggaaagaaagaaagaaaaagaaa

SEQ ID NO: 241571 - DNA, 507 bp, Homo sapiens
tttctctgcccgccggctgcttcgcctcctctgctggccctgctcggcctacgttcggctccccttctaattccttccattttctgcctcgccttccccctaccccgcgtttctctgcctcaccccctttcctcttcagcctcgcgccccattttatctgcctctccacacctttttcgcttccgaccccaccccctttttcctccgcacccccagccccccaccctttccctgcctaccaagctcgggacccggggctgaggatggaaaacgagtgggcgcggtgtctggaattgggctgggggctgggggaggggagacaccattgcgatccatttctctggggtgtcagtttgtttaaggttcattgaaactgcagtagtatctctactgcccagaatctggcgttcttttggagccagagtcgacctttactcaacacctagctcctgctacgccctgtcctttcgaggttgcaaaggaaaatcttattcttgtggagtccga

SEQ ID NO: 241572 - DNA, 531 bp, Homo sapiens
gaaatacattctcattgctttggagaccagaagtgcaaaatcaaggcattggcaggcccttgctccctctgcaggctctaagggaagagctttctttgctgcctccagcttccagggaccccaggcattctttggcttgtggctgcatcactctagcccctgcctttgtctgcgtgtgaccttctcctctgtcttctccccttctcgtctcttaaacaacacttgttgccatgtgcagcagggcattcctgtagtcccagctactcgggaggctgaggcaggaggattgcttgacccaggagttctgggctgtagtgcactgcaccaatcaagtgtctgcactaagttcagcatcaatatggtgacctcttgagagcaggatgaccaagttgtccaaagagggatgaactggcccaggtcagaaatggagcaggtcaaaactcctgtgctgatcagtagggagatcgtgcgtatgaatagccactgcactccagcctgggcaacatagtgagacctgtcactaatttaaaa

SEQ ID NO: 241573 - DNA, 762 bp, Homo sapiens
gaactggcttgctggctgattgtggtaaagtaagaagtacttaatttagtagaaagtttaaatggcagacataacattaaacccagctgatttataaatgaagcaaaagaacaaaactcattcaggataattggttattctaaaatacagtcatttctaaaattatgaagtgttcaggacctttgggagtgaaagaatttgctaaagaaggatcagtgaaaaaaaggaatgatgggtgaagagctgtggagaaggaagagaagaaacagcacaaggaaggaagaatataaaatcagatgtgggaatccaggggaaagtgcaaacgaagcaagattgagaaaattctcaagtttttataaacagttctcacactctgccagttccttggaggtagacttttttgttaacttccaactacagtagtgaaaaaaaaaaaaaaaccctcaaatttgcaaaagcagtctgtggaattttctttacccagctttcctgactgttaactttttagcacacttaactttatcattcgtttattctctctgtttaaaattaaaaatgtaaattttaaaaagtaaaatgtttgttggttacaaacatttatacccctttgtctctaaatatcatttcattttaaaaaatgaataatctaagcctacacattctaaaatgtgtatattttctaaaaataagggcattctcttacataaccaatgtcacaattatttgatacagtgatcaaaatcaggaaactaacattgatat

SEQ ID NO: 241574 - DNA, 489 bp, Homo sapiens
cagcactgatagttaagtttgggtgaataaatgtgaacaatgactccaatgccatagaccctcacgtgtttgttgcattaattggataattcaaaatataaagtattatccagtttcaggataatattaagatctaaaccaatgaatgctctatgaaaagttgtagattaactgatcccttaaaactaaaaacagcgtcttcataagcttctactgggggcagctaccactttcttcatcacatttcttatcctcaatagctgtgggcaatgccaaaatagctgtatgatcaacattaataaacaacaccagggcaacagccagacacaaacctaaatgaagaattaaattgtaggagaaggaggaggaagcagcgatggcggctgctgcggcggttgcggcgggggccggggtgggcgccgcggtctgggccgggcagtgaggcacgggcggccgggccggtgggctgggcggcgggcccggcggccg

SEQ ID NO: 241575 - DNA, 1036 bp, Homo sapiens
gcggccgcctgtagtcccagctactggggaggctgaggcaggagaatggcgtgaacccaggaggcggagcttgcaatgagcagagatagcaccactgcactccagcctgggtgacagagggagcccactccagcctgggcgacagagggagactccgtctcaaaaaaaaaggaaagaaagaaaggagaggtatctggggagaaggtacagcttggggtgtgaccgggatgagcaggggctgacagaacatgtccccccacctctcatcttccagccttttctgagccgcagggcctctccactcccagactgaagggtattagaagagaagacaagggaacatttttccactgttgcgcatttgttcaacaaatgctagctgaaaagagcctctagtgacttgtcgcagactacccaatctacccaggccgggcctagaggccaatgccatggcccaaaggcacagctcatggtgaggtccagctgctgggcaggaaaaggacaagaggtcaggtggctgcagaggtgatggctgggggcctgtcagacgggggccaaagacattcctcccctcgtgatccctgacccaagcgcgtggacatgcaagggactccacggagcatccactgtgtgccagccccatgcagggttccaggggtccaggagcctattctgagctgcaccgcctcggacaagtcacttgaccattctgaccttgagttttctcttgtgctaaaaggctaacaggagtgtctacctcacagggcggctgctggcatatcacagagatgaggttctcaaaatgcaaagcagaaggtccagccaagagtcggtgccagggcaacaaagaccggaggaagactcgtaggagaaggggtggtgttggggaactggaattgaagggcgaagcttggagggagccttaattgcagaaacccggggccccgggcatgggacccttgggaatgccggccagtccttaccggccttgtccccgcgcccgattacggggtaaccacgcgcggtcactgcgccg

SEQ ID NO: 241576 - DNA, 124 bp, Homo sapiens
acattctggataatattatctactcccatgacatttcaagtggatttacttgtgtaaatgtgcacatgattcaaagcaccaaatatctgtttggtcttttcaataattcttcctgggtagctat

SEQ ID NO: 241577 - DNA, 427 bp, Homo sapiens
ggtgctctttgtgccactatctttccaatgtcctcatcgaatgtgtcaattctacttgaggatattggctggatcttgcttgcggggtggatcctgtggtctaagttggagagggaaggaaatagcccaagcttgatgacaggagcgggctggaccctgcaggaaagcagaggacattgggtctggaagtcacaaagaagtcaacgaaacaatgccttagaagcagctgagtgagaaaaatgaaaagcctgaagaaaggggccgacctaaacttattcagatgcttcagcattttcctaatattgtcatttttgtggctccatgtgctctctatttctgtgagtatccctaccaaggaattaatatagaatcctgtcagcagaagtgggtgaggcaagagtatcttgtcaccttccatatgttttgg

SEQ ID NO: 241578 - DNA, 437 bp, Homo sapiens
taagacgaaagcagcgtagaggctgtcagttaaaaagtgggactggaggaaagatttttcaattagaaatggggaggagagcgaacagcttaagagtagttagaaataatacctggttgactagactaggtggaaaaagaagcttaataaaagcaaacacacacacacacacacacacacacagagtattataatactattacctattatattacattatattattgtagttctacaggaactacaaggaattctactgtgaattccttaagggtgggatacattttacaatcatcactgtttctctcattagttgtggaatcaaaaaaatgagtgcacgatgaaaaattattcaaacacatacatgctttcattccaattgaaaatgtaaaaatattactgttaaaacaatattaaaggacatgtaatacaattca

SEQ ID NO: 241579 - DNA, 573 bp, Homo sapiens
taattgttagatgttaggggccacaatgctaactgtgctttgaacagaaacacagatttctgccacaatttatatctcaaatgcatagttccctataatttagactaaaagattataaatgacttggctttcaaatatacatggtgacattaagctatgtgacagacacaaactatactccaattgtgaagtcagagtgaccatgacagtctaaaaaggagccaatccagagacctaaaagtaacatttttaacaaaaaaattcaattaaatttgcactttacttttatagattctgggtccattttttggagaaacaaaacccagcaattttaccttgatgttttttaactaaatccaatcttcattcctgcttttatttagagggtgggaaatcaagtttatctgtggtaaaatctacctctgtgtagttgtgaaaaggatgcaggtatcaatttttttgttgcgtttgtttgatttttgagacgtagttttgctctgtcgcccaggctgcagtgagctgagattgtgccactgcactacagcctaggcaatagagcaagactgtctaaaa

SEQ ID NO: 241580 - DNA, 665 bp, Homo sapiens
gtcactccactgcactccagcctgggcaacagagcaaggctccatctcaaaaaaaaaaaaaaaaaaaaatcaggctgggcttggtggctcatgcccgtaatcccagcactttgggaggccaaagcaggcggatcacctgaggtcgggagtttgagaccagcctgaccaacatggaaaaaccccatctctactaaaaatacaaaattagctgggtgtggtggcacacgcctgtgatcccagctaccagggaggctgaggcaggagaattgcttgaacctgggaggcagaggttgcggtgagctgagatcccgccattgcactccagcctgggcaacaagagcaaaactctgctcagactttctgctcatgatatgtggaatttttttgtgtgtgtgccaaaatatcatgttgaaggattttttgacaaaccaccaagcctatgaaatgagcttttattttgcagggtcaagcagctgtttgaagtgtaatgtttggacaggcctgaaatctacagcaccaggatttttcctacataaatcatctttggtatatttgttttctgggtgttaaatcaaaatagtaacttgatagtcagtttattgtgcctcctaaaattcacacagatggtttttgtcccccccgccatcaacgaaagccctaagctg

SEQ ID NO: 241581 - DNA, 618 bp, Homo sapiens
aatgagaaagaaattcttggagaaaaatattctcttaattaagaatgcagatgtgatgtattagtgagaaaaatatataaaaaatatataaaaatgtataaaaatatatagaaagttattagttattttgctttggaatttcttttttaaagaggcagggtcttactcttttgcctaggctggaacgcagaggtgtgatcttgactcattgtaacaacctcccaggcacaagctatcctcctgccttagcctcccaaatggctaggactacaggcatgcaccaccatacctggctaattaagaaattttttttgtagagacaagtcttgctatgttgctcaagctgttttgaattcctgacctcaagctatcctcctgcctctctttctcaaagtactggaattacaggtgtgagccactacacccagtctggagaattttttgaatacatttaaaatcttctgagacaggcgctttatatatccatcttgagtcttttacctgaaagaaaagcatttaatcatatacacatgacttatacttgcacttctctgagaaaatgtttagcttctgtggatgtataaattctagtgtgttttgagaatacttgatttttgt

SEQ ID NO: 241582 - DNA, 380 bp, Homo sapiens
cgcataaagggaacgggtggggacacagggcccctgcagcctcaggaggatcagcagtggcctggtttactcgtgtcgtcattcgtcgtgggcaccttgtccccggggccggccagttacttggcctcctggctcatcatcctgccggaagcatctccagcttggggatgttggagggtccctggccccacctggctggggatggagtgtaagccgaggagatgccatgtgagggtgcagcgaggagttgggctgtctaaaagcaaagaaagagattgcatcagacaccgcatctgctgacaccttgttcttggacttccagcttccaaaaccgcgagaaataaatgtctgtgtctaaaccccaaccctaccacctcaaa

SEQ ID NO: 241583 - DNA, 412 bp, Homo sapiens
gcagcaataagttaacttctgttaaatccgagtaagtggtacctaattttctctatgttcaaaatattttataatttaaattaagaaaaaaaaaacctaaacttgtagatggaaatcattagattaaaggagtctttcccaggggtgggtatagtaagccccttacagaggatgacttgatgactttctatagataatagatgttggggggttgcccacagcacccagagtcgtctttgcttcacacaaatctgaccatatttgttccctgcttaaaagctttccatggctccccatgttcttcaggataagctgatgcccttttggcctggcaaacacagtccttgaggatggttctccagacctcgggaacagcccctcccacggctcccaataaaaatgtgaaaaccta

SEQ ID NO: 241584 - DNA, 390 bp, Homo sapiens
cgcaaaattcacacagtgggttggaggaggagtagttcctccagaacatgcaagggttttggatgctgagtaaccccaaaaccaaccccaccaaacatcttcatggagggagctgaagctggggcgtttgttagaaacaacttcgtgggcccagacataggcaggaaccaagatgtgacagggggaaaagctggggtgttgctgccatctaccttcaaccattaaaagaggaacatctcctctgagcatcagagtgaattcaagtggcatagatcatctctgccacaatgttctttccacaattacaagaagttgtctttgaagaggaagatgtttgcagatgattggttttgctcatttagaaagcagtttcctttaggtaatcctgac

SEQ ID NO: 241585 - DNA, 381 bp, Homo sapiens
agccggggaggtggaggttgcagtgagcctagattgtgccattgcactcgagcctggacaatagagtgaaagcctgtcttaaaaaaacaacaaaaaaacccacaatagcttagattgctaaagtagtcctcagttttctatattctgaattctgtgtatcagggtttgaagaatagaatagaagttattgacataaatgagttaggtttcataggagaaaagttaattttacttggtgtattttctactgaataagtttcatctgtgtatttgtgaatatttattaattataaactgtgaccaagcactatactaggtattggggatataccaagtcaaaaagttgtgcctcacctggagtttacattcagttttgttaaa

SEQ ID NO: 241586 - DNA, 480 bp, Homo sapiens
gggggaagaggtcggggacagaaaggggaggcctggggctcagagaccaacgtctcatgtcttctaccacatggccacgtggctcgccccttgactcactctggtctctgctcgaatgtccccttacatgagaggcctttctggaccacccaccccatcactctctatctccttaccctgctttatttccattccttgcacttatctccactagacatatcatccatttgtttgttcagctgtctttccatccaaagtgtgcacctcatgattacagggactttgttttgctcactgctgggatcagatctcagctctgccaattattagttaatttgatcttgctcaagttagccccatctctctacctgtttcacagggtcattttgataattaaatgcactattaataaagcagtacttggcacggtgcctggcacatcataatttctcaataaacgatagctattattatgatcag

SEQ ID NO: 241587 - DNA, 466 bp, Homo sapiens
cggtagaatagggatattttcagacagaaatgcaaggtctcaaaaattagcctcctctgcacccttttttgggaagtttctggagaaggcactatgctgagtacgtcatgaggactctataagacaagcctttctgtgctcctcaggtctgggagacaaaggcttcaagaaaccaaacaactgcagggctcaaatggtctcaacctcagagcctgtaatgtcaaccactgcattgactgctaggagaaagggaaatacaagatgtggaagcaacttacaacgtcagaacaaatggacacatgaagtcttaccacgacgcagggattggtagagcagatgcttgcctgtgcagtaatttgaagaatgccagcagagctctgttttcaaagtccccctctcttatcttccattcctgcaggcagagcaaagtttgcaggtccatgaaaccaaacttgtctttctccta

SEQ ID NO: 241588 - DNA, 498 bp, Homo sapiens
caaggacgtaggtgacgttccctaggtgtctcctcggaacagtgaccttccaacagggctgggttcccatagagctcacgcaccaggcagccgctgtggcctcggaggacagaggtggcctctccagggcttccgcgaggttttctggtttggggaggagtgtgtgtctgctcctaaacaaacacgtggtcccaggagaggaaccgggagcagctgggctgtcttctcaacatgcgttgagagaatggccatcttaactactgctctggagacccgtttttacaatgatttttttaaaaaaaaaacaccaaggtgcattctggaccagattctaaaataattggctttaggactgaagaagccaggtgtcccgagcggggcgaggcctcctccagcgaggctgggtcggggtggcctcctttcctcacatcagggagggaggaactagcagggtgggcctgggggcttctcctatcgtttaatcccctttctgttaaa

SEQ ID NO: 241589 - DNA, 382 bp, Homo sapiens
cgcttgaggatctgatgagccctttcctatgacaaatgagtcacctaacacctgtagtgataaagcaaccctatctgggttccatctgcagtggccacatcctcgtcctcccgctccctgggttccatctgcagtggccacatcctcatcctccaactccctggtttccatctgcagtggccacctcctcttcctctggttctctgggttccatctgcagtagccacctcctcatcctccggctctctgggttccatctgcagtggccacatcctcgtcctccagctgtctgggttccatctgcagtagccacctcctcttcctccagctccctcagcaagttttctgcgcagacatgaaggaagcaatattgcatttctct

SEQ ID NO: 241590 - DNA, 360 bp, Homo sapiens
aatctgcacgttgtgcacatgtaccctagaacttgaagtataataataaaaatcaactagagatggatcatggacttaaatctaagacctgaaactataaaaattctagaagataacattggaaaaacccttctagacattggcttaggcaaggatttcatgactaaggacccaaaagcaattgcagtaaaaacaaagataaatagctgggacttaattaaactaaagagcttttgcatggcaaaaggaacagtcagcagagtaaacagacaacccacagagtgggaaaaaatcttcataatctgtacatctgacaaaggactactaatatccagaatctacacaacaaactcaaattag

SEQ ID NO: 241591 - DNA, 315 bp, Homo sapiens
gcggtgacagatgataaagcagatgaaagtgtccttttatcaaataattaattcactcatcagcatttatcaggtatctgcagtgtgctgaggagtgtgctgcccagagaccaatgggacaggaagagctcctagcctgtttgtgctgagataatgtaagcagtgtgcagtggctcatgcctgtaattccagctactcaggaggctggggtgggaggagcacttcagcccaggagattgaagctgcagtaagcagcgattgtgcctgggtggcacagtgggaccctgtctttatatataaataaataaaaagatt

SEQ ID NO: 241592 - DNA, 383 bp, Homo sapiens
gattctcagcaaaaggactctaaggatgcagaggaagggaagtcacccaatctgggaaggaggtttttattaagtataaaaacaggtcatccacacatagcaatgtgcttttctagagaaaaccatcctactcaccgagagccaggattgagatgatgccttaagaaacacccactccccgtgagggatgttaccaagaagtcaagaaccaccagtaactttgaaaagtccagattactcagtctcgggtatgtgtatcagcaatgtgaaaacggactagtacatctctagaggcacatgccatgtggtccagccataattatttgttgtcacaactaagtttcctttctatatgaaaagattatattgatcagaattctaaa

SEQ ID NO: 241593 - DNA, 1243 bp, Homo sapiens
actgcgcctggcccccaagtgatttttgaaaagcaaattgcaaaaccattttaaaatttaaaactatgtgatcttttaacatctgatactctactaaaatttctttaaagtgaaagcttacaattcaatgtgtaaactactttatagtctgaagtttaagatagtgttgttggatatcttgaaaaatttttataacaatttattgttagaagaaaaaccccatactctattcctagagcagttatcatgggagcaaaaacaaagcacaagaaacctggtatcttaaaagttattttcatgcagaggatcccaatcccccattccctgttaagagtattagagtttatcctaattgattcgggagatggggaagagaaggtacagaatagactttctgctctcattgttgaggttattgctgtgcactaaaaatttttaaaaaaatatttaaagcttgcgccttttaaaaatactcaggtcattcctgtcagtttggaattcagccagggaaatgtgtatttttaaaagcttcccagccagtcctgataatcagccaggtggaggatctgttgatgtgctacagaacagacccctctccagatctagtcagaatctctacatccagacttcttgctatacaccgtctgtttttgattgacaccagacacatatgtttacctcttcgatttattctcgttttattaggaacactagaaaggctttgctttaaactttgtctctcatagggcatgcccttacacagatgtgactttgtggcccagatgctggtaactgggcatctaaatcatctcttagattttgtgcattggacattattttgtaggtgtcttttaaggttacatttttatgaatcagggtttaaagttgtctaaggaatatacattttagtagtaaattgtaaattatagttttaacaaaagatatggcccagaaatgaaaaaaataaattacagcctgtaatcccagcatttttggtggccgaggcgggcgaatcacaagatcaggagatcgagaccatcctggctagcatggtgaaaccgtgtctctactaaaaatacaaaaaaattagccgggcttggtggtgggcgcctgtagtcccagctactcggaaggctgaggcaggagaatggcatgaacccaggaggcggagcttgcagtgagcctagatcgcgccactgcactccagcctgggcgacagagcgagactccgtctcaaaaaaaa

SEQ ID NO: 241594 - DNA, 222 bp, Homo sapiens
agcaaagattatttttcttctgactgcgcccgcctccctggctcttggcagagtgtttgatgtaatggttttcgatgacttttcagggtggtttagtgccccaccattctactctcggactttgtttctgccatttgcaggaaactttaccaaattgctgctcttatgactctgaaagccgccagtaaaacagcttgccgtttttatgtgtaaacactgcca

SEQ ID NO: 241595 - DNA, 403 bp, Homo sapiens
cctatctgggggttattattagccagtttggagtgtggaactacaagtacctctccttcaggggaccaggtgatgggagttaattcctcaacctgcatgcccagccctgcctcttctcctcctcgtttcttctaggccttggctgtctagcaagatggagaacaggggacaggcttagcctaggctcttgcagtttgcagaagtgccccacgcacccactttagcatgtgtgtgacggtctaccggtctactgtcaaatgttccacttcccactgacaaaatcaggagaagctgctcttccggaaactcttagaagttgtctccaaaacaaaacaaagtaaaaacctcatcccctttaggatgagtgcattttcactctggccatgaatctgggaggcacctc

SEQ ID NO: 241596 - DNA, 641 bp, Homo sapiens
atgttttttctttcattaattaccaggtatttcaggctcatcttgcattttgcctgtctcaggtccagaatcaaccatttctccaaggaggcgtcaggaagaattgtgaagggaggtgacaggtggtaaatgcgaagagtttggaaaaatagattgacagtaggcccagtgatgttgatacttttcttgctctgagcacagatgttggcttctgtattcatgttactccagttctgggaaaagattttgtttctaaattcccacgatttagagaaccagatatcaaatgtttgaatacatgacataatcctgaaacaaaatttacaaaaatttaatatattctcaagttagtacacacaaacacttgctgtttttccttggtgtttttgacaacttttttaaagtaaaaagaccacttaaatactatcgtactcagaattaacatttgacattttgcattgccctctaagactcctttttttctatacgggcttccattcccttccttccagggatctttttcacatctttccaggctgttttattgatggggaatttttaaaaatagctttattgaggtataattgacaataaactgcatgtttttaaaatgtactgcctgataatttcagacacctttt

SEQ ID NO: 241597 - DNA, 504 bp, Homo sapiens
gaggtccaggctgctttgagccatgatcatgtcactgcattccagcatgggtgacagagtgagaccctgtctcaaaaaaataaatacatacatacattttatctaacccaacatatccaaactattagcatttcaacaaattactaaaagaaattattttacattcttttttaaactaagcattcaaactttggtatgtactttatacttacagcacgtctcaattcagactagccacctttcaagtgctcagtagccacatgtggctgctggctaccatattagcacaagtgtaagtagcctaacttactgttcctgttctgtacttcctgtgagatccagaatgagggaagctagaaacttctgttaggggggtatctttctcagctaccctgcttccttcccctctcctgaaggaaactttggggatgtccaggttaatagatgtatgatcatatccttagattaataatgctaataattgagcttctactctcaaacaag

SEQ ID NO: 241598 - DNA, 942 bp, Homo sapiens
cagaggttgtgagcctcccctggctcagcctgacccagaaccagctcactcatgaaactaccctctcttgaagagaataggagttgtggggaggaagaacataacccagaggccagagaacgtggaggccagggttggtgtaactgtgtaggctcttccacatactagctgtgtgaacttggacaagtgacttaacttctcttctccgtgtctgctaacagtccctacacagatggttgttgtgaggcttagttaccatacaaaattcttagattagtgcctggcacataataataaccacagcccccaaatgctagttgtcattcattatcttaacataccatgtgaaggttgtgttctcttacattctatagccctctgtgttttaatataaaattgtgatgtctctctttcttttatttgtattttttgagtaaaacggacatttcagaaagatgtaccagatttttatcacatggctttgtgagacccgacagccagccaacatcacacacagtcacatgtgtgcatgcatgagcacacatgcatgcagacacacacactttgagaaggccatgctacgccgggctgcttcccaaatgggctgaaacaagtcctcttgccctgaagaaccgcctgtcccctctcccgcccactcatcgcgctccgtggagtgaggcaggaaagggtgattggctcacagcagcagcatagctcttagtaaacctgacttgggagaaaggcctggctccagctcctagcccaagtgtcagagcctgggtcccagcactggctcgatgccctcttttgctgtgcaaccctggccatgtaacttcacctctctgagccccagctttgtcatttgtgaaagggagctaactgttcctacctctcagggttatgaggatttgacagacacatggaaagtgcctggcacttcgt

SEQ ID NO: 241599 - DNA, 395 bp, Homo sapiens
tccataaattgtcagtgttccctagctaggcaaccccttcctctctctctggctaagaataactttccttgtgatctggattataaacttgtctcaagcaatagatacatagttttcatacctgtgttctttaatctgtacttcattttcaatctcaaaactagcattgtaattgtaaaatgaacataatttattacatttttaaaaaaaaaattgagtatccctgctcctatatttagattgtttaaaaattcagtattttgaaattgtgtttagaattcttaaaagacagaggctggagggctggggctgagggagggtggtgggcctgcggggacattcttactgtgcaaacatagcgataaaaacatgtcattttccaaagcaaaaacaaa

SEQ ID NO: 241600 - DNA, 671 bp, Homo sapiens
gagttattttattagattttattagtggttaactcatcagaatctctttcagatatatgctaacttaatttcacaaaaaattttaaaattgcacctatatagctctgttccatcttcctccttttgtgctaatattgttatacacattatatttaaatatattacaaacctaccaatacattttattatttatataattttatgtctattaaagaagctaagagaatagaagagagtaagcatatattcatagagcttgttatatttccctttctatttatcatttctgattcttttcatttgttcctatagatttgggttaccatctggcgccatttccttacaccaatacaggtttcctcccacccatctccattgtgctgttactgtcaaatatattacatttacatataagcccaataatataattacatacatattattttatataattgcttttttagagttaattatttttattgtggttaacgtgcataacaaaatttaccatttttgtcattattgtgcataattcagtggtgttaggtacatttaaaattttgtgtaaccattaccagtatacatttccagaatatttttattttcccaaaagcaattctgtacctattaaactataactgcctactcttctctccctggcaagtcctcac

SEQ ID NO: 241601 - DNA, 390 bp, Homo sapiens
taaaatgaatgcattcactagtgaaggctccacatggatcctgagcttggatgagactgactgtctttcatggaacagcttccccaggctgcactgggacccttcctatacgagggacagtgtccagcccccaggccttggaagggggtgactttccagccccagctcccatccatatcaatgaccatatctgaggcccagatgggggatttctgctggagcttttgggccatagtattgctgatttttccttcagcatctttgcatttcttttcttgctggctttaaaaaaattattgagcctgaaaatgactgaggaccaaaatattttaagaatatgtaatacctccacaaaaatctaaataaaatatctcttacagtttcccagtg

SEQ ID NO: 241602 - DNA, 674 bp, Homo sapiens
acccggcggaccatgccaggactacggacccggacaggactgatggcctcagagaggtcaagggctcgggactggagaagcagccaactggagctgatattcgggaagctaagcctgaggctgctctggagggccggagaagcgagcggccaggcttggcacccgccaaatgtgccttgccaaaatgaagaggaaggaaggcgactccggagcccagcagagctgcgcttttggcctgaattttcagtgacaaatagaaaagctgaatggatggagacaatgactctttaattcaatgtaagagctgactcatcgcttcccaggaagacttgttgcaggtaggtgatggttatcctggaactggagattatcccagtcctttgttgcactggcaatgggcaggtctgtttatttttctcttttttcctgcaccaaatagtcctactcagggatgctggcattggtccccacttccctaagcccggaagaagtcttaatgtgagtacagaccacttcagtcagtctttttttggttcttggcaggaggggatactgggaatggatagatgcctgatcatcacggtgctatcaagagccatattctttattggccccatctgtgccagagttcagcggtaccatgagccctagtgctagactattagcccttcaat

SEQ ID NO: 241603 - DNA, 497 bp, Homo sapiens
tgtcctcttgggcatttttgtacaaggatataatgcttggagttgtggcagcccttttgggtcaatgagggacacattgccgacatcctgagcatggcagagtggaaaacttaaaagaaccgtgggtccatgatgatgctgatgagctgttgataccactcacagtccttttatccccaagctggatagatgggagaagaagctttttttttggccaggcacggtggctcacgcctgtaatcccagcactttgggaggctgaggcgggcagatcacaaggtcaggagatcgaaaccatcctggctaacatggtgaaaccccgtctctactaaaaatacaaaaaattagccaggcatggtggtgggcgcctgtagtcctagctccttgggaggctgaggcaggagaatggcgtgaacctgggaggcagagcttgcagtaagcggagatcgcaccactgcactccagcctgggcgacagagtgagactctgtctcgaaa

SEQ ID NO: 241604 - DNA, 333 bp, Homo sapiens
ccatttacttacagtcactccttgtgcccatccccagaccataaacaactatgaatctactctctttttctatatgtttgctttattggacattacatgtaggtggaatcatacagtgtgtgttcttttgtgtctggcttctttcactcagcatgttttcaaagttcatgttatagaatgtatcagtacttcattcatttttcatggccaaataatatattcatttaattttaggagtatactaaatttgtttctccatttactagttggtggatatttaggttgtttctactttttggatattgtgagtaatgctgctatgaatcctgaaag

SEQ ID NO: 241605 - DNA, 391 bp, Homo sapiens
tcttttcttttttttttttttttttgtagatacagggttttgccatgttgcccaggctggtctcgaactcctgagttcaagtgatccacctgccttggcctcccaaattgctaagactgtaggcgtaagccactgtgcctggcctgcttttattttaaaggaaaggtggatcctattcttgaatattttgttactactctccttaagaggaaagataaacacatcaccactaaaagaagtgtgtgtcttggtagtgttttcccagcagattggattgcttttcgtgtctcagagatttttagacaggtccatttaaactaagtagagccaagactatcaaatcagattttatgattaatgtaataagaccttgcccttcaaaattttttgc

SEQ ID NO: 241606 - DNA, 455 bp, Homo sapiens
aaaagaggagggaattgaaaggaatggagaagttcctcaaagtttcttaaatccatacagatttatcattccccggttaaatgttaggatgtgtgtattccaaggctgctccagcttgttccagtaggttgagataaggctaaatgagtcccagatcaggatacatgccattccttatttgggaacccctttgacctctcatcactaacttcctcttttttttgtcctttttcccttcgtcctatttaggaaagttttaaattattaaccaatccagttaagtttagagtgtgaggtcccatcccagccaatgggaacgggacccagccataggggattgcatcaggatgtaaaggttataaatgtccccgtttcctttgtttggtgtgctttcgtgggtggactgctggtgagtgcccccttttggcagaaagtaaaccagccttgctaagaga

SEQ ID NO: 241607 - DNA, 105 bp, Homo sapiens
ttttgtgcacttttttgggtattatactgaaagaaaacatttattttttaaaaagttgaaaaattgccttggagcagagtaaggtaaatctatgattaagcttag

SEQ ID NO: 241608 - DNA, 458 bp, Homo sapiens
tgtgagcaaagggtatgaacagacacttctcaaaagaagacatttatgcaggcaacaaacagatgaaaaaaagctcaacatcactgatcatcagagaaatgcaaaacaaaaccactatgagataccatctcacggcagtcagaatggcaattattaaaaagtcaggaaacaatagatgctggtgaggttgtggagaaataggaacgcctttacactgttggtgggaatgtaaattagttcaaaagatccattttcctaagaattactgatgtttgcttcattttgttttcacagagaaataacagaaattcgtaacactcaaaagggagctcccatggctgggcatggtggctcatgcctataatcccagcagtttgggaggctgtggtgggcagatcacttgaggtcaggagtttgagaccagtctggccaacatggtgaaacatcgtctctactaa

SEQ ID NO: 241609 - DNA, 306 bp, Homo sapiens
gatctccctgcagtggattacaactgtctggtcaccagagcattgcccaaaagactgactgataccattctgggtgtatccttttcaggatgcttataatatcacattcacaacaacttcgtaacacagtctttcctgacttctggtccaatattcttgccatgataccacatcgcctctcagctttaatgaagacaagtcctgtgacatttagagtactatgtggttttgagtgcataggcggtatgctttcagttcttgctttaccctttgacaaaaagaatcaacatttaatatcagaaatgt

SEQ ID NO: 241610 - DNA, 686 bp, Homo sapiens
tctggacatggggacttacgaggagctaggatgaaaggcctccttgttgcttagccttggcagggctcttctggaagccaggctctctcctagtctgagaaggcaagctttttgctggattacaaagtcttctctggtcgtggccacggtctgtctaccccactcagcgcccgccctgtgtccacacatgcttgtcagactggactgaggaagcccacaactggggtgggtttggaatttccagtccccgtcagcatcttacactcccagggtggtttctttcagacttagcccagttttctttagcctctcagtttccgggtccaatctaagctaccagaccagctctgccaaaccagaggcccagatgggatctgccactccagccactgtgagcagctttggtttcagcccaaatgccaggactcgagaagtgtcgacaaggttgagggtccaagcttgaactaccctagctggctggcacaaaggacttctaagacaaacaagacgacggatccttacagtggacactcacgcaagaatctacccaagcagggtagcgagagacatgtgtaccagagcaagatcccaaatgagggaggaccatccacaaacatggggaccccatacactaacgcgataaggatccacagcatcctgcgctaaaagacagaaccagagacatg

SEQ ID NO: 241611 - DNA, 610 bp, Homo sapiens
tctggacatggggacttacgaggagctaggatgaaaggcctccttgttgcttagccttggcagggctcttctggaagccaggctctctcctagtctgagaaggcaagctttttgctggattacaaagtcttctctggtcgtggccacggtctgtctaccccactcagcgcccgccctgtgtccacacatgcttgtcagactggactgaggaagcccacaactggggtgggtttggaatttccagtccccgtcagcatcttacactcccagggtggtttctttcagacttagcccagttttctttagcctctcagtttccgggtccaatctaagctaccagaccagctctgccaaaccagaggcccagatgggatctgccactccagccactgtgagcagctttggtttcagcccaaatgccaggactcgagaagtgtcgacaaggttgaggcctccacttcttccaccttggctacccctgagatagcaagaccaatccttcctcttcttcctccttctcagtctacacaacaagaagacgacaaggatgaaggcctttatcatgactcacttccattcaatgaatagtaaatgtattttctcttcctta

SEQ ID NO: 241612 - DNA, 710 bp, Homo sapiens
ttccccttgctgctgccatgtgaagaaggacatgtttgcttccccttctgccatcattgtgatgttattgaatggacaaatttcccttttcattggaaacagaaatggtactggaccctttctagatctcttgcctcacagcttctaacccaaatcttatttctacagcaaccaacacagcttctcgtttgtaaaacttctcaagatgtttcaaaatggaagaaataccaaaacccacaaagaatccttgagttggtatggttatttttagttgaggacatttgagattccacagatgcagaaaagaatcttctcagagcttccttcttctgattaaaagcagccacttctgggaaataaggctggcataaatcctctcttgagagtggctttactcccagaaacaagaccaagggtaaatctaccataaatcccctctccaggggagtttgatggccataaagaagatgaaaagagttctcacacctgcataaacaaatgttatcacaaactttcttatctcttgtttgttctcccaaaaaactatttgtctttcctaaagaaatccatttgttttccttatagaagtcttttctcccggcttgcttctcctattaagttagatatataaacttctaatttaacttttaggaaactacttcttttgtaagctcttgtatgcaaataaactgttttattctcttgttaat

SEQ ID NO: 241613 - DNA, 245 bp, Homo sapiens
ctctagcgaggacttccattactatgttgaataaaactgttccccttgctgctgccatgtgaagaaggacatgtttgcttccccttctgccatcattgttattcatgttaggctcctgaaaacaccacaaggacctaccctccgggagccagccagagaacccttcttcctgcactgtctccgttatgcccaacatttctgggcataagttttaataaaccttacctgggaaaagtttgtttggc

SEQ ID NO: 241614 - DNA, 281 bp, Homo sapiens
aattgtgccattgcctgtcattggatttgaggaggtcatccaatcacaatgaagttcaatgaaatctgaagactggttagcaaagtcttaaccataaccacttgctatctattgaaatatattgggaagcacagattgtatcatcatgaaattttcacacatggtggaactccatttgttaacagtcacagagggtgatgcttggcattttaaactgcaccacagtcttaaattcattatcatgtgaactgataagatctagtacagaatttaaaaatggg

SEQ ID NO: 241615 - DNA, 442 bp, Homo sapiens
ggctaaggcacaaaaatggctgtaaaactcacctgaagtctgtgctcatgttctcttgaggaccccatttcattacttaaaacagtttcatctcctggcatttcatgcatttgttctgttggactttggaaacacattaggaaccactttacagttaacacttggctcatagcttatcttggaccagagtgttcataatcttgtttaatttatgttagactttagacatttttcaggaaaccggtacagacctgcccccaggacaggctacagataaattaggttgtgcaaaactaagaattaaaattgaaaatattatgtgtagctgatgtcattcattatcatgacattgaaattttgtcacaatgtgggggtatatcgtgggctctggctccaaaaagcaatctctgagccagatgctaccagttttaaagatggtaag

SEQ ID NO: 241616 - DNA, 420 bp, Homo sapiens
taaaatggaaattacagtagtagtatattaaccatatagagtttttgtgaggattgagatagtatatgtaaagttctttaaaacagtgcctggtcatcacttaagtgttgaggtagctgctgttttaaaaattactattgttattcaaagaaggttatttgagttatattttttccctaggctctccaaggtatactttaaatccttgaggttaatgattctttggaaaagctggaggtgtgctgtggtaaataataggaagaaaacccttgccccaatagaaaataatacaactagaacataaaacacaattaaaatattaaatacattttgtatttcttttattccattttgtttgttcatgatttaagttttataatccttcgaatcccacaattttcattcgacactacctttaaa

SEQ ID NO: 241617 - DNA, 496 bp, Homo sapiens
ataagggggcaaagttaggcatcttctacaatttgcttggagtaggctggttccagcttatctgcatgactgcactgtaaataggtaaatagttctctcctggacaaggggatatccctttgcttttctatttgtaaaactcatttattcatcaggcattgagtacatagagtccaagagtattctaaatgctagggatataaggatgaataggatggaactaacaggaatcttaaaaaaggtaggaatggaacaattagatttgttcttaagaaacaactagtagtaatgtagaagaaggttttgagtagggaaagcctcagaaaaagactgtttaagaaggtcttgtcttgatgcagtggttcatgcctgcaatcccagcactttgggaggcctaggcaggaggatcgcttgaatccaggagtttgaagctgcagtagccatgatcacgccactgcactccagcctgggtgaaaacctgtctcacacacaaaaa

SEQ ID NO: 241618 - DNA, 397 bp, Homo sapiens
cagcacttcagtggggaaaagaatgcttttttgggaaataaagttgggacaatttgtggaaaaaaagttttgcttcctaccttactccttaccaggaatactttctaaaattagacataagcatttaaatatatggggaaaaaaaaaccccactacatttctagaagaaaatctcaaatgttttatgatcttacagcggagaagatattcctgagatgacacaaaaatgcaggagccgtaaagagaaaaaaactaatgaccagtaacaattttagatgcttagcttaaagaaaaaaatacaaacaaagtcaaagactaatgacagatagaaaaaagaaacacttccgggtcagccgagaaatggtattcagcaataaatgtgtcagagtcccaaaaa

SEQ ID NO: 241619 - DNA, 447 bp, Homo sapiens
aggttaacacacactaaagggcaatgccattaaaggagaagaggaactttggaaactgctgtctgaaaggaaagcaaagcactcttcattaacagctagtgggctcctaatttctgcccatgaaggcatgttcatactgacagagcaccccctcaaggggaagaaccatccgcgctaattcttgttgtcctcttctgagctagtgtgctcattgttcatacaaactagtgtgtcaacattaaaacaaaaagggagttgaatcaataaatgacttgggaggctgtcatacttgtaacaactatggcgacagaagaacactggctgtagtatttggtattagcattggtgtctggatctataactaaaaaagcttcttcatttctccaaactaatagatatgacagatattgccacacttagctctacttaaataaatattctaaactc

SEQ ID NO: 241620 - DNA, 201 bp, Homo sapiens
tcatgaatagtattaatattcttataaaagagactccagaaaatttcatgatcccttctgccatgtgaggactcaatgaggtgacttctatctatgaacttggaatcaggcactcaccagacactgaatctgctggcaccttgaccttggactttccagcctccagaactttgggaaataaatttctgttatttataagcc

SEQ ID NO: 241621 - DNA, 561 bp, Homo sapiens
cagcggatcaagcaatcataatatcaagctgagattaattgctatgtaaccatcagcaccatccttttccagaactttccattttccccactgaaactttgtacctatgaaacaactactcctcattcccatttcctccagcccctggcaaccaccattctactttatgtctctgtgaatttgactactttcggtaactcatataaatggattcatatatttgtccttttgtgactggcttgtttcacttagcataatgccttcagggttcattcatgttgcagcgtgtatcagaatttccttcttttttaagatcgaataatattgtatatacgtgccgcattttgtttatccattcttctgttaatggatattggggttgctttcatcttttaaaattttgttttttaatgcatgtacaatatttgtattttatttctattttgtttcctattattattttatagttttgctgacttagaacatatgtataattatttttattgcttttattaccactttctgatactaggtgttgctaagtaaaacattgattttgtt

SEQ ID NO: 241622 - DNA, 252 bp, Homo sapiens
gggtggctgaggcaggagaattgcttgcgcatgggagactgaggttgcagcgaactgaaatagcgccactgcactctaacctgggcgacagagtgagactccgtctaacggaaaaaaatgtttattttctctttggggtacttccttacagagaccttaggaatcaaccagactattctttaagtctgtgagaaaatttccaactcataaagttagatatttgggattcattcacccttctgcatcagcgtc

SEQ ID NO: 241623 - DNA, 201 bp, Homo sapiens
gatctgaacccttgtctcctgggagtgtggaaggttttctctgcctaccaagaacaagaaattaattctaattacatggaacagtgtctgcccctaagagggagacccagacactcactgctctggtaaggaagtgatagcaatgtgaaaaggtacttttcaaaacaaaaaggtaaagtcatgactctcgtaaagatatga

SEQ ID NO: 241624 - DNA, 617 bp, Homo sapiens
ggaggaaccatgctaaggcatgaccaatgaggagaagcaagagagcctgtttgtattcctgggagccagtcctgttctattcagtcgtcaggtccctgtgtgtgtgtggagggggttgggaaaggttgggggtagatgaatgtaacctacatggtgatttaaaacaagcaactacagtcatgcatcacttaatgacagggatacgttctgagaaacgcatcattatgtgaacactatagggtatagttacacaaacttagatggcatagcctattccacacgtaggctctatagtataactccttggatacttacggtatggcctaggtattgctcctgggctacaaacctgtactgcatgtaactatactgaatcctgtgggcagttgtacaataacagtgagtttttgtgtatctaaacatagaaaaggaacagtaaaaatatggtattataatcttaccggaccaccagtaagatctggtgatctgacattgactgaaatgtcgttatgcagcccatgactgtatttcctctctgacttccccaggagagctggttccagaaggttcggatgagtcctgaatgtttatgtatggcattttcctttaccaaaaca

SEQ ID NO: 241625 - DNA, 402 bp, Homo sapiens
tagtaagtattttgatggacaaaggatatatgttacattaatttatagttttaatatctaaaaaacactaagaatttagagaaaaggttataatactggccactattaatcagtatattcattcattaaaaatagatttacaaatttctatgtggtttgtgtgagaggaggggccatttgtccctttattcacttaatgtctggtcaggtgcatcacccatggtatctgcttgttaattaagctgctaattgaattaattaaaatgaatgtaattgctagattaatttttcattatctatctcagtttattactttagataattattatgtatagattacttattttttggaagaaataatttctatttctgggaatagatgtccttatggatctaaaaggg

SEQ ID NO: 241626 - DNA, 1010 bp, Homo sapiens
agagtatatgatgtgcatgggtggggtaattcaatgctgtgaagatatcagttttccccaaagttgatctttaagttcaatgcaatgtcattcaaaatcccaggtttttgttttgtttttgtttttgttttaaatgaacctgagaagctgattcttaagtgtctatggaagtgcaaaagaccaagaatagccaaaatattcttgaaaaataacaatgtggaagaagtactctataagatttacaacttattataaagatgtagcaagtaacattggtaccaggatgaaaaagtatgccaaaggaactcaaaagagaacacagaaacagaaccacgtatatatggacactgatttatgacacagtagctgcagagcagtggaaaacaatgtggaccacatggatatccatataaataaaagaagaaaattgacctgtgactcatattataagcaagtatcaattcctagtgaactgtagatataattgtgaaaggcaaaacaataacaaagcttatacaggataattttatcatgattcaaaaaaaaaagaaggtttcttaaagaggaccagaaaggaattaaccaaaaaataaaagattgacaaattggattatatcaaagttaagaacatctactcatcaatagatactgttacaataaccaaaagcaaaacacacagtgggaaaattaacaaatgattcataaactgattatatttagaactcctatagatcagtaagaaaaatgcagtaactcaaaaaggggcaggagacgagaatgcaaacaaaacccacgttatactactgcacatccactcaaatgattaaaaagactgccaatacgaagcattgctaagaatgtgtaaattaatctcatgcagtgctagtaggggtcaaattaacacaaccactttgaaagactgtcattatttacaaaatgtacaaaatatttacaaaatttagacatatgaataccttatggcctaaaaatcatactaccgagttataccc

SEQ ID NO: 241627 - DNA, 1420 bp, Homo sapiens
ggcacccagactccttgcgggagcgagcgcgtctgggagcccgcggccggagaagggctgcgggttagggggccggcgcccgcggttcaggattccagaattggaaataacgggagggaggacctggtccagcttcccttcctcaaataaggaaattgacacctggcgtgagtacctgtggagaagaaacaatggattccttagaccatatgctgacagatcctctggaacttggtccgtgtggagatggccatggcacgcgcatcatggaggattgcctcctgggaggcaccagagttagtctgcccgaggaccttctggaggatcctgagatcttctttgatgttgtcagcctctcaacatggcaggaagtgttaagtgattctcaacgtgaacacctccagcagtttctgccccagtttcctgaagacagtgctgagcagcagaatgaactcatcttagccttgttcagtggggagaacttccgctttggaaaccctctgcacattgcccagaagcttttccgagacggacactttaaccccgaggtggtcaagtaccggcagttatgcttcaagtcacagtacaagcgctacctcaactcccagcagcagtatttccatcggctgctgaagcaaattcttgcttcccggagtgatctgctggagatggcccggcggagtggccccgcccttcccttccggcagaaacgcccttcaccatcccgcacacctgaggagcgggagtggcggacccagcagcgctacttgaaggtcttaagggaagtgaaagaggagtgtggtgacacagccctgtcatctgatgaagagggcacgttggatttacaagaacaatttcttttgaagatctcagctcatgggttccgagctctccagcacgttctcctagtcctgcggtgcccctgcgggtggtgcccacactttcaaccacggatatgaaaactgcagataaagtagaactgggggacagtgacctgaagataatgttaaagaagcaccacgagaagcggaaacatcagccagtaagatgggaagggcgtgcggccgtgtggttttcagcctgatgtctcaggattggctgtcctgaggaagacacggggcatcactgcctcgtctgtatgtcctccctaccactgtgggcacaggagcagctggcgaggctagctagcatcaacgatgtgaggcacggtggctttgacttcgcagggcctgctgaatgtagtgtctgccttaatcgttacagtgacactgtcgagtataggaatcgtctccacctcagcagtgctcaagaggttagggagcttgtccttggtcctatagccaggaagcagcagagccaggagttgggccctgggtttgtcccactttttactgtttccattattccatgctaccaagtt

SEQ ID NO: 241628 - DNA, 1340 bp, Homo sapiens
ggcacccagactccttgcgggagcgagcgcgtctgggagcccgcggccggagaagggctgcgggttagggggccggcgcccgcggttcagagtacctgtggagaagaaacaatggattccttagaccatatgctgacagatcctctggaacttggtccgtgtggagatggccatggcacgcgcatcatggaggattgcctcctgggaggcaccagagttagtctgcccgaggaccttctggaggatcctgagatcttctttgatgttgtcagcctctcaacatggcaggaagtgttaagtgattctcaacgtgaacacctccagcagtttctgccccagtttcctgaagacagtgctgagcagcagaatgaactcatcttagccttgttcagtggggagaacttccgctttggaaaccctctgcacattgcccagaagcttttccgagacggacactttaaccccgaggtggtcaagtaccggcagttatgcttcaagtcacagtacaagcgctacctcaactcccagcagcagtatttccatcggctgctgaagcaaattcttgcttcccggagtgatctgctggagatggcccggcggagtggccccgcccttcccttccggcagaaacgcccttcaccatcccgcacacctgaggagcgggagtggcggacccagcagcgctacttgaaggtcttaagggaagtgaaagaggagtgtggtgacacagccctgtcatctgatgaagagggcacgttggatttacaagaacaatttcttttgaagatctcagctcatgggttccgagctctccagcacgttctcctagtcctgcggtgcccctgcgggtggtgcccacactttcaaccacggatatgaaaactgcagataaagtagaactgggggacagtgacctgaagataatgttaaagaagcaccacgagaagcggaaacatcagccagtaagatgggaagggcgtgcggccgtgtggttttcagcctgatgtctcaggattggctgtcctgaggaagacacggggcatcactgcctcgtctgtatgtcctccctaccactgtgggcacaggagcagctggcgaggctagctagcatcaacgatgtgaggcacggtggctttgacttcgcagggcctgctgaatgtagtgtctgccttaatcgttacagtgacactgtcgagtataggaatcgtctccacctcagcagtgctcaagaggttagggagcttgtccttggtcctatagccaggaagcagcagagccaggagttgggccctgggtttgtcccactttttactgtttccattattccatgctaccaagtt

SEQ ID NO: 241629 - DNA, 305 bp, Homo sapiens
gtaggtgtgagttactgcacccagccaacaacaaagaattaattgctaaaaaacagttgttacagaaattacattgtgggagagtgattattggtctgggaagtgtaaattatagattgtgatctgtttatcatttattctcagtctcattttactcatctgtaaaatgaaggcatatgaaatttatgaatttaggagttactgtaggagcattctgagaaaagagctcttccaggtaagacttgaaaattccagtgggaatgctgtggtgaaagggagggaggagagctgtttagctgtaatta

SEQ ID NO: 241630 - DNA, 473 bp, Homo sapiens
  misc_feature (32)..(32): n is a, c, g, or t
  misc_feature (49)..(49): n is a, c, g, or t
ataaaatatatgttaatactttgacatgttgnaatgtatgaaagatagncaaggaataaagaaaagttgacgcccttcaccatcccgcacacctgaggagcgggagtggcggacccagcagcgctacttgaaggtcttaagggaagtgaaagaggagtgtggtgacacagccctgtcatctgatgaagaggatctcagctcatgggttccgagctctccagcacgttctcctagtcctgcggtgcccctgcgggtggtgcccacactttcaaccacggatatgaaaactgcagataaagtagaactgggggacagtgacctgaagataatgttaaagaagcaccacgagaagcggaaacatcagccagatcacccggaccttttgacaggggacctgactctcaatgacatcatgactcgagtaaatgctggcaggaagggctctctggcaggtaaatgactgggcccctcta

SEQ ID NO: 241631 - DNA, 1509 bp, Homo sapiens
ggcacccagactccttgcgggagcgagcgcgtctgggagcccgcggccggagaagggctgcgggttagggggccggcgcccgcggttcaggattccagaattggaaataacgggagggaggacctggtccagcttcccttcctcaaataaggaaattgacacctggcgtgagaaggggttttgccatgttcgctaggctggtctcaaactcatggattcaaggggactgcccgcctggacctcccaaagtactgagattagtacctgtggagaagaaacaatggattccttagaccatatgctgacagatcctctggaacttggtccgtgtggagatggccatggcacgcgcatcatggaggattgcctcctgggaggcaccagagttagtctgcccgaggaccttctggaggatcctgagatcttctttgatgttgtcagcctctcaacatggcaggaagtgttaagtgattctcaacgtgaacacctccagcagtttctgccccagtttcctgaagacagtgctgagcagcagaatgaactcatcttagccttgttcagtggggagaacttccgctttggaaaccctctgcacattgcccagaagcttttccgagacggacactttaaccccgaggtggtcaagtaccggcagttatgcttcaagtcacagtacaagcgctacctcaactcccagcagcagtatttccatcggctgctgaagcaaattcttgcttcccggagtgatctgctggagatggcccggcggagtggccccgcccttcccttccggcagaaacgcccttcaccatcccgcacacctgaggagcgggagtggcggacccagcagcgctacttgaaggtcttaagggaagtgaaagaggagtgtggtgacacagccctgtcatctgatgaagagggcacgttggatttacaagaacaatttcttttgaagatctcagctcatgggttccgagctctccagcacgttctcctagtcctgcggtgcccctgcgggtggtgcccacactttcaaccacggatatgaaaactgcagataaagtagaactgggggacagtgacctgaagataatgttaaagaagcaccacgagaagcggaaacatcagccagtaagatgggaagggcgtgcggccgtgtggttttcagcctgatgtctcaggattggctgtcctgaggaagacacggggcatcactgcctcgtctgtatgtcctccctaccactgtgggcacaggagcagctggcgaggctagctagcatcaacgatgtgaggcacggtggctttgacttcgcagggcctgctgaatgtagtgtctgccttaatcgttacagtgacactgtcgagtataggaatcgtctccacctcagcagtgctcaagaggttagggagcttgtccttggtcctatagccaggaagcagcagagccaggagttgggccctgggtttgtcccactttttactgtttccattattccatgctaccaagtt

SEQ ID NO: 241632 - DNA, 525 bp, Homo sapiens
cacaagctctctgttgccttaggcaataagatgagaaattacggaagccaattatctatttgttgtcatggcaattgctaggagcagggtgggaggcacgtgacaccagaaaacaaaaaatacaacagacagtgtagactggggctacagctgcacatcagagtatctgattttgtgtgtagagaatggggaaggacctacatccctacattgatcttttgggtcacagctggttccaagaatatatagcagcaggtttcatagcgttaatctcttaataaaatgagaagtttttataacatcaaatttcatcttaaaattatctttatgcagaatatttaataacacaagttagtaatataagtgagaaagtaatctatagagccatatatagtatgatctcaactaaataaatataaacattaaaaagaaaaccttgctaatacacactgtatcctgtatcaaaatatgccatataccccataaatagatatacctactacatactcaaaaaaattaaaaatt

SEQ ID NO: 241633 - DNA, 194 bp, Homo sapiens
tgtataatatctccataagaagatattgtttgaaaggaaatccatcatttattaaaaatatgtataaaacacttacaatgggccaggcattgttctaagtagataagatacataaattaccaaaacacacaaagattcacaccattaaagagtttgtatcttagcatgagggaggaagaaaataaacaatagct

SEQ ID NO: 241634 - DNA, 366 bp, Homo sapiens
atctcggcctcgggaggaatggttcattgcatattctctcagagacagctgggcgcttcgcagggagtggtccccctccctgtcaccagggcaattctctttcacatctcccaggacagatggagaatgaagaaattaataattcatagtgtgtatttaagtggtgattcttcctagactgagacatacttgcattttgttcaaaaacatcttgatgaagacaggcccagtggtgacctaagagttagaacataggaagtagggaaactcttactaagtggccttccaaagtgctgggattacaggtatgagccacctcacccagcccattttgttttgtgattatcataaagccattctagtagt

SEQ ID NO: 241635 - DNA, 351 bp, Homo sapiens
tccttccttccttccttccttccttccttccttccttccttccctccctctctccctccctccttctttttctttttctttttttgatggagtctcactctgtctccaagctggagtgcagtggtgcaatctctgctcactgcaacctctgactattctttgtattctgttggactcgatatgtctttctctacggatctctccacgagcctttacattttttgttgtttcattctctcccgcatttcctcctgtgtcttcttgcatttgcctccgctggggcatgtctctgtctctctgcctgattctgcctgttttcactccttgctcctagcattggcccccttctct

SEQ ID NO: 241636 - DNA, 2230 bp, Homo sapiens
cattgcctcttcaaactacctcagtgggtaaaacagcaccagagagaaacgttgaaattccgcccagctctccaaatccagatggtaagggctacttggcagggactctggcaccactccaaatgagaaagcgagaaaaccaccccaaaaagagagtagctaggactgtaggagaacacactcaagttaaatgtgaaccaggaaaattgttggtggagccagatgttaaaggggtgccttgtgtcatcagttccggcatcagtcagctaggacacagccagccatttaagcaagaatggctaaacaagcactccatgcagaacagaattgttcacagccctgaggtcaaacagcaaaagcggctgctcccctcgtgtagcttccagcagaacctatttcatgttgacaagaatggcggcttccacactgacgctggtacctcacacagacagcagttttaccaaatgcctgtggctgccaggggccccattcctactgcagctctgttacaggcctcttccaagaccccagtggggtgtaatgcatttgccttcaacaggcatcttgaacagaagggattgggagaggttagtctttcctcagcacctcaccagctaaggttagccaacatgttatcccccaatatgcccatgaaagaaggtgatgaggtgggaggcactgcacacacaatgccaaacaaagcactagtacatccgccgccgccaccgcctccccctccccctccacccttggctttgcccccgcctccccccccaccacctccgctacctccacctctccctaatgcagaagtcccatctgatcaaaaacaacctccagttaccatggaaaccactaagagacttagttggccacagtccacgggcatatgtagcaatataaaatcggaacctctttcttttgaggaaggtttaagcagcagctgtgaactgggcatgaaacaagtttcctatgaccagaatgaaatgaaagaacagttaaaagcattcgcgctaaaaagtgcagatttctcttcctatttgctttctgagccacaaaagccttttacccaattagctgctcagaaaatgcaggtgcagcaacaacagcagctctgtggaaattatccaacaatacactttggtagcacgagtttcaaaagggcagcatctgcaattgaaaagtccattgggattttgggaagtggctccaatcctgccacaggcttgtctggtcagaacgctcagatgcccgttcagaactttgccgacagcagcaatgcagatgaattggaactgaaatgctcttgccggctgaaagccatgattgtgtgcaaaggctgtggggccttctgccatgacgactgcataggtccttcaaaactttgtgtagcatgcctggttgtacgataagagctgagtgaaagatgcagtatcccttttccacacggaaaagccaaatagcatcagcaacaacaaatagaataatgcagtggtttctatcatgctaatttattttgctttggagcaggtacctttcctctatggcattattttcttgcatttctcataaaggggaggatgcatcccaactgaatggctcactggcatgtcttttatgtgttcagttgccattcctagctttggaaagtttctatctgtccatgtgtatacaagtcaatgccccatttttgtttttcttttaaccgaggtgtagataggaaaaggacatttttaattacttaataaccggaaatgcagatgtgtaaggagaatgagaggaatgagttaaagtggttatgcatttttctatagatgagccattacagcaaggaattttacagttgacttctctgaacctagctttaccacagtgattaaatcctatttagaaaggggaatctgatttaaatgtgtgattccttgtatttgctcctatcacaaaagatatattaaaggaggtatgccattaatgaaatccactgtcctgagtattatctttcctcctgttgtactttctcagagactatggcagaatatctggatcttccttggattttgtacacatattgtagtgaaatgtgtcctacatctgaaattgcatgggactcatgcccagcaatctggttctaggcctttgacacctgataatatgagagcaattggccagccaatagccataagcccagaggattttagagcttcatgtgtggcttttaagagcaggtttg

SEQ ID NO: 241637 - DNA, 1002 bp, Homo sapiens
gattacaggtgtgagtcaccatgcctggatgctaatatagattagcaggaatactctggatgctgttgctgagaataaactctggggaagggtttattttcaggtggggaagtaagataactagttggaaggcaatgtataatccaagtgagagatggtggttgctctgaccaggttggttatggtggacgtggttaaaagtcatcagattttattttatttttattttttagatttttaaattttaattttcagttttttaagggtagatagtaggtgtatatatttatggagtaggtgtgatgttctgataggcatacaatggataacaatcacattagggtaaatggggcatctatcactttaagcatttttcatttctttgtgtaacagacattccagttatactcttttatctatttttaaatgtacagtaaatttttgttaactgatgaaggaaagaattctaaagccagtaagacaaaagcatcagataacctacaaaggaaaacctatcaaagtaacagcagacttctcagcagaaaccttacaagccaaaagagattagggtcctgtcttcaacctctttaaacagaacaactgtcagccaagaattttttatcccacaaaactaagttttgtaaatgaaggagaaataaagtcattttaaacaaatgccaggggaatttgtccctaccaaaccagcactacaagaaatgctaaaaggagttataaaccttgaaacaaaagcctgatatacaccaaagtggaaagcttaaaacccacaggatctgtaaaacaattatacaatgaaaaaagcaaacaaacaaactaggtaacaacatgaggaagagaatgatacttcacatctcaatattagcattgaatgtcagtggcctaaactagctccacctaacatacagaatggcagaatggatacagaatccaaatatctgctgtcttcaagaaactcacctaacagagaaggagtcctgtaaactc

SEQ ID NO: 241638 - DNA, 879 bp, Homo sapiens
ataaaaatatgaattgggctccttgccatgaaaaagggtagatttactcattgtgcactgtctacagtgaaactacatttatgagccatgagccatgaaatatattttgttgaaaggtataatgtaaggctggccctgtggttcaacagtcatattatatatatccattctggaaatgaacctgggatcctggcttttgtgagggatggagagatggttatagtctctctcatgggagcaagtgggtatttgtatacttgaaaagcgcaggcacagatgttgctagatggagcaaatcatttcttggtctcattttaaaatgtgaactattgaatgaaaggctgatccagaaactgttgttgcttaacaaaagaaaatagtggaaagaatatactatgaaaaaaaagtgggtaaatcgagtccaagaaactaaaaagcaatagaaaaagtcagagaccccaagaacaaaaacaagaaagatgaaacaaataataaaacctacatgcatcttcaaaaacaaaaccaaaatctggaacatgttgcataatattttacatgtgaacatcaaggctccaaggtaaagttacatttaaatgatatttaatatcttaaggctaaattttattcagttctttattctcttaaagtcctacagcctacaagcatgaagccaacaggatgtaaaacaacctaaaaccccctttgagataacagatttattaaacaattgtcttaaatgctaaaattgaagtttgaagagatagacaatattgcattttataatgtaaaaagttatacatgatgtagacatttatttcttatctcttacaaagagccagaatcgtgtatctttaaaataaatttacttcaaaatcttta

SEQ ID NO: 241639 - DNA, 124 bp, Homo sapiens
tatgtagtaatttcccaatttgatttttctctataattttatagcctcttgcaggtggatcacctgaggtcaggagttcgagaccagccaggctaacatggtgaaaccctgtctgtactaaaaa

SEQ ID NO: 241640 - DNA, 222 bp, Homo sapiens
gagcgtccagactcccctctccgatccctcattctagcttgggtgtcccctctactgaggactctaagatgtcagaaacaatgaacagctgtcttcatacttaaaaaaaaaaaaggatcacagcagtactcatgatgagaaggatcctttggctgccccttagcacctgcattaccatccatcaataactgtcttccattgtaaagtctctctccccgtacc

SEQ ID NO: 241641 - DNA, 446 bp, Homo sapiens
ctgaactccctgtgttgttgcttaagatttttacccaggcatgaaaaggaaatgaattctgccaactcatcgctgtgtctgtgggaacagaaactcagggcacctattctctgcaagaaaagcatcaattccctgtaagaaaagtttcccacctgagacaatgacacagaccaacataaatgctcttttggttttatgatttctgatattagattttacttgatttttttatttttaattttttaaatttcattttgagagttaaaagggttacttcttttatttccagcagttcaaggaatttcagagcaatcttggtccagagttggtaataaagacatttaaatgagatgggaatactgtctgttatgctgaccagtactaagtctcccgcagttcatttttcctgagaataaatgcctgtctgatacatcaagacctattta

SEQ ID NO: 241642 - DNA, 513 bp, Homo sapiens
ataacaatcctgttacatctgttttcacacactgtcaaactcaaggtgtacagtatctagacagtatatggaataactaataatttgcttaaaacccagtccttaaccatgggtattcatcactctgaattttaagccttgacatttatgtctgctacagtggtatctggtgatagagttgagacccttgggagtttagtccttagaattttcctttcctttgggcagtcttaagaaagttaaattttacaaagtatctcttgaaagagcattggctgtggtctaagagtagaattaaatgtagcaattttattatctttggggcaaaggattctaccagtgtttaaaaactcattttaaagaaatataataattttgacataagcctaatcagctgagtgaggtggctcatgcctgtaatcccagtactttgggaggccgaggtgggaggggatcacttgaacccaggagtttgagaccaccctgggcaacatggggaaaccccgtctctac

SEQ ID NO: 241643 - DNA, 346 bp, Homo sapiens
cagtgtcaagatggggactgatgcccctttctgctgatcatgattcctgattaggaggctttgagcagttatttaagctgtctgagctttaggggtttttgtttttgtttgcttgcacagggcttgctccccccttgccagtttgtcgtgatagttaaatgacataatatatgtgagcatgcattgtaatttaaaattgtctatgaatgtaagaatcattagttatgaggatatacggtctgcccttaaacttattgtatgtgccatttaaatgtgtgatgtcctaaatgtagaggtttaaatataccttcacctaatagatgtaataaatgtgctcttgaactac

SEQ ID NO: 241644 - DNA, 886 bp, Homo sapiens
agcaaatacacccccttcctcttgtaacccggtcaggcctagggttcctccctgagttccagaataggccacccagttggggcggacccttaaggcattctgggcccacgcctgcctataaaccctcatagtgtgacctttgacccctggtgtgatcttgggcccgggctgggaccagcccctagtgtgggttgtgggggcggccatggagctgggcagctgcttcaagacctatgaggacttcaaggagtgcttcagcgcctacaaaagggagaacaggtgctccttcattctcagggactgcgtctccgtccgcttccacaacctcaaccatggcacctccatccgcgaagacatcctgtatgtgcaggtgaaatttgtctgcattcggacccaatcaaacaggaagagaacgcgggaggcagacatgtgcccagcgtacttgctcctaaggtacaacgagagactagatagactatttatcagtgaactaaacacacagcacatacatggtgactctaaagtggctagtcctggaggagacaccactggcaaatctcaaaagacaatgtgcctgcagagactccagcctgtgcagcccacaaccaaaaaagaccttgacactgccgagaagtccctggttgagccatcgttttgcctagataaggtacaagtgtcctcaaagccagagcaggaaggcatcactccttctgacctggccaagatagcaaaagtgatgaagaactttcttaaggtagatgagggttccatggcttccttcagtgtgggtgacagccagcacctggaccggctcagcttccagagcagtaagatgaccgacctgttcatccgcttcccagagaatctcttgctacaccgggtggag

SEQ ID NO: 241645 - DNA, 676 bp, Homo sapiens
agcaaatacacccccttcctcttgtaacccggtcaggcctagggttcctccctgagttccagaataggccacccagttggggcggacccttaaggcattctgggcccacgcctgcctataaaccctcatagtgtgacctttgacccctggtgtgatcttgggcccgggctgggaccagcccctagtgtgggttgtgggggcggccatggagctgggcagctgcttcaagacctatgaggacttcaaggagtgcttcagcgcctacaaaagggagaacaggtgctccttcattctcagggactgcgtctccgtccgcttccacaacctcaaccatggcacctccatccgcgaagacatcctgtaagggcgggcggggcggggcgggccaagagggtggggaggaggctggacctccggagggctgcctggaggaggaggggtgcataggcacgcattgggctgcgtggccattcattcaacaggcactcattgagcacctgctgtgtgccttgtgaagagagctaagcctccacggccattggtttttgaccacccactccactttcactccattcacaggcttttctggaatttataactgcagtttctcccattgttttgagcagctgcagcaacccaaatacaaagtatggctttcataaacggataaaaacac

SEQ ID NO: 241646 - DNA, 843 bp, Homo sapiens
aaaaagaaaaaaaattcaaaaagttgaattctcctcacctactctgtcagctgttatttatttattcctacctaccccttccttatttttacatttttcaaactgacaaataataattgaccagcctgggcaatatagtgagaccctgtctctaaaaaaaaaaaaaaaaatagccgagtgtggtggcgagtacctgtagtcccagagtatttgggactacaggcgcgcaccaccaagcccggctaatgtttgtatttttaatagagatggggtttccccatgttggccaagctggtctcgaactcctgacctcagatgatccacccacctcggctcccaaagtgctgggatcacgggtgtgagtcactgcgccccacccatagtgatgtttcaatacatataacacataatgatcaggttcagttcctcattctttatgccccttacctcttggggctctcagaataaactgtttatccccaaaaccacatctttgacctggagaccagcaaatccaagagcttctcctccctctcactattccagtgggtgtggggagctgctgaccagcagtggatgatggagagaaggagggaagcctgtgttggggtacccaaaccacccagatctgggacacgccctactgttctctgaagcagagcccaagaggactcaccatctgcagtgggcctccctatagaaccctccagcagggctgggcacagtggctcacatctatactcccagcactttgggaggccaaggtgagatcatcacttgaagccagaagtttgagaccagcctgggcaagaaggcaagacagtctttaattaaaaaaataaa

SEQ ID NO: 241647 - DNA, 205 bp, Homo sapiens
agtttataactgctaaaatgtgcgtgaaatacgtcaacttaagcatttgcttaatttcacatttacatattaaagattctattgaaagacatggtaattttgtgcttagttgggataaagaaaatgaaaagaagcttcaaggtgtgcatatgtgtcttcttgaaagcattttcttcatcctttgaaaatttgttcgtattttctc

SEQ ID NO: 241648 - DNA, 414 bp, Homo sapiens
acccattacagggcagattaatgggcaccagaaacatatgtcaaatagcaatcgctgctaatggacaggaaatccccacattgtcagggcagttgaatttagcaaccactcagttccagcctaactctaaaattagaaagtcacctatttccttctcttttcctaagcaactgtatgtttaatgacacagcaacaattactatgaaagcaggtatccaaactaaaattttttgattaatcaaatattttccctcacttccatttttcccacttggtggcatatagaaacatatcctcttttccatgaccgtggacctccttacaactgtctgctgtacatgtatcccatgcacaaatctgggaacaatcttcaagaagttcatcttagaacttgcaactccctgggaggatctc

SEQ ID NO: 241649 - DNA, 357 bp, Homo sapiens
tgcctgtaagcaacaatcaaaacgtgaacaaaaaccttcttccacaggaactggcattgtcttcattcagacagagccacagctcccacctctcacatcacaaatcaagagaatcaccagtcattggaatgcacaaaccagaattcttttcatctgccttcgagttaattgtgatttcccggtttctttaagaatctcaggtgttaagaccagcacagtggttcacacctgtaatcccagcgctttgagaggccgaggcaggaggactgcttgagcccaggagttcaagaccagcccgagcaacaaagcaagacctctaccaaaaaaaaaaaaaaaaaaaaaaagaatttcagatgc

SEQ ID NO: 241650 - DNA, 191 bp, Homo sapiens
cactcttttataaagattccacctccagtcctctctcctcccccctactcaggcccttgaggctattaggagatgcttgaagaactcaacaaaatcccaatccaagtcaaactttgcacatatttatatttatattcagaaaagaaacatttcagtaatttataataaagagcactattttttaatgaaaa

SEQ ID NO: 241651 - DNA, 258 bp, Homo sapiens
caagagaacagactttagggcccagttgtatttatctggccatctctaatgtctggaattattgttttgtgtgccctatatagaaactcattccatcctggactgtattgagaagcatgtttttctattcagtatcttatgtaatcacaaaagagtcttagtgtttgcttactgtgctcaaagattcacttgtatcaatttattgataaaatacccacttttatcaatttgtttttataaagtgttttgcttgtcagt

SEQ ID NO: 241652 - DNA, 487 bp, Homo sapiens
tttcctgtcttcatttcagccctttagattatttctccctgtgacgctatcaagcagcctgggttcagtttgacagttaagcattgagatatctctatcactaccctgtctcactttgcaaaaggaagagaacttcaatgctgtgcagcaggaaggatgccaggaaaattagattttattttcagctctgcttctcaccagcttgtgtgatattgggaaatttattcttctgctctggatcagttttcaatatttcaaatatgcgtggacctgtttccaaagagctaaaagacctccagaggtcctctcattattaagatatgatgatgctaataaaagcgtaacatccgaaatgctacctattacttctgtggaatgatttctccctggatgccttcttgttgcttactttcatttccttcagagaaaccaacaacccatagaatgttgcctttacagtactagaatggattgagggcatatcgag

SEQ ID NO: 241653 - DNA, 412 bp, Homo sapiens
acccaggggttctatggagatccctctgcctcggagggtctggagtaggcctcagacgctgcgtgtgtaaaaagcgcccagcctgttcccacattctgagcagtagggtcaggctggcagcacgtggctctgctggctctccaggccacagaacgtggctctgtgtccaaaggactcttatctccacggtggccccacgtgagcctccatggcgtagcccaggccagctgggccaaagtctgccaggagcaggacggggttctccaggggtgtgtttccccgaattcactggaaacggtgtcacaagcacgcacgcctgggtggtctcaggcgtgggctccctctgctgagtggagtgagagtcgctgcctctgacagggttgttttaaataaatcacccggttttttgagc

SEQ ID NO: 241654 - DNA, 523 bp, Homo sapiens
cagtacaccattgtctgtgccctcctagaactgagactcttaagtgagatgtaggcatccaggtgatgagggcagcttgtacaatttgcaaagcgaggaggaacctgggctcccagtgcacagcagagcgaccatgccagcctggactctccatgtgtgagatgtaagtttctatctaacccagtggtcttcaatggggacaattttgccctctagggagactttgaaaatgtcaggagacatttttggttgtcaaaaccagagagtgtggttgttacttgtatctgttatcacctctggagggtatcattgcttctggagggtatagcagctacattcattgcttcaggagggtatagcagctacatacttacatatatatgtatatatatacacacacacatatatacatatatatggctgtatttaataataatgtattaatacattatttaataatgtgtggctgtatgtaataatatatggctgtatttaaaataaaattggaaataactcacttata

SEQ ID NO: 241655 - DNA, 808 bp, Homo sapiens
ggataagacacagcagacagaggtgggctagacaaggacagatggaaatttggtgtctactggtcgccccaggcaggaatgactcagaaggaagcctggccgtcctggttccatgccacagggaaaggcaactgggtcgaaataggccttggtctccagcactatcagtgaccccagggaggtgacaggctggagcaagtgcagggcaggcaggggaggggacgccggccacagcgcactccacggggaagggtctttatgggcccctcctcggagaacccccggtctatctgtcagtctgggacaggccacctcaacttgccaccgaggacaccaaaactctccacagacccctctgcccctctgggaaaccccactgtgctccaggacactcaaaaggaaaggatccctggacaagaggtcctgccaggaaaatcagccaaattttggccaacgaccagcaaggtgcacagggaagagcaggggctgaaactcagaggtccagcatcagcgacgcccttggcagcccagggaacacaggcaacgccttttggctctggagtcttaggctcttcatcggcgaactgagcccagggggaaggggctactatgtagggttgtcatgaggatgaaacgagacagcatctggtgtaaagtagaaaaggcataaagggccgggcgcggtggctcacgctgtaatcccagcacttttggaggcccaggtgggtggatcacctgaggtcaggagttcaagaccagcttggccaaccctgtctccactaaaaataaaaaattttgccgggcgtgg

SEQ ID NO: 241656 - DNA, 339 bp, Homo sapiens
attttcatacttttatcttatcttttctcatattactttgtcttaattgtttgttcgaaactattagtatcggcctgccatggtggctcatgcctgtaatcctagcactttggaaggccacggagagaggattgcttgaggccaggagttcaagaccagactaggtaacaaagcgagaccctgtctctacaaaaaaaacacgaaaattacccgggagttgatgacttgcacctgtagttccagctactcaagaggctgaggctaaagaattgcttgggcctgggaagcggaggctgcagtgagccaagatcgcaccactactccagcagcctgtctcaa

SEQ ID NO: 241657 - DNA, 628 bp, Homo sapiens
ggcagcagatcaagtatatgaatgctgcttcctgagccccagtagcatgctgtccccgtcatctgtaatccctctgtgccctgggagcagggtgatcagcccattttgcagatgaagaaactgtgacttagacatcctgcatttggagagaggcagagctgggagccggactctagggcccatgctattccttcatgggacacgtccctgagatttccctgggcttgctgcggatttatcttgttcattgttgcccgccatgaggggacttgttcaactataacagtgctggcgaagaatagggctcagtgtgtgcttgttgaatacatgaatgaataatcaatgacccctccctctccgccatctgcagtagcctccacgaaactgcactccgtggcgctgcaggcacagtgggaaaccaggcaaggcgaagttcatggtgccaggtgcccaggctgctggagggggaagctgaggattgggctgcctgacttccttcccccgcaggccgaggactgactgaggccccagagtgccccttcctgggtttggtcagatgtgggcaacgctctgtccagcccccaggagcagcaagtcggagatcccagatgatggagatcccagagga

SEQ ID NO: 241658 - DNA, 733 bp, Homo sapiens
tctagccagcagccataattttcatcagtgaaaagtgctggcttgatgggttgtttactctgggctgtttcattctacccccattttaatagaaataacagaaaatactgaagaaatcattttctcccccatttttttccaagacaaaaatttgaaacagttccaaatatttattgtatagtattctccacattcacccaccgattctcctgttggaggacctgttcttacctaagtatagacgaatgctgtgctactagagtttatgataatgcattacagcaagggtcagcaagctatggccagatttgtcccacagcctggtatggtaaataaagcgttactgaaacacctccatgtccactcatttaggtattgtatggctgctttcatgctacaagggcagagttaggtagtcatgacagaccgcatgccctgcaaagactgaaatgtttactgttttgccctttacactgactagacaacttcttttagttgagcctctcactagagcaccttgtgtcttttttacctttttcagtggttgagtggacttttaacctgaaaagccaatataaattgaggttgagagcataaactccacagtcagctaggctgagtttaaatctcggctgtatgaccctggacaggttacttctttttgcattgctcatctcctcatttgtgaaaaggagctttccgaagtgctacctcataggattattataaggat

SEQ ID NO: 241659 - DNA, 262 bp, Homo sapiens
tattgaagtagctaaagtttctaaagtgtgttaatttgcatacttcctcagcagtccagcgtggaggataaaaggggtatcttgtgagtcgatttgaattgtaatcccgtttttttcacttgctagctgtgtggctctgggaaaattacagtttttatgagctttggcttcctgatcaataaaatagaaataattaagtgatacgtgcaaagcgcttagcatggaacgctctcaataaatgtttgccatttttagtgtctgc

SEQ ID NO: 241660 - DNA, 495 bp, Homo sapiens
taaagataattaacatctgtttctcctaaacaatatgaggaacttagaacgttttaattttcatcttcccatatgtcaagatattgtttttgttgttgctgtttttattgttttttaattttctctttatcaatagatggttttttggaagcagttttagacttacagaaaaatattgatggaaaagtacagagagttcccaaacgtgccctttctccctcaccacgcacacaattttccctgttattgacatcctatactagtgtaatatgtttgtcacaattgagtcaatattgatttattactaactaaattccgtagcttacattagggttcagtcttggtgttatacattatgtgagttttgacaaatgcatgatgacgtgtatccacaattatagtattgtacagaatagtttcactgccctaaaaatccgctgtttcctacttgttcatccctctcttctcccgaaaccgtagcaaccactgatcttt

SEQ ID NO: 241661 - DNA, 773 bp, Homo sapiens
ttccccatacttctcccccagttctataaaaacctcctcaaaaaattcatcagagtgttcctgcacctcaacatcgctcagggcacagcgcaaaccgtcggccgactgggaagcgttttgagggttacagtaaatgttcaagagggcaatggtctggctaaacgtcggtttatggtgcaaccaagagcacctgtctccatgaagacatgctccaattttgaaatcaaatgaacagttgactttctcggtgccaaagatggaggctggacactccgccatttcccacccgccgccgcccctgctgacgcccgcgggagacctgtggagaatcttaactgctggattgaatatgtcatattcttcctttaaaaatccaccaaaggccccgaagtaatggacgtgtttttaatcaatctaatacataaatcatgcatcagatatacttcaaaacagagcagctagcagaacaccttgaaagattcattagaatattttttttttttttacagacatgcaactaagttaaataaatgtgtgtcaactcaaaactgagatgagaaacggcagggtgcttcatagattgagactcaagaacatgggaattctaatcttgtctctgttactgactggtttaatgactttagtaatgtttatgacatatttctaactactcttcctttggccaaaacccagaacaacgtgtaatagagcattttgagcttctaagaaaatggccctatttcagttgacagcagtaaagcattgtatttata

SEQ ID NO: 241662 - DNA, 720 bp, Homo sapiens
gttctgatgatgtgtgtggtcctcaccacactgccctgcctcaccttttccatagcagtgactgaggttcaaaagagcattaatgggtccgctgatgtcttacctgatatgttacctgacctgcccgtatctctggttctgttatccctgatcatggttgatattattgaaaaactcaggatatatcctcttagagggagtcaaaagagtagtgaaaatggacacatccattcaacctctttgcaacacataaaaactgtgacggagcaagtgaggcaaagtccagaaaacgctgcatctccccaggcaaccaacagcacccaggtgtcgcagccatcaggagccatgacacggagccaggagtctgtgttcatgggaccccaggagccctcctgtgactccggaatcctgagaatgatgtcccggcgagatgtccgggcagagttattcttatggagctttctcctgtggtctgacacgatagaaatggtgcgtgtggctggtcaccccaacgtgtacaagtcaagctggctatacccagtctacatattcagttttatttctctccttcgaattacattcactccccaaaaccctcttctcaattccctgagcgtcctgctgcaagatttaccattcgtttttgttagacttggtttaatcattgccctggggactatcacacccgtactgggcctgtgtaaaaatatcctcgtgact

SEQ ID NO: 241663 - DNA, 326 bp, Homo sapiens
aatttataaaattatcatataatgtatattaactatacatctgggaacagcaatgacaaacaaggcttctttgtgttttagggccagataagaaagtaattggttaatagccatttgtcaccactggtgaaaaatcaactcaaaatcatgttttattatttattagagttatgagcattatctataagattcatgacaccatgacttggtgtggtggctcacacctgtaatcccagcattttgggaggccgaggcatgtggatcgcttgaatacaggagttaaagactagcttggacagcatagggagccctcatctctattaaaa

SEQ ID NO: 241664 - DNA, 469 bp, Homo sapiens
gatgagtctttaatctaaagaggaatattgttgttattaatgatgatgaaaaataagtacctcatctgatcctctcaatgtcatgccctaagaagtaggcactattagtatctccattttgcacatgagaaattggagctttggtaggttaaggaagaaccacaggattacagagttaggaagtctccaaatccatccccttaaccattagtgctatagatggtgactgttcaggagcctgatcatctctatgaatcatcctggtatgagtcctgggggaggttgccctcctaggaaaattgctattccctgccccatccagaccttttatttttcacataaaacaagcaaatccagaatggatagcaggcatcctcactataataagagctacatgtggaggctcagtgctcgtctttgtttctgcttgttggggaaataaaggagagaaaagatttgattcaaatgc

SEQ ID NO: 241665 - DNA, 380 bp, Homo sapiens
agatggagtctcactctgtcacccgggctggactgcagtggcgtaatctcagctcactgcaacctccgcctcccgggttcaggcaattctcccgcttcagcttcccgagtacctgggactacaggcgcccgccaccgcacccggctaattttttgtatttttagtagagacgggttttcaccgtgttagccaggatggtctcgatctcctgacctcgtgatctgcccgcctcagcctctcaaagtgctgggattacaggcgtaagcaaccgcgcccggcctgttttattcttttattaccgtttttccctgagttttgaatcattcatatctttatttaaaaccacttcccagttatttcaaactttcttaattcccgtg

SEQ ID NO: 241666 - DNA, 525 bp, Homo sapiens
taagagacagtctcgctctgtcacccaggctggagtgcagtggcaccatctcagctcactgcgatctctgcctcctgggttcaagcgattctcctgccttagcctcctgagtagctgggactataggcgtgcaccagaacgcccagctaatttttgtatttttagtaaggatggggttttactatgttggccaggctggttttgaactcctgacctcagatggatccgcctgccttggcctcccagagtgctgggattacaggcatgagccaccgtgcccagctgccactgatttttccaaaataattatgcatccctgggaaggaaataggaaatgaaacgttttgtatataatttggatttgtaggtggcctttgtaagtaatttattagaaggtaaacaataattatgtagaaagaacctggttggtaaatataataattatgaaaccttattaattttttttttttttgagacggggtctcactatgtcgctcaggctggagtgcagctcgtgctgatctc

SEQ ID NO: 241667 - DNA, 471 bp, Homo sapiens
taagagacagtctcgctctgtcacccaggctggagtgcagtggcaccatctcagctcactgcgatctctgcctcctgggttcaagcgattctcctgcttttgtatttttagtaaggatggggttttactatgttggccaggctggttttgaactcctgacctcagatggatccgcctgccttggcctcccagagtgctgggattacaggcatgagccaccgtgcccagctgccactgatttttccaaaataattatgcatccctgggaaggaaataggaaatgaaacgttttgtatataatttggatttgtaggtggcctttgtaagtaatttattagaaggtaaacaataattatgtagaaagaacctggttggtaaatataataattatgaaaccttattaattttttttttttttgagacggggtctcactatgtcgctcaggctggagtgcagctcgtgctgatctc

SEQ ID NO: 241668 - DNA, 806 bp, Homo sapiens
actttctctaaacatgtatgcaaccataaaaagctatacataggatttctctcctttttaaaaagtatataatcttataacatttatggggtctttttccagttattttgctattatgaaaaatgttgcaatgaatagtcttgaatatacatccttgtgcatttactctctggtaaacatctagaagccaaatttctgcttggtagattactcatattaacattttttttttagttattccaaaattgctcttcaaagtaattgtaccaatttgcagttctgccagcactgtataagttttccatttctcgctaactccatcaattctttgtatcattgagttcgctgatttttgctaatctgactgatgtgaggtggtatttcattattctcatttgcactcttctttgattgctagagaggtaagagcatcttttcatatgcttgttatctatttatgcttatttttttcttggattttcattttgtctgattttaaacgaattctatgacattctgctgaataaagtgagttacataggttgtaaacaccttcccatggtagctattgaccttctttttgttgtcatcttgatacatggaagtatttagtttaatgtagttacattctcaatactttcttttctcaatatggtttatgcttttagcattataagtaatatggcagtactcagatgtcatcaagatattcttctatatattctttttaaatttagcttttcacatttaggcaactttgagtatgctatgaagtagtacccaattttaccgtctttcatataaat

SEQ ID NO: 241669 - DNA, 879 bp, Homo sapiens
gcctgctgcttgctgcaccatgaagtctgccaagctgggatttcttctaagattcttcatcttctgctcattgaataccctgttattgggtggtgttaataaaattgcggagaagatatgtggagacctcaaaggtatgaagctaaggcagaaaataaatccaaaggtcaattatgaatgagagagaaggtattgggagaaaagtgtgttatctaggtagtccaggaaggtcttcctttcatgacaatacccatagacacttagtcccttgactcagggcattacttacactaggggtcctctggatgtttgatgagaaaaaacagaaatgacacaaagtcctttccagatggagacctcttttataggaggtccaaaggactggaagtattttgaatcagaggttgtgtgacaaatttcaaagatcccagaccattgatgattatgtattgggatgagagagaaagggggttggagacagagcaaattaagacattttcagtatctgggctatggacatatacagaactcttggacagatgattcctgtttagaggagctcacaatgtaaatgtgagaggcaatgagactttcttccatagatagtgtgtgaaggctcagcgcttccaggggacgagaaagtagcacagtttataccgtaagtcagacacttcaagttctggacctgttcacttagcagatatgtgcccttggacaagtcactcaaccacttattattctcttagtctcagtttccccatgtgtaaaatgaagatcagaaaagtgcctgctgcagagggtgtttgtgagtatgaaataagattatgcacataactttaccagagagtaaattccaggctggctgcttgagtaaggtgg

SEQ ID NO: 241670 - DNA, 523 bp, Homo sapiens
gcctgctgcttgctgcaccatgaagtctgccaagctgggatttcttctaagattcttcatcttctgctcattgaataccctgttattgggtggtgttaataaaattgcggagaagatatgtggagacctcaaagatccctgcaaattggacatgaattttggaagctgctatgaagttcactttagatatttctacaacagaacctccaaaagatgtgaaacttttgtcttctccggctgtaatggcaaccttaacaacttcaagcttaaaatagaacgtgaagtagcctgtgttgcaaaatacaaaccaccgaggtgagaggatgtgaactcatgaagttgtctgctgcaccatccgaaataaagacacaagaaaattcagactgattttgaaatctttgtaatatttccataatgctttaagcttccatatgtttgctattttcctgaccctagttttgtctttcctggaaattaactgtatgatcattagaatgaaagagtctttctgtcagccctggct

SEQ ID NO: 241671 - DNA, 517 bp, Homo sapiens
agtaagaataacataattcacttttatagcatcacattttatacaaactattttgttggtgaagaaaaacgtctcatctgacatgattgcaggggaactctccttgtgttctttctctcccttgcccctaatattcttgcgcccatctataagagcacataaaatgtgtggtatgcaggatggtaatgagatggcagactttttctaacatcagaatttcaataaggatgaaatttgcctccaaaagaggacagtgatcttttcacaaacactgtcctttgtcctgaggcacacaaaatccccaaatccctaaaatatttcatctgaaggtaagataattttgctctagcttaggctgaaaaagaaagaagggggaaaagccatctatcagatgcagccagaaaagtcctgttgcttagggagaaggtaaattaaaggctcctatcttatctgtatttcaattaaaatcttatttttggtccccggcagtgcaatccgttgaagtctttccaagtta

SEQ ID NO: 241672 - DNA, 366 bp, Homo sapiens
gaaccctactcagactctgcagtgagtgactctcccaggtgtcattctgactggaagtcaagagctctggatgtcacaggcctgtgatgtgggttgcttgctcattgagcttggaggtggattttcatactaaagtacctgatgcatttttttttggccattcctccacctgatgctaatgcttttaatagtggtagaatcctgggcaacatagcaagaccctgcctctacaaaaggaaaaaaaaaaaggctaggcacagtggttcacactcataatcccagtgctttgggaggctgaggcaggaggattggcttgaggccagaaggttgaggccggcctgggcaacatactaagtctcatctctt

SEQ ID NO: 241673 - DNA, 110 bp, Homo sapiens
gacaaaccaagggaaaatgggtgaaagatagaaacagacaattcacagaagcataaatccaaattgtcagcaaacaagtgaaaaaatgtttaaattaactagtagttaga

SEQ ID NO: 241674 - DNA, 468 bp, Homo sapiens
tttgttagtaaagcaactcctctagttgttgcttgagaaaatatgcatgagaggaagttctaagctttgctgcctaggctgggtggggtggctcatgcctgtaatcccagcattttgggaggctgaggtgggaggattgcttgcttgaggccaagagtttaagaccagtctgggtgacatagtgagaccttgtctctacaaaaataaatacaaaataaactttgctgccttaattttaggttagatataattttccctgtgagttttaagaggcactgcttcatagtattttagcttctcatatttctgttgagaaatctgatattattctcttttctgatcctttatgtgtgaactgtggtaggtttcttcttcttcctctttttcttattcctgctcctctttctcttcctccttaccccaccatggacatttgtagcatctgtattaacttgttctgaatattca

SEQ ID NO: 241675 - DNA, 327 bp, Homo sapiens
tgctgttgtcactgttattgttactgtggataatggcccttggtgtgttgcatagctccctaggtattctctgtttccatctttactttcccacaccaatatacattaagcattttgcatggtctaacttgtgtttattccaaccacttggaaaactcctggaaagaaattttacatttggctgttctatgctgctaatgacacttgaccttgttgaacaaatggcagagactttcccaaggatttgattgtttgtgaattatctgcatgtgtactttctttttgtgtgtatgtatttcattaaaaaatataaatacttatgaaaat

SEQ ID NO: 241676 - DNA, 897 bp, Homo sapiens
agttttgctttgtcacccaggctgcagtgcatgatctcaactcactgcaaactccaccaccccagttcaagtgattctcctgcctcagccttccaagtagctgggactacaggtgcacacaatcacgttgggctaatttttttgtattttagtagagatggggtttcaccatgttccctaggctggtcttgaactcctgagctcaggcaatctgccctcctcagcctctcaaagtgctgggattacaggcgtaagccacggcgcatggccatgtgaactaacattttccccataccttcagaatttcaaacaaaggtaatattgataatttttggtcaataatttttgaagtagtagactgtaacactgggcaggtcctaccatctctgccttagtttcctcatctgtaagtgtcagaatcggtctgctggctcagctgccatccagcttcaagcttccacctgaagtaagcccaggacaggggtgaccaaaaagacccactgcagtcacaactacttacagagcagtgacttctcgtggcccaaacgtgggtgacaggctggtaggagcagagagaggggtctggggaagtgtgtgtggctgcatgaccatttctcatggtcagctacaggaagctttagggacaagctctgtgtctctgtggagccagagtggcagagcgtggtggatcagcttcagccagccctgggctatgcagcccccacaacagcacttgcttccaaagctttcaaattcttcctccgccctcttttccaagcaacccacctccaccccagactcctcttgagtctgctttagtgccacccctcagggcccacctggaaaatcccacaaagtcctgagaagcttgtgacctgggggccttttctaggtata

SEQ ID NO: 241677 - DNA, 363 bp, Homo sapiens
gacttctttgatgcaggtggtcaccagaccacaccttgagagacactgcactagatggtgggtgcttcaaggtcagccagcaatcaggtctgtcttgattacttgagtctccagaacctggcactgtgcctgtcacatacgagtcactcaatcaattctcctccgactccattgagtacttatgatctaccccagtcatctggcacctcttcaaatgttattgtatattatatattatatattattcactgttttgtggtttataacttgtctatcatccaaatcagaaacatcccaagggcagagaacgtgcccaatgctctttggtgtctccacccaacagggctttccatagtgattttt

SEQ ID NO: 241678 - DNA, 525 bp, Homo sapiens
gcatgtaccctgtgccccagcgatgccactctgtgcatatttactcaggagaaatgaaaacatatgtctccagaaagattggtacataagtgttcttagcagttttcttcacgagagccccaaactggaaacagcccgcacgtccatcaacaggaggatagataaataaataaccatagatccacgcgcaaccgagtactgtttagaaatgaaaaggagcggtcgcctggtgcacaggacagtgggaacaaatctcagaaacgcacgccaggtggaagacaacaggcacgtgtccctgccgtacaacgccattcatgtgaaccactaggagggaacgaggtctgtggtgactgagagcgcgtgcgtggttcggtggggatggcctggtagagggctggtaggaggggtgcctgggggcccggcatgttttgttcctgtctggatcagtggttacgcccagaactccgagcagcctgtgatccctgcgttttactggatgttaaataaagacgaggagcccacttg

SEQ ID NO: 241679 - DNA, 409 bp, Homo sapiens
atcatctaatgtcattgtctccaaagatggatatatagttcttccccatgcatacattaactcttcccaccaaaaggcagaagctatttcctgtcctctttaatttggacaggccttatgattcacgttaactaagagaatgctgtgaaagtgatgttctggggcttccacgcccaaatcttaagagcttctgcttcctctctcttaaagttaacctctacataagaagtccaactatctgagactatcatgctgtgaggaagcctgagctcaccatgtagagaggccttgtggaggagcactgaggcaccagacatgtgactgaggcctttgtgtactttccagatgagcccaactgacagctgaatgtaatcgagttagtaatcccagccaaaaccatgtgaagcag

SEQ ID NO: 241680 - DNA, 285 bp, Homo sapiens
tcaggttggtgccaggatgctggcctgagagcaggagccagggctggaagcagggctgggcgtggctgggtctttcgaggcagagctcagaggcttgtggtgatcaaacagagccggagggggagccaggggaacagtcccacatgggaaacagaggctgagggtctagcgaggcaggcccagcaaggcaagccaggtgttgggccacaggcctggtggtctgccctcaagatagaggtttggagagcagtgccctgaagttcccccaaaagttgagatttaaaa

SEQ ID NO: 241681 - DNA, 599 bp, Homo sapiens
tgggaaaactggaatgcttaataaactggagcaataaaccacttgagttgttgaatgttaagggatgactaagtcaggagataggcaagtatacttaggggtgagatggtatgcaatgttaatttttcacttacttaaagagtttaaaaacagcttttcatactggaaagctagcagtgatgctcagggtcatcagaaggacttactaccattagccaatgcacaagctttatctagaaactgctttttctgtgatctcttctttcctttcattgttaaaagcatccaaaatttattgagtaaagcagtggataacagtttagagctacaaaaattcttgattgttacccttctaatttcagaaaaagccaggtatgacacgtaattttatgggaaattcagttttgtttgttagtaaatgagcagtgttgctaactatgacgaagttgacttggcttgcagctgctagaccacattctaactttgatgttcgttattttattatttatttatttatttatttttattttttgagatggagtgtctgtcactcaggctggatgacagcgagactctgtctcaagaaaaaaagttttttg

SEQ ID NO: 241682 - DNA, 593 bp, Homo sapiens
tgttacatatgtggtgcatgagtaatcaaagatattcaaataggataaatatgatacactattttctatttttccatctatcaaactgataaagatctggacagtattaataactaatgttaaaagtgtgtgagaagagatactcttacatattcatcatcacattgaaaattgataacatttggaggctaatttggaaatatataataaaagtcttaaaatgttatttcttttgacactataatttatcaccaaggaatatattctaaagaaatgattataaatgcacacaaagaattataaattagaaagttcataatagtgttatttaaaagtgagcagtcataaattaaacaatattaaaacgatagaattggttaattattatataatacttctacttgattaatattatgtagtaaaaaacatttatatgccaatacaataaatagggcataatttcaatttcatacagacctacacacacaagtgactctcaaggcttgtgcttatcacatgtacttatttgttctcttttgttctaaaactacaaccatgaatgtgaattctttttacaaccagaatcacacaca

SEQ ID NO: 241683 - DNA, 634 bp, Homo sapiens
aatggagatggggtctcactctatcacccaggctggggtgcagtggcacgttcacagctcactgcagccgcaagcgagctcctcctgcctcagccctccaagtttctagggctacaggcacatgccaccacacttggctaattttttgtgtgtatagaaataggggtctcgctgtgttgcagaggcctatctcaaactcctggcctcaagcaatcctcctgccttggcctcccaaatatttgggactacagactacaggcgtgagccaccacacttggcgaattttttgtgttttgtagacacaagagtcacacagtatgttgcccaggcctatctcaaactcccggcctcaagcgatccttctgtcttgatctcccaaagtgctaggattataagatgagccactgtgcccggccctagtaaacttcttactcaacaaataagtatgaagtcactcaggtgtatttccttgagtcctttttacccaatggggtcctggctgggagggattctgggacagacctggcttaaaccacacctaagcagatgtaatgtgaaatccctgacctggaaattccagagcagcatattctaatctctgcctgcaatataccagctttggcctctcatatac

SEQ ID NO: 241684 - DNA, 645 bp, Homo sapiens
agccgggacctgggtggctctataatttgaggaaaggtatttaaattctctgagcttcagtttcttcatctgtaaaagtaaaaatagtcatatattcttcccgggagttttgtgaggaataaatgagtatccaccacaaagcaagtacttcttaaatatcatattatctccccagttcactattagtggcaattcattggttttcttacaagaagggggttgtaacccatagtcgtttgtattctgccatgcacttctccaaacattatagtacaaacaaagcaataatgagaagttcctgctcctctcgtgcattgggttgtggtacctctcaaaactgtgttctggaccaggtgcagtggctcacatctgtaatcccagtcccttgggaggctgaggtgagcagatcacctgaggtcaggaattcgagaccagcctggccaacatagtgaaaccccatctgtactaaaaatacaaaattagctgggtatggtggtgtgtgctcatagtcccagctacacgggaggctgaggcaggagaattgcttaaacccaggaggcggaggttgcagtgagctgagatcgtgccattgcatgccagcctgggcaacagagcaagactccatctcaaaacaaacaaacaaac

SEQ ID NO: 241685 - DNA, 590 bp, Homo sapiens
agccgggacctgggtggctctataatttgaggaaaggtatttaaattctctgagcttcagtttcttcatctgtaaaagtaaaaatagtcatatattcttcccgggagttttgtgaggaataaatgagtatccaccacaaagcaagtacttcttaaatatcatattatctccccagttcactattagtggcaattcattggttttcttacaagaagggggttgtaacccatagtcgtttgtattctgccatgcacttctccaaacattatagtacaaacaaagcaataatgagaagttcctgctcctctcgtgcattgggttgtggtacctctcaaaagctgaggtgagcagatcacctgaggtcaggaattcgagaccagcctggccaacatagtgaaaccccatctgtactaaaaatacaaaattagctgggtatggtggtgtgtgctcatagtcccagctacacgggaggctgaggcaggagaattgcttaaacccaggaggcggaggttgcagtgagctgagatcgtgccattgcatgccagcctgggcaacagagcaagactccatctcaaaacaaacaaacaaac

SEQ ID NO: 241686 - DNA, 316 bp, Homo sapiens
  misc_feature (14)..(14): n is a, c, g, or t
  misc_feature (90)..(90): n is a, c, g, or t
gcacgagctctctntctctctctctctctctctctctctctctctctctctctctctctctctctctctctctctcgtgccgaattcggnacgagcggttatgctatagatgtggaagttgagaaagctgagaacaaatattccaaggcccccatctatccctaggggtttctttctctaagaaattctcttgtatgtacacaattatttatttcccttgggtggatgtataaaaatgctagttttaagattctaatctgttgataaatatatctggggtgggaatgtggcaaactttctaagttttatatttctt

SEQ ID NO: 241687 - DNA, 500 bp, Homo sapiens
cccctgggaggggtgcgatcgtctgaaggtgcatgagattttacactgtaactgcttggtaatataatacagaaaaggcaatcccaatccacatgagtcctaataaatagaaaaaaaattggggatgaggggaaaaaggcaggtagctgggagcttttaacaaggtcggtactaaaagatcagaataaaaccacatccagtttaattaataatagctataaactgaaataattccccatgattctgcccttgcttctcctttttacagagtcatatctcttcagtttagagaaatgacttttgtggctgttcgattctcacaacaacaataactaaatcagttgcacactgttatctaaaaccatctacaaactccagcaaataaaaagaagttcatttgtctattaaggcaagcatttagttgagcagaaatatcccagtaacactgaatagagttcgtgtaatcctatggaaatcaagtcatcttgttgcactgaagt

SEQ ID NO: 241688 - DNA, 142 bp, Homo sapiens
tagaaaaatgggtaaatggcaacaggtaattcacaaaagaagaaatacaaatgtcctctcctcccgccaccaccccccatgaaaaagaacgtgtgacttcagtagcaaaaacaggtccattaatacagtgagatattgctta

SEQ ID NO: 241689 - DNA, 368 bp, Homo sapiens
gggtctggagcaaatggacacttgctcccaagcagaggctagggctccctctttgtcaaagccagactcacttgtccaggagtctaaagtctgggccagggacagtgggagggctctgaaatggaaaaaacaagaaactatgaggtgtcttatgcctagttaataactcaagcatctctgccagcatgtcttctcagatgagtataactgagaagtggacgtttatgaaagggaatagagggtccctgttctcctataagtgttcttgttatgagtttccctaggaaacggaaaagaaggtaagaaagctatccccacctgcattccaacctcaatattccaaaagctcatgatacagtcaacaggtc

SEQ ID NO: 241690 - DNA, 417 bp, Homo sapiens
ccctttttatcctggacagtgagtctggctttgacaagagggagccctagcctctgcttgggagcaagtgtccatttgctccagacccccaggcatacagtgggagggctctgaaatggaaaaaacaagaaactatgaggtgtcttatgcctagttaataactcaagcatctctgccagcatgtcttctcagatgagtataactgagaagtggacgtttatgaaagggaatagagggtccctgttctcctactgccttgttccttccctgtttactactacccagttctacccctgcccttttagtaagtgttcttgttatgagtttccctaggaaacggaaaagaaggtaagaaagctatccccacctgcattccaacctcaatattccaaaagctcatgatacagtcaacaggtc

SEQ ID NO: 241691 - DNA, 305 bp, Homo sapiens
tgccgaggtcccggcgaggtcgggccggggctgatgacattatgggcccgatttggttttccttgttagaaacatgatgaaagacttggaaacctcctgtcttacaacccaccaactgggtgcagaaaccgcccggcgtttaagccacaagctcagacaaagccctggtgtttgctcaattcaggggaaaaagtgggtgtcacttctccacgcaggagacaattaaatcttatttcggcccacccgggatttcaacagagttgaacatgaacgcacagcatagtggtttggttttacaaagaaca

SEQ ID NO: 241692 - DNA, 505 bp, Homo sapiens
ctctcagagtcccttccttatcttctgaaatgggcataatcacctcgatcacagcctattgtgaggatttaaggagatgatgagtaccaagcccttggcacagtgtctgctgcagaaacaagcacaggagtgttcctcggtagcagtggacaaatgccaatgagaaggactccaggtaggggaccagcgtctgaatcccactacacctgcactgtctcaagaagacccagtgggttttagctttgcatgacattgcacctggagccactctctgtggatgctggtcttggctaaacggttcatccgggttttccttattgacttaaagcagcggtctccaacccttttggcatcagagactggtttcatggaagacaatttttccacagatggagtagcgggggtggattcgggatgattattgtgtactttatttatattattattacattgtaatgcgtaatgaaataattacacaactccccatcatgtaaatcagtgggaa

SEQ ID NO: 241693 - DNA, 396 bp, Homo sapiens
caacgggagggatggggcggattgggagaaagtgaagcagaaaggccacaggctcaaagacttttgtaaaaaatgtcaaaagccttggagcttgtttttcagctctggccttggggcccagagctttagcagaaggctctgattctgagggccatttgcttcatgtaacccggtggttagcgcagctggatcccatgtcttggaggagggccagctgcagctggaggagctctgagacccaaagcaagttcctggggtcctccaagcctgcacccgagtttgtccatgcctgtcatgggatggttgacaagtgtgaatgcctgtgagtacctggcacagcaccaggcacagacaggcaagctgctaatgtttgtcagttcccttcctcgtggcaac

SEQ ID NO: 241694 - DNA, 235 bp, Homo sapiens
atgatatttacatattttttaaaaatacacttccaaccaatgcctaaggttatagatcaatttattatggtgattgctctgtgtagggaaattggtcagaagaggtgaataaggtgaacttcaaggtgatttgtaatacttttttttcttacataaagttataaagcaaatataaagatcaaggtgaattctggggtggtaggctcgagactatttctgtgcttttcagtatttt

SEQ ID NO: 241695 - DNA, 267 bp, Homo sapiens
agggggtttcaccatgttggtcaggctggtctcaaactcctgaccgtaagtgatctgaccatgctggaccccgacagtgctgggacctggccagcactaaggactatctttatacagatggtgagaaggagtgtgcttgatactatgtttatcaacaatgaaaatacacttagaaaacatttatacagtagtcccccattaccttcatttttgctttctatggtttcagtctcccagtgccaaaaaatatttaatggaaaaatctca

SEQ ID NO: 241696 - DNA, 903 bp, Homo sapiens
atgccagctttgagatgcttttgagagtacacatcagtcagttggcaacatttatttatggagtgtctactaagtagctagtagtggaatatacaggtttatttatgtgtaaaaaagaaaaataaaatggatacacacaattcccccttcttcgagacccttgctgttccactattctactgtcttctcgcttctgtcattgtctgttctctgacagtctccactcctcctcatttgttggatggaatgatctgatccctcacatttgtagtttcttggcctgttaatttctatagacctttaccaccactccacttcactgtccagtcccatgtccacactgtgaacctcatcactaagaactcatcaaccttaaacttcttgctctctagctggacccttctgtccttttggctctctcatttccctcccgtcctcttcctgcatcctcctcatttactttcctatttcttcccttcctattatttcaaaagcttgctggaaggatttcctctctatcgtggcctgacaaataggagacattcaatgaatacttgagaaggtgaccttctccgcttctttatctcccattcattcccaacccactggacttcagcattgacctccacctccactaaggctgaggcagggggatcacttgagctcaggcattcgaggctgcagtgagcagtgacccgctgctgcactccatcctgtgtgacagagtgagaccctatctcaaaaaaaaagataaaattcaccattttaatcattttgaagtgtacaagtcattggctgagtgcagtggttcatgcctgtaatcctagcactttgggagtccgaggctggtggatcacctgaggtcaggagttcgagaccagcctggccaacatggcgaaaccc

SEQ ID NO: 241697 - DNA, 535 bp, Homo sapiens
atccaagcaaaatacttagaaaattatggtagtaagttcctcctgaaatgacagctgatgttcctatttttacattgtctacatagctctagaaagcatgagaatttgctgtgcttgctaaatcagtagtctgtggcatatgggcaaggtccagcacactgcctctgttactgcagcccatgagctaagaatggttttaaaatttctaaatagttgaaaaaaaatttaataatattatttcttgacatgttttatgagatacaaatttcagcatccataaatgaagtttttggctctcagccactttcatttgttttcctattgtctgtgaccactttcattctacagtggcagagtagagtatggcttatgatagagaccatgtggcctgcaagcctaacttctttactatctggccctttgcagaaaaaatttgctgacccctggtctacatgatccataccagttatatgtagttgaattctataaacagtgtggagcgaggccctttcatctgtttcatttgtgcagagca

SEQ ID NO: 241698 - DNA, 445 bp, Homo sapiens
gtgcaggtttgttacatgggtaaacatgtgccatggtggtttgctgtacagatcatcccatcacctaggtattaagcccagcatcttttagctattcttcctgatgctctccttcccccattcctctcccaccacaaccgacaggccctagtgtgtgttgtggaaccactattcttgactattctcattgatcttagaatctctcattagataatgggcattgaggatctctggcagagacttatagtttctaataaacacaaaatcctttagtcacagattgcttcatgaggcttatgttttatgaaacatactttggaactgctataggaaatattccaaaattcaataaacttatatttgataacttttccacatttaactgtactaagcacaataaaataggtagattctttactgggaaccaaccagcaacaacaggaaa

SEQ ID NO: 241699 - DNA, 721 bp, Homo sapiens
gacaggccttgaaatttagattaagtttctagaaggtgatgtgggtagaggtgggagaggattctgggtgcagaagtcagaaaaaaatagcatggttgtagcaaaattctagatgagcaaaacccatttcactagaacagagggcaagggtgcagtaggagataaatctggaaaggatcacttagctcatatcctatgatgaacacagtgaggaaattacacttaattccattggcagtgggttgatgaattttgcacagagtatatcattagaatgtaagcttcatgagataaaatgacaacaacaactgtgtgtctttttctctgactctttagagtctagcacagtgtctggcatagagagtgtgtgcttaagaaatatttgtgacttcgtgaatcacagctgtatcttagcaacgttaatttggcagcaccaaatagaatgagttataggggaagactgggagctgtgagaccaatttggaggtgaatatggtagcttggctgagaattaatgaagacctttgagctgagctagaacagaaaggatggaggctgactggtagaacattgtggaagtggaatctgaaggactagacatacaggagaggcagagaccctttcaatcaagggactagattcccaaaacagagggactagattcccaaaagagagtgacgaccaaaagaaagaaacctacacgttactgttttatgagaga

SEQ ID NO: 241700 - DNA, 597 bp, Homo sapiens
gttgatgtcatgacacttagcccatccttgctctgcacagaccacgtttctcaccactgtgctggtatgtagacaccagcatgatcttctgaagcctcggataatttggtgtggatagctttcttttggattcttttaaattttgttatcttaaagctttccatagtatttcatatggataggccacagttactttccatttactattatacttttatatattttttcttattttgatatgagaaacaatgttggaataatcatgcctagacataaataagccaatttcaaaatgtttgtaggggagactcatagtgttgccagaaaaaggggccctgacccagaccccaaaagagggttcttggatctctagcaggaaggaattcaaggcgagatgcagagtgcactgaaaagagagagtttattgaaagctactcagctatagagtagagcatcctcagaaagcaagaggagaaatgccttgtatttaagttttttttatgtaagtgtcttgtctatgtaaagactaaactaagctgtgtctacgtgcagatgggttgagagcatgacaaaatttactattctgttgatttaaag

SEQ ID NO: 241701 - DNA, 391 bp, Homo sapiens
ggcattaatagttttatttatccagtcactgtgcctggctacctcttcttaaaattcaagaatttcttctccatctttcctagaaaatgtttacacggtgtctttttggtgctctttagcgacaacaaattcatctaataaggcaaacttttgtttgtttataagtttagggaaatatcatttttttttaggaaatgtaacataaaatcaaaagtaagattagtttgtttcacatctttttacttttacctttcattttaaagccccatccctcctacctttgaatcccaaaagtggatccttgctacatttgaaatagcaatggaaaatcctcactagaatggtattcctcaaatgtggtaaacaagagtgtcatcttttagtttctaaa

SEQ ID NO: 241702 - DNA, 389 bp, Homo sapiens
tctgccgccaaagactgcccaaatcaagggctcttccatgcaagatgatgctgcctgtccagataagcccaggaccctctctttgtccatgtcactgtccttggactagttcattaaccccttttcctctccccgtgtctcttgatgttaaatgttactctgtttgatgtggactgcttaatctaaacatttatatattaagtacactactaggtatggtttgcagtactgactgagctgtggagtggcttgagcctgtgtgaccacagctctgattaccgagtgaatggaaaacactaagaagttccttctgggaaactgcatggagcacatggattttatgatggaaatagtatcaataaaagcctgaccttgtggaaagacacaaa

SEQ ID NO: 241703 - DNA, 755 bp, Homo sapiens
aatagcaaaacgtttcctttgattcttttggctttcatatttgttatagccattgttaatgtcaagcataattatagttactaataacaataaaaaagcacatatagacaagagggcagctcttgacattaaaatataaacatgcttttccagagttaaggtggaacttaatctcctggccatcattatatggctacagttgcttatctgagttgatttacaggattaactgcagggtcagatttaataatcagtgatggggttgaggacacgctgccccaaaatatggcaccttggcaaactgaattttttaagctgaaggatttgagaaaatggcaaattttaagtggaaatattactctgaccttcctttgccacctttctccccggaagcaggtaataaaacctttgctgaccttcctctaaaacacatcataggaccctcatgtgagaggtgctcttcctgtatccacagaggaaaggcagttccctatctcccaagacacagggacccagaggagaatctgaacaaacgggctctgctaagtttccctccatttattcctattagatctagtactctttttgcctgatcatatttctgcaagtgtctctccattcttcatcaaacctactactaaaaacactcaagtgtaactgtttcctctgatcttcacttcctgaggatggcccttgtgttacgtagaacttgtttaaataaaccactatgtttttctctggttaatcttttatta

SEQ ID NO: 241704 - DNA, 126 bp, Homo sapiens
taactgggaatatctttattgtgctttcatttttgcagttctagtggaaaaacagaattcttgattgaaagatttttcctttggcacttggaatgtcattctactgccttctgtcgtctgtcattt

SEQ ID NO: 241705 - DNA, 509 bp, Homo sapiens
cagtgctttctaagtggtgtgtggacaaatgctttgtttgcatagttttgtacttatttcattgtgcattggaagaaaattctagctgcacagaaagccttctgtggatattagtgcttagaataaggctaaattttgggaaaaaaacaagtgagtcaattcaaagaaagctatccagtaaacagcagagcaaacagtacacagatatggccaagagctggaatgtgggctgggcgtggaggctcatgcctgtaatcctagcattttgggaggctgaggcaagaggatcccttgaggtcaagagtttgagatcagcctggccaacatggtgaaacctatcacaaacattagctgggtgtggtggcgggcgcctgtaatcccaactactggggaggctgaggcatgagaatcgcttgaacccagggggtgggggttgcagtgagccaagattgggccactgcactccagcctgggtgacagagtgagactctgtttcaaaaaaaaaaaag

SEQ ID NO: 241706 - DNA, 176 bp, Homo sapiens
ataataataataataataattaagaaacagagtcttgctatgctgcccaggctgtctcaaactcatggcctcaagaggtccttctgccttggcctcccctgccttgggattacaggagtgagccactgctccccaccagagctggggttttacagacagtatctgaggtctgtggg

SEQ ID NO: 241707 - DNA, 221 bp, Homo sapiens
attctccctctagtggaatataagctcctttgaggatggtagaaataatgaacccctggtttgcattactgattgtgccagaagattgctactgtgaatgaaaagctccgaaggacaaaaatagatccatacctgatttcctgctcattatcatgaaaaatattcatttctcaatgctgcttataccaaggaaataggaataaagtaacaatgcacacaaa

SEQ ID NO: 241708 - DNA, 531 bp, Homo sapiens
ccttccggaatttaacaggaaaaggttttctgagaaatctatgcacattcaatctacatttaaaaaatatttaatagtgtttagaggtccttggaagaacaatgaataaatatttttgtcaaaggaagatttaatgggaaaacatgtaacttccattcgaacttcactggactctgattaaagtagcccagccaatgtaacccatgcagaaaaatgtcccaaaggaatggttataatatagctttctgataatgtttggttttaaatacttaatctatgtctgtaaaaacatatgcttgtgatttatttgcttcacttatttttcatgtatgtgtgatatcaaataggttcccagacataaatgctccgttaccgcaaatctgagctgtggttgttacgcattcactgttcaggttttaagtacctggtgagcaactgtaggctaggcattctatcagattctagaaaggcattaatgaatacggacataatgaatgatcacaaaaatgctaattaccagacatgagcaaa

SEQ ID NO: 241709 - DNA, 427 bp, Homo sapiens
gcttcagccctggggttacccgatctgacaaagccttttccattgtatgtgtcagagagagaaaagatggcaggtggacttttaacccaaactgtggggccctggatgagagaagtccttcaaatgtaattgcaaagtcagagacctacagggaaatggggatcaaaagctctcatcactccagatgctacaaagccttcccttccagatgctaccgattttactccccagagcacagaagaaaagttcgtcattgatgactgcagctgtcatactgaaatcatgaagctaaaggctacagagggctactagaagcctgagtttctgaagactgtgtggaaccatcaaagcagccctgaatatttcccttgagacttttccattataggaagggcaaataaatagatgatgtatgatgtaaaaaaaa

SEQ ID NO: 241710 - DNA, 411 bp, Homo sapiens
ctcttttctaagaagacattcatctcttttctgagaaggcatttctgcaaaggcattcatcatcatcagcctcctgagtagctggaattacagaacttccaagatggtggtgagccgcttccaagatggtggcaggccgcttccaagatggtggcaggccgcttccaagatggtggcaagtctcgtgttctctgacctggggttcttggcctcatggagtccaaggaatggaatcttgggtcatgcgcagctgtcatactgaaatcatgaagctaaaggctacagagggctactagaagcctgagtttctgaagactgtgtggaaccatcaaagcagccctgaatatttcccttgagacttttccattataggaagggcaaataaatagatgatgtatgatgtaaaaaaaa

SEQ ID NO: 241711 - DNA, 512 bp, Homo sapiens
accattctacaaactagaaatgataattatatgccatatgttaagtatgaaaggtgaccttgttatttggacagtttttactcttaactgtggatggaaagaatatcagggatgtttccttggttattccaaggaattgcactatcctattggagatcaagaaaggggctataattttaagtaaagttttccctgttaattttatcatggtttctaaatatacaaattagattttccttgatgtaaaggttacttactctttcttatttcaaacatctttcttctcctggggagtggttcatagtcctgtaaaatattattgctgatctattttctttgtatttctctatgaatgtacttaatcttgtcagtgagtgtatattaagtgcttgttcaagtcctatctcaggtattgccaatgagcttttataaaatggaacctcttaaaatttacaatgtatgctgacaatatttggagctatacagtcaatacaaaagattaacttttaaaa

SEQ ID NO: 241712 - DNA, 507 bp, Homo sapiens
gtgtatcatcatcaatgcctagttatttataagaaaaaatgatactcattagatttatgttatcaagatattcaataatatgaattttattagattttttaggtgagtatgaattaccttaaagttcttcaatttctagctttaagtcagttagaaacaaaactaaaaaattaaaatcagccaaagttcaaatatatttttatcctattgctcttctttattgtacattttcacgttgtatttcactttttgagccacaatatttcttaataacatgaagaattgttcttttgcattgtcagagcaattttatattataagctataaaaaaaattttgcattcactttttattaacatggaatatctgttaaactgtaccttctaaattcaaaaggttgaaatgttgaatagtactaaatattaaatatcaaaatatgtttgaattaggagttattcattcattcacaaaatttcgtgaaccattattgtgtccgaaattggtgggt

SEQ ID NO: 241713 - DNA, 619 bp, Homo sapiens
agggaaagcacctgatatctagagctatggtggcctgaaggtcatgggcacagaaaaagtgacccttactgctgattcaccagttcccagattggctgttagcagttatggggtgggaggagggactgaagacccctgctctgcaatcctggacttcaaagagagtccattttacctgacaacacacttcattttgaactcactgtcattgtcactgtccttgggtcctctgtggacttcatgatggggatgttccagctaaatttctttagtgtgaatacctccaagaacatgaatccaaccaagggtccccctttccacctctgagtaactctgtgtatataacttcttcttcccaccaaggggaagggatttgaaagattacacactatagcatttttctcaaagtgcaaaatgcatgtgccctctagacccagaatcctgtgaaatgaagttgttaatgtaataataaaatgtagcatttttgatcagacaaaaaggccatgggccttctccacctaatggccatggcagagcatataaatgaaaacagatgtttccagtggtcattcagtactgtaactgtcaatattgtaatttcctcaaaccaccccccagg

SEQ ID NO: 241714 - DNA, 337 bp, Homo sapiens
  misc_feature (156)..(156): n is a, c, g, or t
gagaccaggctcttgctctgtcgccccccacatgttgagaagccagtgttgtgatcttttggctcctggtaacctcccggcctcccaggttcaggtgatccttcatgcttcagccactggaagtagctgcaattacagacggtggcaccacccacncctggctaatttttgtatttttaggattcaccatgttgcccaggctggtcttcacactcctgagctcaagtgatgcacccacctctgcttctcaaaatgttgaaattacaggcatgagccactgtttccagccaaactttgtatctcttcccagtgcacctgctcccttctttcagcagcc

SEQ ID NO: 241715 - DNA, 617 bp, Homo sapiens
gtagccccatgcagggttcccagctttctccccttttaacccagtttctttttccacactttaacatctctgaaatgactatccatgatataatcaatggcatcttacaactgctaccagcagaacagcagtcatggtatactagtcatccaggaggtgtgaacttggctgttagtcttgccgacattattggacaactgcaacctcttgacgtttcaatcagtaaactctttaagagccatttgaggaaggaaaataagccttatttgttccctgaaaatattctgttgatatcttctggtaaagtcaagaaagtgccagcatcaaaacttgcagaatgagtactggaggcttaggggaaaaaatctcagaagcatactgttattagtagtagaacattctactaagatatgttgtcatcatcaaaattattcaagaattttgaatagtaattaagattactattataaatgggaaaataattagaatagtgaaactagtttatttcactcataatttactttgtatatatacctatgagtgatatatgataaaactacatttttaaaatcaaaaggtctttcaatatgtatacaataaaaatcctaagaattaga

SEQ ID NO: 241716 - DNA, 547 bp, Homo sapiens
tgaaacagggtctcattctttcacccaggctagattgcagtggcacggtatcatgattcactgcagcctcaaactcccaggctcaagctgtccttccacctcagcctcctgagtatctgggaccatagttacgcaccaccatatgcagctaattttttaaatttactttttgcagaaatagggtttccctatgtgactcaggctggtctcaaactcctgggctcaagtgatctgcccatcttgtcctcccaaagtgttgggattacaggcatgagccaccacgtccggccctgaatctttttttaagagacagagtctcactatattgtccaggctggcctcccaactcctgagctcaagcgatcctctcacctcagccttccaactagctgggactacaggcatgccccaccacacccagctatcctgaatcttaaaaagactcttatcgtctaagagcaaacttcaaattagaggtgccctaggatttttcacatatcaagagccagtgaccagccaaacttgggaacagagaatccaagagtta

SEQ ID NO: 241717 - DNA, 314 bp, Homo sapiens
gttgttttgatttttatattgacatgctttcagttttctcttattgttttttgtgtatccatatggattttttttagtggtatcttagggaattacctaaaacctctaaaagattcaacaatatattttaatgtagtaagaaattagcttcagttgcatacaaaaattcttattacatctgccttaaactttgttactgactttactaattacattttttatgttgtatattcatgaacagatgcttataatttctatacatttatcttttaaattttaaagaataattaaaaaagttttctgtaccattatga

SEQ ID NO: 241718 - DNA, 589 bp, Homo sapiens
gtacttaactgcagggtattcagccctgcagttattacctaatgttcccatgaaaacattatttttatttctttcaactctctgtctaccatggttatattataagatggtccaagttatgccctctaacaaatattgcttaatatgtaatgtacatttgtagttcaatggttcttaaccctggctgtacattagaatcacccagggaatctaaaacacatacatgtacaccagagagtgggctccacaccagctcaataaaatcagaatatcctgggtatggcttggggcatcagtgttcttttaaaagctcccttaatgattttaagacagccagagttgagaaccactagtttaatgggataaaaatgtgtcatttattgtaatctgcgtttgttggagaattttttctcttagtattatagtaatctgaaaatagatacgcttttgcaagtaaattggatttagcaagatttcttgtgaaggagttcttatcttagccgaaaccttttaactgtacttttgcgacgatctctcctcgcatacttataatcttgaaagaaaaaaaatacttctcaaaatattgaca

SEQ ID NO: 241719 - DNA, 169 bp, Homo sapiens
tctaccattaattccatctacttctaatacatgccacaataaaatgccactgaatttctaggggaaagttacagttttaaagatactgctcataaacatgattttacttacccaaattctatttagtctccaggaaataatatactaatctcttttctccttttttttt

SEQ ID NO: 241720 - DNA, 189 bp, Homo sapiens
ccaagtagctgagattacaggtgtgcaccaccaaacccggctaatttttgtatttttagtagaggcaggctttcaccatgttgaccaggctgattagtttgtatatttctttcttcctttccttttttatttctagaagcatgttaattttaaaatataaattatgacatgtaaaagccttcatttctc

SEQ ID NO: 241721 - DNA, 436 bp, Homo sapiens
gttggacccgttggatcgaattcggatccaatttgcaaaatctctaaacacttaattgctggttttcacaaacaagtatgagccagctccagcacaccactgtctggcagagttgtgttctcaagagcctgggaatccatttcaagaagatatacatctatgtgatgggcagctcttggctactgaatgagtttaagtagaggaatgccaggatcacagatgtatttcagaaaagttctactaatgtatttgagaagacggtctagagaagattgagaatacaaacagagactactatggtcactgctgcgtagtgcaggagtgagagagattatagtaactgagctaagacagagtaagggcattaaatgatataaatgcctaagaaactgatatttctgtgaataacagcaacacattctgaacagaacttaaa

SEQ ID NO: 241722 - DNA, 581 bp, Homo sapiens
ccatagcagggtatataataagtatgtattttaaaagttcattttgtttctctgaatcgatgggtgttttaatagcagttactaagtaattttaaaacatcacatcatattccatcagtcattttcaatttgtattagtatagtacttaatgtggtatctggtaagattgactagtcttcgttgtttcttaatttttttttaataatattacttctttttccaaataacttaaggattttcttttaagttttctaatgctcattcttaacatcttattaacatgttacttaatcagattttcttgccttctcttcttatacattagataaaaagtgttatagttgggaagtagttgattattttgtttcatccaatttgttgggtccccatgcttccattccctaagttttactttttacctgataattgagaatgtgtttgtttaatgcagtatcagaaagcaacaatgtttaatgcagtgacaagcaaagcttatgtgtaatttctgatgtgctttgatctttagaaataagaatggaaccatgtgcatcttctgcaaagatgaagagtaaaaataagg

SEQ ID NO: 241723 - DNA, 420 bp, Homo sapiens
tgctagatttccacagttctgctcttactgcttgcatcaaatcaactctgaaactctccctcagatctttgaggtctccgtagagatctgtaagtgaccacaccacatttccaccatgacagacagtgaaaccaaaccaaaggacggtgctacctgatgtgcgagtaacacagagagaaaagagactctgaaaaggggcttattaaatagcagcttgcttgcctcatccacagctgcaggaaggcaggctccttaaaggctgtcagggagggtgtagcgtcccgagccacgttaaaaccttttccaaaagtaatttcttctctcagatgggtcacatttttgaatacattaaattctacttgaactgctacatttctaaaggatgatatgtagctttctctgataaacaagaaaggccca

SEQ ID NO: 241724 - DNA, 221 bp, Homo sapiens
tcttcaaaggagagtgatttgtctcttatgtagctggaaaaatatttttctttagaaagacaaactcgccgtccttttcagaattagcctgaaacctgttctgatgaacattgttggctctcaggaagccagggctgagctttgggctggtgcactgcccatctttaatatgccttgtgttttgcataataaaaaaataccccatgcactcttaactgtgt

SEQ ID NO: 241725 - DNA, 515 bp, Homo sapiens
aaatgtaactaaaattaaatttcacttaaaatcagcatccctggttaacagacaggaagatagttgtattatttctagtgatggcaagaccatttcccaagggatctgtttacttttcagtaagctcgctcaggcctgcctgttgaaatacccctggatatgcaaatagagtataaagaaatttggttttctagttagttttgtatttagaacaactgttctgtagaaatggagtacaacagattagtcaccatcatttcaacatcacctaaaatcacattagtttttgtggcagcactgtcacttgctaaccaatactacaaaatgccattaacacacatatctaagtatgtttttttttttttttactatacccagtcaacctaggtttcaacctccctgaatttacatataaattcttccaatttcttgatttctgtatttgtttcagttaaatttataaatgctgtcattcacaatggctatcacttccttgatttaatgtcatctgaaca

SEQ ID NO: 241726 - DNA, 925 bp, Homo sapiens
tcggcctcccaaagtgctgggattacaggtgtgagccaccacacccagccccccactttcaatggatagttctcttgaataaaattcaagatcagaaatcattttcattgagaatttatactgtcccatcagtaggttccagtgttgatgaaaagttgctactctgattcctaatcctttacctgtgacctagttttcttctcttgtgaaaggttttagtttttcatctctgatgtgaaatttcacgaaggtgtgtgttgatggttttcatcacgcctggtgttgctttttcattagcccttccagtggggggcacatctttacccgtccttggaatttgatttttctcttctgttcttttcttgggcatactagactgataactcgtattctttttattctatttccattgtttccctccttccaaaaaaagtgctatattttgtaaccctttttatgaaatttacttcaacttttgttttcaatttctgaatactctatttttatactgcagtgtcttctcatctctctaaagacatgaattatagtttaaagttactttctgcttgtcttcctgcatttgtttcctcacagtcaccttttcttctttcctttggtctctgtgatgatggaaactttcttcaaatgtcaggcagtccttcactgtctatttaaaaaaagaaaaaaaaaagccatttggaagctctctagaaggcattccagcaactggcaggctcagatggccaactgactttttgctagggattcccaaatgtcagtttgtagagatctttttctgggttggttcagtttctccagaaagggatcctgtgttctctgctggaaaagtggggaacagtggagggaaggggtttgtaaatgtccctgacagtattttggagcaggatgggttagaggatctcac

SEQ ID NO: 241727 - DNA, 387 bp, Homo sapiens
ggtggaaaattttgtacagaatagtaaaatgaatgacatgtacttagctggaaaaattctagtgttagaaattacttttctctccttaaaagatgtagatactgctatttatggcacggaatgtgattcaatctcacatctgcttaatcagaagagctttctgggctgaggatatgaactcttcagcactgtgctttgttacggtggtagtagcttaatagcagctgcatttggtcttttgcagactgagtccttgtaaggaggtgatttcctttactcttgctaagaatgtggagcgagggatgtatgctctcagatgaggaggcaggtgtattttgccctcctgtcatctgcagtttactatgaatgatgacctgacaaccatag

SEQ ID NO: 241728 - DNA, 386 bp, Homo sapiens
aactcaaagaagacaaagcttgtgaaaatattttatatactgaagtgtaagcttacgaaaatttcagagaacctagtataaattggacgtgcaactgctaatggaagaatgcctcaagtaagcatgtatacgactccaataaacacactatgcatgctcccctcccaagtcctggcaagccactgtgcatgcagacagcccaccccaagggaaaaatcaggggagaagggacatagaccccagaagtatgccaacgtataaaaccctaagtcaaaggtcaaatggggtacttgactttcaagtcgcccacttggccctcttcccagtgtatttccttccttttgttcctgctgtgaagctttttaataaactttcactcctgctct

SEQ ID NO: 241729 - DNA, 287 bp, Homo sapiens
taaaaagccacaatacccttatcacatataaaatgtgtgccattatcactcttcctatcatgaactctccagtcagtgctcacatttcccagtgtctcatgaatgtcatcatttctcttttttcaacttgtttgtttgaatcaggatacaaataaggtcactgtgttccaattggtttatgtgtctttaagttactttgtttgaaagtcatttggaatagtttttctctttgtggtattaaagtaaattacaatgaagaccaggcctaaagaatccccgagcaaaca

SEQ ID NO: 241730 - DNA, 471 bp, Homo sapiens
tctcccgcggtcctaggcaaccactaagctgctttccctatctgtggacttgcctgctgtggacatgtcgtagagacagagtcataccctatgtgcttttgtgtctggcttctttgactgagcactgtgttttcaaggcgcgtttatgttgtgtcctgtgtcagcactttctttgtggctgaataacattccattgtatgaatagacacattttatttacccattcatcggtgggtggacatcctgacacttgcttttgtagatgaagttttattggaacagagccatgcccattcacaatgtgttgtctactgcttttgtaaataaagttttattggcacacagccatgcccattcactgtgtgttgtctgtggctgctttcaggccacaaaggcagcattgagtagtgagtggcagcagagaccacctggccctgaaagcctaagatgtttactatttagcgctttaca

SEQ ID NO: 241731 - DNA, 514 bp, Homo sapiens
aggattcacttttggcactctcgcctggctcagccacctggaatcaaggaagacagcacagtgctgaccccacgctcctgccaatgctcacttcctcccctggggtcatttcccaggagcagagctgcaggccggggcctctgtctgcctgtggtaggcacccacactcattctcatctggttccttgtaagtcttctattgcaaaatcttctcaggacttggagacatgctattctcggtttccccaataacaaaatgaaagtgcaaaggtgccgtgtcagcaggtgggccgtggacttcgcacctgggtgatggtgaacctgcctccaaaattgccatgggtccaaagaggcgccaattcctggcaaaactgatgacatttatgaattttatttctggttgcaacctgattttgttatggacctatactgacgtcagtaataaacaataataagattgtaaactattgctctttataataaaataatgcctcttggctgtattataaatcta

SEQ ID NO: 241732 - DNA, 399 bp, Homo sapiens
catcccactgccttgattcacacccagcccacagacagactagcaagctgcaggggtgtgaggacgggtagccacgggcagcctcctgcctcctgcctcggagccctgcccttccaggagctggccttggccatgtgcttggctgcagctagggctctggccttgcccaactccccctaggcctcattctgcttctatgttccctgcaccccagtcctccccatggtcaggggtccttgctgcctgggtagacattgtgattgctgtcaccccactttctgtgcatgctggtggagggtgaggggtggcctttggagaggggggcagtgcactggctgccgggtcacatttctgttcttacacattggtttttcctctggtaaactggacaaggtgtga

SEQ ID NO: 241733 - DNA, 676 bp, Homo sapiens
gaatacaacacactggaattggcacattgagtgcacctttgactgcattgtactgtttcgtggtttaaacctgtctttcctttgcccttgctgtttgactactatgattgagctgccaccttttcacacaatattggaattttttgtttgaatctctgtttaccctactggactgtgaatcttgagggaagaaaccatatcttattgatcatatcaataagtgcctgtacgtagtaggcacattatgttcatttttaagttgaacaaaattggaactaatttgttgaaattatagtcctccaacaaggactcacttgaatacatcagataatctttctttctttttctctctctctctttctttctttttctttctttctcttgctctctcacgctctctcgccctctcacactctctcgctctgttgcccaggctggagtgcagtgtgatctcagctcactgcaacctctgcctcctgggctcaagccagcctcccacagtctcccaaacagttgtgactacaggtgtgtatcaccatgcccagctaatttttgtgtttttttgtagagacagggttttgccgtgtagcccaggctggtcttgaattactggactcaaggtatctgcctgcctcagcctcccaaagtgctgggattacaggcgtgagccaccttg

SEQ ID NO: 241734 - DNA, 801 bp, Homo sapiens
ttattttttgagacggagtctagcgctgtcgcccaggctggagtgcaatggtgtgatccccactcactgcaagctccgcctccagggttcacaccattctcctgcctcagcctcccgagtaggtgggactgcaggcacccgccaccatgcctggctaatattttgtatttttagtagagacggggtttcactgtgttagccaggatggtctcgatctcctgacctcgtgatctgcccgcctcggcctcccaaagtgctgagattgcaggcgtgagccaccgcacctggccaaattcatcagtgttttgccttgtgcaatttttcattccaatatccctacagtgaggagcctcatctccaccatccaaaatagcaactagagtgtcagccattacacccatgttccagtaagcaggattgacgagaaaaaaaggaagaatctgaatctttccttttaaaaagtataatacaatactgcctcttaccgcttatttgtcagactttgtgacatagctgcacaaggatgcaagggacgctgggaaatataatcatttagctgagtcaataggcccttaaagtgaatttgcagttttatgttggagaaggagaagaacaatggatttcttgagataatcagtggtctttgtgatagcctgcgctttgggttattcaactccttccatgtgcattcctctcctacaaaaagaacacgcttcctctccagcagagatgaaccaaagtcacccccagttactgcatctagctcaaagtccaggatctctgggtgatgtacagttctct

SEQ ID NO: 241735 - DNA, 3008 bp, Homo sapiens
  misc_feature (211)..(211): n is a, c, g, or t
  misc_feature (692)..(692): n is a, c, g, or t
  misc_feature (1324)..(1324): n is a, c, g, or t
  misc_feature (1714)..(1714): n is a, c, g, or t
  misc_feature (2847)..(2847): n is a, c, g, or t
  misc_feature (2875)..(2875): n is a, c, g, or t
  misc_feature (2882)..(2882): n is a, c, g, or t
  misc_feature (2888)..(2889): n is a, c, g, or t
  misc_feature (2915)..(2915): n is a, c, g, or t
  misc_feature (2941)..(2941): n is a, c, g, or t
  misc_feature (2964)..(2964): n is a, c, g, or t
tttaattaaaagaatcaaagaaaccaaagttaagaatttaaattttattttggcatttgttactggttgtgatatataattttggtaacattagtgagggatcaggtttaaaaaatttctccaatgttgtcttctgcagattgcaattgtcttgcaactgctgttggcaaactaaaaatgcttttgctggttaaggtaaccagtcatttcngaactttttttcagttgtaagggcatagaatgaacgtgcacgcctgatttagtgtattaaaactaatatcatgtgaggacattttatagataagaggttagaaggcaaacgactctattttgagaaaaatttggagggaacctttctttcaagataaataaattatttactgtccagaagtttatcatgtaattatctggatttttttttttcatttctctgagctttagctcagcctcgatggactctgatttcataaatacattacatttttcaattttagaagtcatgggaagaggcacacaactttgggaatttgtgaaacttaaagcaagtataatgaagagatacatactcattttgtttgtgttctgtttccattccattaacttctactatcactcaggttcatccttgttgaggcctagacgagtggaaggtttctcattttgaagttagttgttttttaattggtcacgcnaaagaaaggcttacattgattttgaaagacaaaacatgtcattgtttttttcactaatgcccaacttctacatggctgactggatattgttcaaattttccaaaagaatagaaaagagagagaaacacccttcttttggatccgaagccagtcatggaaaatttcatcctgaaaggataatttttcataaatatgcaagcagcagaatggcagtgtggctgcaatagaatctgccccaggacttccatgcatagtactttgctgtaaacacgaaactacaggcacacatatactcaaaagaatacacagtattggaagcctaattatttccactaagattgagattattccctctaagagctatactggagaaagcaatgtgtcttacttcactttattccacatcaattcacaaatttttatagcatatatactctgtgaaaggtgatactgggctaaagaaaataattctgccctcagtttgcaatctaacagggaaaataaagtccatatatattaaaatctaagtctgtttataataagtgccaagtagacaatatggacaggaagtactgtggatctaaggaggtcaagctcatgggtgtacaggttgtaatagttatgaagccttntcagtagcagtagaacttgaatgatggggtggatcgggataatgcacagagtgggtgcatgtggaacacttacaagaagaggggatatggggagctgatgtccaccaagaacagggagcctgtagtctgcgggtgtatgtggggccctgctgtagtggtgttgattgacctctgtaggcactttgccttccttcttctgtgttccctccagctagggtagagaggactggttcagcttggctcttccgggcctgcccaaaggaccatgcaacatgaaggtgaagtccttgtagagcaaagggcatgagaagtctctcttctaaacctaggctctgccctgtctccataattttatttcatgatgttagatctgggaagagatttagcacntttctgtattagtagagcatttgagggagatgataactattaaacaagagaggtaaagagaaacattcagagatgaacaggtttattgggataaagagtgagggtacagatttgaggctaccattcacagaccagggctagctattctagaaacaatagatgtcattagacaaataatgacatgatggtttgatattggtgttctaaacctccagaggttaataactttgttggatttcagtggtggacaccagcaatcttaggaggtctagcagcaagactggttcttgccaagttaggagatgttagtttgttagtgctgattggatggaataagcatacaaccgctctgtgtgcccccttctttcccctctgcagggtgtgagaatggaaaaagagaattacacttctgataacctaaatattcgctaacctgtggtggggatgcttattttggccttttaggcgcaaacttgtttctttaactgttagttttatggtgcccagggttaaactttaaagttggactgtttacatgcttgcgacatggtgaaccaaacggggaaagtaagataaaaacaggcttgataaaggccagccgacttctgccagtaggctaaaactcacagactctcagatatatacatacatatatggccaagatgtcttgctgttaaatggtctttaagagagcagaaaagcctttttaacaaatgcacctattgtagagtctttccaatagcctatacctttcaacttgtgaagataaataagaacatatggtttgtctcaacatgcttttaacaaaaaccagatgaacacatgtaaaacaattagagagttgtcttaggtaccctgaagttcttatacaggatatttgctcttcattcaacgtttattgactacctactgtgttccaggccaccagaccctgtgttagaggttagagatttaaaactctagtaacttatgtattataatctatacatgtcatttaaagacatagcatttttgggctgagtgcggtggcgcacgcctgtaatcccagcactttgggaggccgaggtgggtggatcatgagataaggagttcaagaccagcctggccaagatgctaaaaccccgtctctactnaaaatacaaaaattagctgggtgtggtngcatgcncctgtnntcccagtcactcgggaggctgaggcnggagaagcgcttgaacccaggaggcngaggttgcagtgagccgagatcnccccactgcactccagcctgggagacagagcaagactctgtctc

SEQ ID NO: 241736 - DNA, 475 bp, Homo sapiens
agaaacactgtagcttttaagaagagagagaacagttcctggcatatagtaggcatgtagcagatgtttgaataaatggaatgaatgtatgaatgaagcctaattagcagagcctttgtagctgtagtgaagttgaaagcttaagacttgaagagaagtggtgcaaaaaaaagcagttgaggccaggcacaatggctcatgcctgtaatcccagcactttgggagaccaaggcaggtggatcacttaagatcaggagttcaagaccagcctggccaagatgatgaaaccccatctctactaaacatacaaaaattagctgggtgtgagccgggcgcggtggtgcatccctgtaatcccagctactcgggaggctgaggcaggagagttgattgaacccatgaggcagaggttgtggtgagccgagatcgcctcattgcactccagcctgggcaacaagagcgaaactccatctca

SEQ ID NO: 241737 - DNA, 478 bp, Homo sapiens
gggaccagggattggagcactttcaaaaaattcttatttctcatcactgcttctctttgcttatcgtttccaagattatatctctctgttgaagtgtccattttagcttgaaattgaaatcctttagttccaatttcaaatttctgagaaacagaatacccactattgaaccagcttggggcacccagtattgaaccaattagttattgacagagggacatcatcttacaaaaaagtctgtgggtgccacatagatagtgagtggtaaatagataaggagttatctgttcagcatttttttttttcctggcaaaaatgtatttactacattcattgactgaaagtgaaagcttctaggtgactttatggtttgctgtgcacaaacttgcagtattaattgtgtattttgggggaacttagtaaaatacaagtctctttatctctgaattacagtgtctttatctctcagtcatatttc

SEQ ID NO: 241738 - DNA, 506 bp, Homo sapiens
gataattgtaatgatgaagatagagtcaatcattcttccttgttatttggactacacggatctggtcatgctgtggttcagctcttgacccagagaatatgagcacatgtaaccacaacctaatgtaatggagttctaggtcctgccctagccttatataacctcccatttagaatgtgtataacattgggtaaagtgatggacctcaatgaaataacattacatgtagttctatgcttcaagtaaatgcttggatattatgattttgtaacagaagtcatggggtttgaaatggctatttctttaacctttggcccatctcttttataataaaagcaggccatcaaatgaagtgctggttcttaggagagagatggcgtcaagccaactgcaaagaaggtaagactgaaaggaagggcatatccttttactaacccagggagaagagtctgtcaaaattggttctggcacaaaagatggaataaagctttaaaaatggtcgcact

SEQ ID NO: 241739 - DNA, 686 bp, Homo sapiens
gattttataaatctgtagtgtataaaaggagagttagaccagaaatatgacatttatttccttcaataaatcaagttagatagttttaatttataatggtataataaatacagtttaaagaatgtgaactattttaagtatgtaatgtcaaattcataaaaggatgcttaggatccaacatactacaggattcaaagcacatgagacaatttattgtgcaaaagacaaaataggaagcaaagaagcctaaaatataggaggaaatcataatagtgtaaaatgagtctgtaaatttgagggtttacagatacttaaagtatatgggggaatattgaataattttgttgccctatttgcagtattgcctgaaaccaagattattggaagaaatcaggaaaactggctttgacaaaaagaaataaaatgaactaggattggccttttcccaaagcactgcttaaagaaacatcactatttttaacatgcagaaaagaggtaaaaacagtaagaatatgatggggttttgatttgcatagaaaaggtcatagtgaattagaagaaagctaacattagaattatacacctgtctttttaagtagtctgcacaattttaggaaaacttgaatatgacatttggaaagagttccatgtggaaaaaaattgtaaaggttagaaaagaagctatc

SEQ ID NO: 241740 - DNA, 457 bp, Homo sapiens
atagtataaattcctaattattttgtgcttttgacacctcagagttactaataagggatttcgttttaaaatgatatttatttatttatttagagacgcagtctttctctgttgcccaggttggagtgcagtggtgcgatcttggctcattgcaacctctgcctcccaggttcaggcgattctcctgcctcatgcctgtaatcccagcactttgggaggctgaggtgggtggatcacatgtacataattcatatttcttgttgtatgagtgctagacttatgtgggaaaaataaacaccttggctgtttaagtaattatcagtttaattttcaagtacctatggttaaaaacattcttgactgatactgctatcatttattaattaccttacctttttctcaccgcctttattttatctttgaaaaaaattaggggtcaggcaggtgtagttatcta

SEQ ID NO: 241741 - DNA, 508 bp, Homo sapiens
ggtgctgtgccctcgttcacaggcgatgggtggtacccagtgtgggatggactttcaggtgctaaggaacccactcctgtctttgaagagtttatgttccaaggtgacctcacattacacatttgtttagcatcctatggaggcctcgacttgacattggtccactctttatttaacatttgctttttaaaatttttatttcggtaaactatatgaacataaaattcaccattttaacaatttttaagtggcattaagtacattcacactgttgtgcggccatcaccaccatccattccagaattgtttcatcctctcaagctgaaattctgtgcccattaagctatgcctccctattgccttcccattgccttcccattgcctccccattgctctgaggtaggacataaaatacattttaagaataacagcattaaaaaatggctactataattcattactactattacatttttgatacttttcaataaaaagaaagtagtgaccc

SEQ ID NO: 241742 - DNA, 351 bp, Homo sapiens
agaaaaattcgagaaacttacctgtttctctccctggaatgccttctgaaccctgagatttactttcctcaataaagaagctcgcctcgcccacccagcccactcttcctaggagcagcgaggatcgctgtccctccagcacatactagtcaactcgagtcatctgaatatgggcatattgggcacatatttctttgtaatggttcctctcctattacaatatgtatctgttgtttcatcgttagattgaaagctctttaagaattatggtaacagtgttacagctctttcagaatttgtttagcaggttttctggttttcacaggaaaataaaataaaaacaataattat

SEQ ID NO: 241743 - DNA, 423 bp, Homo sapiens
actcaggggtgtgtttatttatttttgtttaataaaatatttattgaacttttattgaagttcaattaactttatttattataaaacaatattatactgatattgtcagaaatttaaagacaagacaatatcctcatcacccctgcactggaaacactgacctgatttctatttttaggtgttactttctgggctatctatacgcttagcttttttttggtagtcatcaaatggtttatataattttgtacataacttttttcacttagcataaaacctttatagttgccattttaatggctacttaacattttattcagttttaattgacttatctattccccagtggtcgacatctaggccatttgcaacttgttattatagataatgttgaataaacattttcatatacatgaaaaaaaa

SEQ ID NO: 241744 - DNA, 1192 bp, Homo sapiens
gtcgcccaggttggagggcacttcagcctcaacttcttgagctcaggcgatcctcccaccttagcctcctgagtagctgggactataggcacgggccaacatgcttggctaattttttttttgtagtttttgtagacagggtttcactgtgttgctcaggctagtcttgaactcctagacttaagcaatctgccctcctcggcctctcaaagtgctgggattacaggcatgagccaccacgcctggactaaattttacattagaaacagaaatgtacttggaaaacactggtaaggtgtataataacgtctgcatccacagccaattctgctaaataaatgatcaattaatgactgtcatttcagaaataaacttttttggggaacttttgccctaggattaaacaactcaacatttctcacgtacctggccttcctccaaggtacaatgtcatcagctatgtcttgctaagatcagccttaagcattaaatttttaaatgctgaaaagcgcagtttaaggtgcggtcttaggaacgactggaaggaacaaggacaaacaaaggcccgtgctgatgagtaacctacgacagcaagcacgcctagatttccactgtcattgacagtcctggcagccagacaggtgagtgaggaatgaaactcccgtcacagttcccgcctccagggccacatttccctctacttgcaggcagccccaagtatgcagccagctctccttcctccaatgctcttccttcctacaaagccctctctcccaccctcctcacttgcttgacacccaagagtcatctctgaccccagtgctgccacccagccgtgcgcacgcttctcaacaaattccaggtcttaaccctacatacgcagacccgtcttccaacattccctccatgccattctcacgtccactgccttgctgcgctcactgctccttctcaggactaaggctatggcttcccctgctccctgctgccgcttcctagtctctgcctgccccactccccgcttcagggctatggcaggcttgtctggggttgtgtccctaataaagactaaactacttattcctgcatttcacactctccacaatccatccttattttccatgtttcatcttcatatttctccaaactgaactctctccttccctgattctacgcatgtgctcaatttgtt

SEQ ID NO: 241745 - DNA, 560 bp, Homo sapiens
atattttaagaacgaaaccgacccagccagcttgtggtcccattattctttatattgtttttcttagcacacgctagcaaagatagatgcctaggacttttcttggctattggagtttatagaaaaaaagttctttgttgaaggttagtcctccaccagaataatacaccctttttccccttagtagaagtccaaatgttaatcttgctatcatatatgtatgaatgcccagatttataaagctttgtaggtatattactgattgtgcaggagactaatctaggaggcttcaggatcattgtcatttgtggatctcattggctaagaccttttacttaacctgactccagtaaggtagcccctttgtttccttgtagttgactatgtgagctcttgccaagcagcagaagtgggatgaagggaactaattttgtaatatagattgcataggcttatggggagaaccagagaccaggaaaggaaacgtttttttctttttaccctttatgccttttcatgtcccctttttgataacatgctgccttggtccagattctgga

SEQ ID NO: 241746 - DNA, 362 bp, Homo sapiens
ttcatttttagtaaaatgttacccattatttaaagataaaataagtcttactttgagtcttttagttgtctatttgccactatgttccagtagaacagaaagtagtaaaacataattttggaattaaactgacatttaaagtaatcagagatacttcaacaacagttttatcacagagcttaatatgattccgatttcatggtgttgtgtgttacagaggataatagaacttatagaatgttttctttcatctggcttttaaaattatctgatttttgacataaggactagtaaacctagagttctgttaatagcaaacattgcctttgagtgctactactaaacctgaggcatcaagaaga

SEQ ID NO: 241747 - DNA, 985 bp, Homo sapiens
attatcagacctctggaatttatttatataggcaaatgacattttagttcacctcggacctagcaattcaccccagaacgatctgagtacagattgtctcagcaatactctggggacaaatctgatccataaaggttgtagggatagtgaaagaggagggaacaattcaccccaggagaagcagtagaattatttgaaaggactaaagttgctctctttctttacatagagttgctctgtttatatcttcatggattattgtcttgtgacaagcacatagtctgttcttaaaacctttagaaggtgagatggggtaaagaattagagccattaaatgtttgtatccaggccaggaggggtggcccatgcttgtaatttcagcactttgggaggccgagatgagaggatcacttgagcccaagagttggagaccagcctgggcaacatagtcaaacctttctctatgaaaaataccaaaattatgggggtgtggtggcatgcatctgtggtcccagctacatgagaggctgagacaggaggactgcttgagtccaggaggtcaaggctgcagagagccataatcatgccactgcattccagctcgggcaacagagcaagaccctttctccaagaaaaaaaaaaaaaaaaaagtatgtgtccatagactcctgcagttgggctgctgccacacgatgggcaatcccttctcagttgatgaaccttcttgagctctatcccaatggttccctcccagtggctgactttatcaacacatcttttgatttccaaaaacagtggaactgaggattggaagcaataccaaggcagagaaaaaaagagagaaaaaaccatgtctatacattgcgtgggttttagaaaggcctgaagttttattgaacttgatactggtgaaacatcaatgccactggaagagttgagattttgctcacttagatttcagcaagtagtaaaacaaaaagaaaaa

SEQ ID NO: 241748 - DNA, 622 bp, Homo sapiens
cggccgccagcctcgcagggcggtggccccttccccgcgggaaagcgggcgcaagagcggaggcgcgcggggcgcacggaggccggggagcgcgggcaggagctgggggcgcaccacgttctcggcgggctccgcgcgccgctggtaaccctacacccagggctcgcctttcggggtggaagctgaggaatgccttttgtgtggacaagttttccagaggagccggccgccctctctgtggggccgtccatcgctccgtagagccgtttcctccgaggtcaaggtcgttggttcccgctctccagaggcgtgagggaaacccggagggaacgcgctccgcgcatcccgtctgccgcggtgccggaattgcccgccgccgccttgggtggggaccggttctcagggtcctgggggctctcgagcagatcactttccccagcgcgggacgggggtcgcaaccaggggcattccctgcagccgcggcccaaaccgacggagcttgctttctccttccacccagagggggtgaccgagcctcacctatttccaagcctattttttcacaaagacgggaagcaataaaagtggcctcaggagattccggaaatctctacaaagagaa

SEQ ID NO: 241749 - DNA, 963 bp, Homo sapiens
agaatgtgtgactttaaaggggggtttcattcaaaagaatcagattttattagaagaggagggaccattagtgggcctacatttatttgcatgaagttggcagcagcatagtagaaaacagttgggtgtacagctgaaaagaaaggaagttctgtgacagagtgaattgagtgatataatctggctacttggccaatgtgaggacaagggtgatgatgtcttcataaattaggatattgggagaaaggtgagacagtaatgatgagggacatcaggaatcctcctatctgtgaaaacatctttctgacaattttgattcctttataataagaaaatgaaatggggaactgccactgtagataaattccagctggaataattggttgttgatacagaagtgaccaaaatttctagatttgataaacacattccttttgagcttataatgacaaaaagaataagacccattaagtcagtgaattttagagaaattaagaaaaagggattttttttttgtattcagaaatcttaaaatggaaagatggcttagatagtagttttcaaagatggaatcctaatgtgatcacagatcattccggtgaggaagcaaagggaaactttcacagaaattctttgataagctctattttaaaaagatggaaagacaggcactttaacaaagttaaaaagttctggaagggttaatcttgggaggcaagatcaagttgtgttctagaatgtttgagaaatctgagtttgattaatctaaaaaatataggagttagggagggctatgatgattctcatatttgaagaggaaggagaaatttgtctttacattttatttctttgaaacagagtctctctctattgccttcaaactcctcggctcaagcagtcgtcccacctcagcctcctaagtagttaggactataggtgtgcaccaccatgcccagctaatta

SEQ ID NO: 241750 - DNA, 421 bp, Homo sapiens
acccttcctcccaggctctctcctgaacaaccctggcttccctggcctccccaggcagcaatcccctgctccctctcctcccctctttccctgagctccagattctagcagattttaaaaattattgttgtaggccgggcgcggtggctcacgcctgtaatcccagcactttgggaggctgaggcaggcagatcacgatgtcaggagatcgagaccatcctggctaacatggtgaaacccgtctccactaaaaatacaaaaaaaaaaaaaattagccgggtgtggtggcgggcgcctgtagtcccagctactcaggaggctgaggcaggagagtggtgtgaacccaggaggcggaggttgcagtgagccgagattgcaccactgcacttcagcctgggcaacagagtgagactccatctca

SEQ ID NO: 241751 - DNA, 630 bp, Homo sapiens
aaagggaagagtcagccaggcaggtagttcgtgcctgtaattccagcattttgggaggccaaggcaggaggattgcttgagcccaggagttcaagaacagcctgggcaaagtctcaaaaccccatctctgccaaaaaaaaaatcagccagtcatggtggtgtgtgcctgtatcccagctacttgggaggctgaggtgggaggattgcttgagcccaggaggttaaggctgcagtaagccatgatcacaccactctctctaaggttttttggcctgagcaactggaagggtcgagttattgtttactaagatggaaaaggccatggtggggcagactagacatctaagtggagatgtctggcgggagttggatccacaagtttggaatttgcagcagttgaagataaaaatgtgtatttggggctgggcgcagtggcccacacctgtaatcccagcactttgggaggccgaggtgggtggatcacctgaggttaggagttcaagaccagcatgaccaacatggtgaaaccccatctctactaaaaattcccttgaggccaggagaattcagttgaatcctggtaggtgtaagttgcattgagtcaagaatgcacccatctgactgtagccg

SEQ ID NO: 241752 - DNA, 509 bp, Homo sapiens
cagcatggagtattgaggctgctgaaatccatgaaatatttttctcgtttccattttctggctttgacatattttttcccaagtgcctgtctgtccaaggcttaccatgttgttctttatgaactccatctccattttaccatgcatagaatcacccattccaactgcattattaatttgaaatttcacaagaacagaagagtattgttggagaaatttgcaaagcaaatactttttctgcattatttatgtatgataggaagacagataatatataaaaacgtacaccatctttcttttaatttctgatcttttattgtcattttatatccaagaaaaaagtatacactgtcaagtataattcatgaagtgttttaatttgtaaggttgagttttgtgataggagcaccaaacatatggtatttgttttcagtatcaaaaacacatgaatgttgaatttcaaaagaacagccagtcattaaatgaatccatgtatttggagaatcata

SEQ ID NO: 241753 - DNA, 136 bp, Homo sapiens
gggatacaagtagtttttgattacatagatgaattgtattaatggtgaagtctgagattttagtttacctgtttacccgagtagtgttcactgtactcaatatgtagttttttatcccttgccccacacaccatcc

SEQ ID NO: 241754 - DNA, 556 bp, Homo sapiens
  misc_feature (44)..(45): n is a, c, g, or t
  misc_feature (58)..(58): n is a, c, g, or t
ggccgagggggccgtcagggcgcgcgcagttagagttttagganngggcctttgtatncagcttctcaaaagtagactttatgcagccaaaagacacatgaaaaaattctcatcatcactggccatcagagaaatgcaaatctaaaccacaaggagataccatctcacaccagctagaatgatgatcactgtttctatcaacagtacacactggatccctgaaacaactccaggacacagctggacatgtgctatagatttgttttgtgtccccacctaaatatcatctcaaattctaatccccacatgtcaagggagggaccaggtgagaggttattggatcatgagggcagttttcccatgttgttctcatcatagtgagtgagttctcacaagagctgatagtttaaaactatgtgtcacttccccctctctctcctgctgccctgtgtgatgtgccgtgcttcgccttcaccttccaccatgattataagtttcctgtggcctccccagccatgcagaactgtgagtcaactaaacctcttttctttgtaaa

SEQ ID NO: 241755 - DNA, 465 bp, Homo sapiens
gtggtgcaatcataggtaacttccctctcaaactcctgggttcatagggtcctcctgccacagcctcccacatagctagaactatagccatgcaccaccacacacggctacattttttattttttgtggagattggatctcactatattgcccaggctggtcttgaattcctggccacaagcagtcttcccacctcagcctcccaaagtgctgggattacagacgtgagccaccatgcccagccatatgttgcttttagtgcagtaagtgtatagttagaatcaggtatttagaagtgtagggaaaagtaagaaattaagaatataaaaagggtgaaaaacctaatgctgtctctctgagcccctgagaatcatttggtagactgttatttttaacaaacatgtgcttctaataaggtcctgtgaatatcaactaaatactacttggtgttagtaaaaaaaaaaa

SEQ ID NO: 241756 - DNA, 963 bp, Homo sapiens
atagagaagaatagtgagcctgcttattttcacatgggctagttagtgatttctgtaatataaacttactggtatctttggtatctttcctaacaaataatttttatattctaaattacctagggtattttccctaattctccatggtgcttcaatagcatgttattatcataaaaatgaacagttttgtggaatagatgaccaaatgtgagtaactcaagataatttaaaatgtatttatagttttaaaaataatctcccaaaaagttaattagaattgtgtaatatctgaatagtgagaacagttcatattggtatactttggataattctttgtcttataattttattaatattgaaagctattttctgtcattttaagtgtatttcgtaactaaatactacatctttctttcctcagtgacttaactcactattgtttacaatgtacatagttttctttgatctgaacaaacatgttgaatttgaagcttctttaccattgtttatttacagatctttttaaagtatggtaaaaaattgaaaaaaatttatgtaattaatgatcatttctgtgctgctgtatacaatagctgtatgagtatgctttagggttataaatggataatatgtacctacttaattgatatggggatggtaatacagtttagaatatattttacatataggtaattgcttcttttctgcactgtccagtatggtgaccactagctacatgtggttattactcctgggctcaagtgatcctccctcttcagcctcctcagtagctggattacaggcgtgtgcaccactgtgcttagccacatgtgtttgttgagtacttgaaatgtggctactctgagttgagatgaaggtcaactatctcaataatttgttatattgcttgcatgttgagatgatatggttatattagattaaataaaatatatttaaattaaa

SEQ ID NO: 241757 - DNA, 460 bp, Homo sapiens
cttaaatatactgatttccagagggataaggaatactatgattatcaagggtctgcataaaacagttatatatatacacaaaatatatatgtacacacacacatacatacacacacgcacatatattatacatattaatatacaaatttttctaaaaccatttagttattgtgtaaagctaattttaaagaatctcaattaggaatcagcccaaatagaaagaaaaacaatatttcctcttctctgaaatatggtaacccagatgatatgtggaagaataaaagagtaattacattaagtgaggtagaacaaatggggatgagatctggagcctgacttcaggatctagaaggatgtgaggccaaacactggtaaggaacaggagatggattttattttagatagaacaaaattaagattatggtggcaagcaataggtgctaaacctggaaataatttg

SEQ ID NO: 241758 - DNA, 384 bp, Homo sapiens
cactctgttgagatggggctgcccagaagcccacacaagcccacacctgggggaatcccagccccacgttctggttcaagtcgctgctggtttgggttcagagcccaaacatgagctcctgctcttcttggtgtgatctgaggctgtggatatcctgagaacatctgtctcaacagaacaccttcctccatgttgcctatatcccaaattcactcccaagtggcttttgtctggcagattccggtggattatgcaaagagggactgccagagaatctgagctgttggaagacttctgaaacgtcactgcggtggcggaggcactgccccggggggacaaaagtcttgtctcttcctccaaatgtggaggatcaaattagagttg

SEQ ID NO: 241759 - DNA, 431 bp, Homo sapiens
taccctaaaaagtgtagagataaaaaataaaatacaaaagttaccctgtaactgggctccagtcgctctagctgttgtgcttagtattactcacgcaaggatccaaagggagacttgcctatctgagcatttgtgaaaggcttgtcattctccatcccacagagggattcggaagggccctgtcttggatccagcccctctctcacagccaccaagctatcctgcctatacacaaaactgctaggagacgcatctttttgtgccaactgcaaaaccttgccagcttctatttcaaagctgatcctaaaggggcagtctcactaggctgcagcccctttctgccacagcccaggagttgccaggcctgtttaagaaactcctgagagagattcctggacaggctcgcatgtgtctgtctcacagaagttcca

SEQ ID NO: 241760 - DNA, 361 bp, Homo sapiens
tattacgcagcataattactccttttgtctcaattttctcatatataagatttgaataataattatgcctacctcatagggtgagaaacgatgcttataaaacactttgcatggtgctggtctcatagtaaataccagtaaatgctggatgttgctgttatttccaccatgagagctgcaatttgaataacttgacattcagcaaatttattttctactatactgtattgtatcttttataatgtaagagagctggttacatgtgtgtatttccttatctgatcttgtatttccaaactgatcttaatgtgaaatctgtctttactcaaataaaacaattgccaagtgttgggagatccta

SEQ ID NO: 241761 - DNA, 362 bp, Homo sapiens
actcttttaacaccaatggctgtgggagaaggaaaggctcaaggccagggctcagctcgcagagtccatcttctcccacagttgccacatttgagagggggcctgctgaatgcccttgctgtcccgtatggcagtattgaggcctgcccgcaccctcgtaacacacaccctctaggtccttgcatcccggactgaagcaaacctgtctatttgcatactgtggactgtggcggatctttcacccacgtaaatactcctcaaattgaagataatgtcattgcgctgggttgagaaatacatccccaccgctacctcactgcatctctccacacaagtaaatatccctaagattagggcaagtc

SEQ ID NO: 241762 - DNA, 437 bp, Homo sapiens
acaacttcagggcatgacacatttggccggtcagtagaacccatgctgtgatttgtttttgcagtggtggtgatgactgccttgttgaatccactttttattctattccattttggggacacaattctgcaagatgattcttcattaggaaacagagatgagttattgaccaacacagaaagaaaaagagtttgttgctccacactgggattaaacctatgatcttggcctaattaacactagctagtaagtgtccaagctgatcatctctacaacatttcaataacagaaaacaacaattttcaaaattagttacttacaattatgtagaaatgcctctaaaacacagtattttccttatattacaaaaacaaaaattataattggttttgtcctcttttgagagtttgcatggtgttactccctgcatagtgaag

SEQ ID NO: 241763 - DNA, 471 bp, Homo sapiens
  misc_feature (450)..(451): n is a, c, g, or t
tccctttcctctttctatcaataatgcacagctggtgaggagagatcaaatacaactcaaatcagccacttcctcagccaagggttctaagcaaaggtatgtcagaaatgaagaaaatgccaagttcctgacttcgatttgaaaatataaaatataatatttctatataatatgtgttaagttgttttttatttttgtttgtttgtttgttttgagagagtctcgctctgtctccaggctggagtgcagtggcacaatcttggctcactgcaacctccaactccctgattcaagtgattctcctgcctcagcctcctgagggcatgtaccaccacacccagctattttttgtatttttagtggagacagggtctcaccattttggccaggatggtctccatctcctgaactcatgatccacccccctcagcctcccaaaaaaaaataagnnaaaaaataataaaaccctgt

SEQ ID NO: 241764 - DNA, 385 bp, Homo sapiens
atgtatttttaggaataatcatctgatttttagtgatagatatattgcttactcaaaactaatttagagaaagtatcaatttaagaatcataggtggggtggacacagtggctcacacctgtaatcccagcactttgggaggctgaggtgggtggatcacttgaggcaggagtttgagatcagcttggccaaaatggtgaaaccccacctccactaaaaatacaaaaattagctgggcatggtggcaagtgcctgtgattccaactactcaggaggctgaggcagaattgcttgaacctgggaggcagaggtggcagtgagctgagatcttgccactgcactccagcctgggcgacagagtgagactccatctcaaaaacaaaaa

SEQ ID NO: 241765 - DNA, 93 bp, Homo sapiens
aaaggcgtaaattaaacgctttgcagccttttcctgcccttaaatttgatacctttggtgtaggagctgcataagtaacagttgctgctttta

SEQ ID NO: 241766 - DNA, 395 bp, Homo sapiens
cataatgtttccagttgaggatgtagcgattacttgcaaagtctgtcacattttctgatttctgtctttactttgtcagtgtgtttgctattagacataaagcaaacaaaaaaccaaacatctatctgaactaattttaacacttttaaataacaaacttgctcttgcactacctagatttttttttgtggtacatttgggctgagattgcaatttaccttttcatcaagatttggatggcctcttcttatcagtacgaaaatctatttaagtttacatggactgcactttctcttacagacataaatgacttcactgtgcctaggcatttaaaattctttcaaaacctcaggagtacatccacagtgatgatttctctgtgggtttcactggta

SEQ ID NO: 241767 - DNA, 475 bp, Homo sapiens
gacagcaaagtggcctgtgatcacgtccaggctggtggcacttggatctgtttcttgtattatgtgggtctctgcgcatgagaagaaaatttccaggatagaaaaatactggtttgttcagggaatttcttaatatttgctgactgagtgatcgttttccattgtttcttgcatttagaaaagtaatccatggccgggtgcagtgacccatgcctgtaatcccagtactttgggaggctgaggtgggcggatcacttgaggtcaggggttcaaaaccagcctggccaacatggtgaaaccctgtgtctactaaaaatacaaaaattacctgggcgtggtggcgtacacctgtaattccagctactcaggaggccgaggcatgagaatcgcttgaacctgagaggcggaggttgcagtgagctgagatggagcccttgtacttcagcctgggggatagagtgagaccctatcacaa

SEQ ID NO: 241768 - DNA, 385 bp, Homo sapiens
attgcttgaacctgggaggcggaggttgcggtgagccaagatcgccccattgcactccagcctgggtgacagagcaagactgtgtttcaaaaaaattaaaaaagaaatctgtggtgtgaatactggtacgtggtgtacacagtgagctcttaataagtatttgaattaacaaatgagacaatgattgaataattggatgaacaaagagaatgcaggtttttaaaaggtttctttagaaatattgtcggcccggcacggtggctcctgcctgtaatcccaccattttgggaggccggggcaggtgaatcacctgaggtcaggagttcaagacaagcctgaccaacttggagaaaccccgtctctactaaaaatacaaaaaaaaaaa

SEQ ID NO: 241769 - DNA, 377 bp, Homo sapiens
cgtttatattccaatcccactaacaacagaataattagattctatgtaatattatgtaatgaataataaaattgaaaagactacaaatgtctgacatttgctgtatatttccttcttcccacattctctcaaatgaaaaatgtatttgttttctaagaattgaaactgaaatcaccacagcacaaaagttaaattttagataaaaaacgtattcgtttttgtttgtcccttataacaccaatattttgttcacatattatatacacactgaagtgaagaaaaataagtctttgaaatgaaaatggacagagttcacacaaaaattcaagttgttcaaaaactggaaagccctaaaaactagaccaattccaattaac

SEQ ID NO: 241770 - DNA, 399 bp, Homo sapiens
tgagacggagtctcgctcttttgcccaggctggagtgcagtggcacaattgtatttttagtagagacggggtttcaccatgttagccaggatggtctcgatctcctgacctcgtgatctgcctgccttggcctcccaaagtgctgggattacaggcgtgagccaccgcgcccggccggcctcctttaatttcttaaccataaatatcctccccccacttttattatggacgttctgaagcacataaaaatagggagcatagtataataaatttgtacatatttaacactcagcttctataattagaaacaaatggcccatctggtttcatctaggcctctttgctatcctttcatctccaactagattattttacagcaaattctagatgacattctgc

SEQ ID NO: 241771 - DNA, 886 bp, Homo sapiens
ggacccccttgtctccgggcctgtcctctaccccaccctcttcccccagtgaactcctatggactctgcagagacgtctggtctcccggaagccttccaagatgtcatgctgggtcaggagcccttctctgtgtccaaagcccctggaagtccccatctctgcaccagtcacattgtggttcatggttacgcatctggccagctgcctcactggacggtcagctcctggggggcagggtggggtgtggcttatctgtgaatgtccagggccccttcaggctctgagttcacactcaccagtgtttgtctcatagtcgaatgtgtggatgacagagcagtgctgggtgagcgggtcatctgccccagtccacctggaggctgcccagctggagctcctgaactggaaacttctggcccaagacaacctcccttctaggatgaaaaggtcctggggcagtccccctcccagtccctcaagggccggcctcagccttgttacaggacggttctctcgggcaggagctggagcccacagccctctgaatcagatgccactgggccagatttgtcactgatgaagactagaatggcctcctctcctctctgaagcaagagtttggtcagcaaatcaatggtgcaacaagagttggggtggagagctgcagagggggcaccccacttaacctactcgagaggggcccatccataatcagcaatctccatctgcatgcccacaattaatgtgctcctgcccttcagaaatgttctcttttcattaagggtgtccccatggggccgcagcttggcgatacgttcccagctgttggtttgagctatttattgtaagagcccaagttgaataaaacagcatgattttaaaaggaat

SEQ ID NO: 241772 - DNA, 514 bp, Homo sapiens
aagagatagggtctggctatgttgtccaggctcatcttgaactcttgggctcaagcaatactcccacttcagcctcccaagtagctgggactatagatgtgcaccaccattcttagctttatatatgtagttttaaggaagaccatctatgaacgccaggttaagaatctatgttttctagggaaacaggtcttactagcctagtaacactgataagtaaacagaattctctggaaaatgacctacctaagcttatacagctagtaattgataggaccagcaatctagtctgtcagaggatataccactaaactcttctttctaactttagtttacagtcaaaatgggattgctgaacctgggaaaaaaataaatgcttcccaatttcctatttaaacagtgtaagaattgggggtggcatttgaaggtgggagaagaagggcaaacttgttagtttactagtgtgagcggtagatttttatgccaactggaatcactgagattaaccttatgg

SEQ ID NO: 241773 - DNA, 363 bp, Homo sapiens
caccccagtcggggaggcgcccaaggaggaggtgaattgctttcacaccaagctctgagcattgcctcaagacgccatacaggccgggtgcagtggctcacgcctgtaatcccagcactttgggaggctgaggcccgcagatcacctgaggtcaggagttcaagaccggcctggccaacatagtgaaaccccagctctactaaaaatacaaaaaattagctgggtgtggtggcacgtgcttgtaatcccagctactcaggaggctgaggaaggagaacggcttgaacctgggaggtggaggttgcagtgagctgagattgcatcactgcactccaacctgggtgacagagtgagactccattt

SEQ ID NO: 241774 - DNA, 387 bp, Homo sapiens
tgtgcctggccataatttttttatatcatacatacagaaaagagcagtattagtagttgttattgtaagaaaaatgaaaactaaggcagtctagaaagcccttggaagagagaagaataaactgcgcttgaggaagttgacatttgggaagctgaggcgggtggatcacctgaggtcaggagttcgagaccagcctggccaacatagtgaaatcccctctctaccaaaatacaaaaatttgctgggcatggtggcaagtgcctgttatctcagctacttgggaggctgaggcaggagaatcgcctgaacctgggaggtgaggttgcagtgagccaagatcccgccattgcactacagcctggacgacaagagcgaaactccatctca

SEQ ID NO: 241775 - DNA, 553 bp, Homo sapiens
ggtacaagaggcaattttggggtcatttgacactatttggcaaaacagagaaaaacaaattaggccaatatatccaacagatataaggctgtcatgttccctgtggatagccattcttttggtgacagttttaatatcagtagaactgtttctaaatgaaataccatgctttcaaaatatccctttcattctcatccactggtgttacggtgtatggtgtgatctatggtgtgatccaaactaggcactgtagtttggcttaataactaataaacctcccaacaactgaaaggaatatagtctacttaaaacccatctctaaattccatcagttctctcctgtaaacatttctcatgtttgtgcccttagtcaggccctgctaaattcttgctaatattcttccagcttagctcgttcatctcctccaatctaccctcaaagcctctgccttagagacttcactaccaacaatgaggctgcaaaccttctgtgattatccctaactgcaagctgtatgtgtcagggactagaacctactttccattttagaca

SEQ ID NO: 241776 - DNA, 535 bp, Homo sapiens
gacgacaaatgtgtaaccagattaaaatctcgcgacatttcttaaactgcttttactgtagctctggaaacgttggtttcaaaaatcagtcgtgtcactgtcactcttggaattcgagagcccagagtctaaaagccagaaaggttgttcagagcttggtctctggcctctagagctttcccaacatgggatgggcacacgcctcaggcacagatgacttcactccccaaagactgaaccagagaactccaaggttcaactgatcatctgccttattttatccattagtctactttcatttgttagaagagacacagtttctttttatctctgtcttctcctgactaattctattagatcagccctcaaatacatcatgtgatttgtacagggatatcatttttattcttttttttttcggtcccctttcacgtacctctaatcatttttatccttgaatggcataagtcaaacttttgaattttctaatagaatgcctttttttaaattaaaacttgccttttgacttcctatt

SEQ ID NO: 241777 - DNA, 938 bp, Homo sapiens
tggtcttgaactcctgacctcaagtgatctacctgctctggcttccaaagtgctgggattacaggcatgagccactatgtctggctaaaacctataaacatttcttagagaaatgctgttccccaaaggaatgtgaacagctaccacttttaacaaggatatttaagaaaacagactatgagttaactaagtaaaaatgtaaatatggtttgcatgctgttaacatggcagaggggtaaaaagaatacagtcctggggagaaaggtcacttcactgagaaggcttacttaaaaatgtttttctccctgcactttcatgattattaagtacccctagaaaatgaactcatagcagcaaataatctaatgactccttttaggttacagagcaaagtagctttctacttccacatcacattataatatagccttataatttcttctttcctgcaaccttcactttcctacctaggaaaactcacctccggtgccagagaaacttcccaggatgcactagggccctgtgaacaatacagaagttgtggactctggctctttgtcccacctaagtccttccagaagggctctacagcatggcttagtgacattaaaaaaaaaaactgaacccatgttaatatcaaacaagattttaatcttcattcacacacccttaaaacccagtcacggggctccccggtgccagtttgagaccgtcaacctagccctctctgcttctcattgctggaggtacacacagtcaaaagttttccgtgactgtgaaatccagtgcaatctgcttcccagcagatgaggagcctgacgtggttatgtctggatttagtccaagaacagagcaaagctttaattgtcaagagacccaggcctcattctccacttaggagagtttgctagggcaggtacaggtaaaggtaaccagca

SEQ ID NO: 241778 - DNA, 2421 bp, Homo sapiens
  misc_feature (926)..(926): n is a, c, g, or t
cttgacatttccccagtccctgagctcatcttgaatttaaaaggaggctatctggaggctgggtggggactgagtcaccacctcccgtggctttctcatcctgagcagcaaccagacacacccagagggccactgctggagacctgcagattgtaaatgccacacaggctttcttcccagaagctcagatgggctcttgcgggaaggctgtcatcgtggttctgtatgtatttcttccttcccctagccactttgagaagttgttgcctgtcctttcccgcttcagcctttattaatgctgtcctcttcccctatagtgccctctcttcccctagaggcccacactgtcaaatgccacctcccccaggaagtttgtccttgctggctctggagtcccagcaggactcctgaggatgcttacggcatgaccttggcaggtcacgccacctttctgtgcctcagttttctcatatataaaatttgggtttcttgtctttataaagctccatccctagacactctcatttggcaggtcttggggcaggaatcacatgcccctaggtttttaaaccagctctctagaggatgctggtgctgagagcctgtcggctgcaacctgggaaaagctgaactgagaggaccctggtttgcatgacagcctagcttgttgctgtgtgaccttggattagtcagctttctgtacctccgttttcctccctatcagattggggtggaaatgagaactcgtgtagtaacagcccctcaataaatggcagtcatcaccatcatcagctttgttttgtgtggggattggtggttttcagaagcaagtcacctttcccctacttggtcctggcagcaggcactgtcaagtcagactgggccagggtgcaggctgtggaattgaacacctgagcaggaatgangtcagcctgtctttaaacagccccatcgagggagaggagcttgcccaagggtaaacagctggctggctcctgccagagctgggacagggatccaggactaggacattacagtccagggctctttaacctcctccccactacctggttattcgagaatgcacctgcccttccaatagagcagggagacggctgtttcttaattcaggccccaatcctgcttgttctttgttagtccgtttgtaaagatagatgggcgtgcccatcgggatgtctgtgcagggggacagttggattttccatgttccatcccattgttgtttaagggtgggccctgcttggacagtggcacttggaataaagtcactttgtagttgtgagccttggctgcttttcctgcttcccctgtagagtaggggaacaaagacctcagccgagagaggttctgcagagagctggggtttgctgtcaaggagcttaggatgtcctagaactttggtgcagggaatgagatcagctgttcaagcgccttgtcttacagatgaagagatgaggcgccagaagggccagggacccacagaggtttgagccaggacttctgggtcctgttccatggcgactgcctttgaagaagtcactgtcatgctgttatcacctgcccctggtgtataatgacaatctctaacatcctttgacctttttactgtgtacgctgtgcttggtgctttacttcagctacttgcagtggaaaagaagaagggcttggtgcctggcctggaagtgaggggtgcaggatcccagttcccacatctcacccacttttagggatgtcactttcctttgggcttcagcttcctaatccataaaatgggaataacattccttatcctaagactgattctgaaatcatggaatccctcaagaattgtgtgagcagcggctcactcctgtaatcctagcactttgggaggccaaggcaggcaggtcgcttgagctcaggagttcaagaccagcttgggcaacaagacaaaaccctgttgctccaaaaaatacaaaaattagctgggtgtggtggcatgcgcttgtattcccagctacttggaggaggctgaggcaggaggacagcttgaatccagaaggtcaggaggtcgagactgcagtgagctgagatcatgccactgcactccagcctgggtaacaaaatgagaccctgtcgaccgggcgcgctggctcacgcctgtaatcccaacactttgggaggccgaggcgggcagatcactggaggtcaggggttcgacatcagcctggccaacatggtgaaaccccgtctctactgaaaatacaaaaattagctgggtgtggtggcacacgcctgtaatcccagctacttgggaggctgacgcaggagaatcatttgaacctgggaagcggaggttgcagtgagctgagattgcaccattgcactccagcatgggtgacaaaagcaaaactctgtctc

SEQ ID NO: 241779 - DNA, 715 bp, Homo sapiens
gttcaagtagagtcagggaaggtcctaggggaggtggtctctgaactcaagggcaggttgccaaagaggaggagttgggagagcattgatgaccggcagagaagtcaatgcgcagaggtcagatgagagagtgacaaggaggaaacaaggcaggctggagcagagaggaccacaggagcaccatgtcatgcttcacccagaaatcagtctttgactgcgaaatggagcacaaaggaatcaacagaaccagtgggggttaagttcggattgggggcaccaggagacacaatgctctgagaaagaagagatcagcacgtgggctgctgtgagcatagaaagcttcacatggggatgaaacttgagccttgaaagagggcatggctgagaactgctatgagtgcctttggaaggcccaggggaacccacggtggacgtcacggccaaaagattactgccgaggactgcatctcaaggaatgggcaaggggaagacagaatcaggctaactcagcaatgccagtgtctcaagcataaaagagcatgtaactggactaagggcaatgaggaacttaagaggtgtcaactacatcaagctgcatagagagatggaaatgaacaatataagataaatcaaaggaagtccttcttcatgtagaagaggaataactcacagacctcattaccaaagaaaagttttcattaataaatgtacccat

SEQ ID NO: 241780 - DNA, 765 bp, Homo sapiens
gttcaagtagagtcagggaaggtcctaggggaggtggtctctgaactcaagggcaggttgccaaagaggaggagttgggagagcattgatgaccggcagagaagtcaatgcgcagaggtcagatgagagagtgacaaggaggaaacaaggcaggctggagcagagaggaccacaggagcaccatgtcatgcttcacccagaaatcagtctttgactgcgaaatggagcacaaaggaatcaacagaaccagtgggggttaagttcggattgggggcaccaggagacacaatgctctgagaaagaagagatcagcacgtgggctgctgtgagcatagaaagcttcacatggggatgaaacttgagccttgaaagagggcatggctgagaactgctatgagtgcctttggaaggcccaggggaacccacggtggacgtcacggccaaaagattactgccgaggactgcatctcaaggaatgggcaaggggaagacagaatcaggctaactcagcaatgccagtgtctcaagcataaaaggtattcgagtagaatttggcaaaaaaatggagaaatgaagaagttagatttaagacactgaaagtggtgtgcagcagaaagctttgtggtgatttgtgtattctcttttctccgtgaaacttctgcagtggataaacaatgatagcatccataaagatgtatcttgttttatataagaaaaaaaggattcctgaaaaatattaaataaaaattgaatttcattttccca

SEQ ID NO: 241781 - DNA, 333 bp, Homo sapiens
ttgacttgtgagccatataggttctgttttgactgttgtagttagaaagcagctatagatactatgtaaatgaatggcttggctttgtctcaatggaaaactgtgtttactagaagaggcagccagcccacaggctgaagtttcccagtcgctgatagaaacaattgaatatgccatttaggctaataaatggatttaacctttggcatctcatgaacaatgtcttctgacttacagaacagaaagaataaaaataccaatgcaaggttaacagtgctttgatctttgttccttagttacctattcagttttcatgagtaaatgattataaac

SEQ ID NO: 241782 - DNA, 1158 bp, Homo sapiens
gcctgaatgtacttcattgattcctcaaagcaaccctttgaagtaggtgtcgtgcctgcccattctgcagagttggaagaactaatctcatgttggaatgaacttaatctgaatatagtgcatgttttcttgaatgtctgaaggttatttccccattccattacacagtccagtcctgaatcaatgactgggcatggtgtaggactgtgacatacagagaacatggtccctgccctcacatagaacagagaacaatataaaatgtaacatatttgtcaaaatctgcaattcagatagcagacgctgtaaatctgcctccctgtttttctcctttccctgtctggatgttgaagaagtttcagcgacatatgaccctgtcagaggtactcacagttcagaagtcaatgctggttgcaaaaattggaatttctttggaaaagaagacaagcttttggcagagctggggccacatatgggaacgcagcaccaaggccttgggaatgacggaaaatcgcttctgtattgttaatagcaatatatgacctctgctgtcctcctatctttaaattttatgtaaatatttacaaactgttcatgtccaaactgaaacctgctatgaactaaacattttgtaaactcagtaagattgcccaaaatacaactcaactttcaccttttttttttgtttgtgatgacatttaatttaaaaaaaaaagacagtagttgcttttttttttctttttttttgtcagttcagggtcttttaattttttccctttacttttttttttgttaatttcaaatgtcagtctatctaaaactgaaacttaattttactatcagcatgctacttcagcttccgtaaggctggaaatgtcctgcgaatcttaccactatgtcttttccaagggccatttcatttctaaagaatgtataaattgaacctcatcctgctagtgacactacttccaaattcaggcaggaattttgccatttgtttttccttgagctattttttttccaaaataataaatcttcccaatccaaaagcatttcacatcatccttcattctagtcattggaactacagccaaaatgcctctcagtcttccccagtgacttcataatcaccgtttcttcagcatattccctggttga

SEQ ID NO: 241783 - DNA, 239 bp, Homo sapiens
agtgcaaggagtgcttctccctgctgtgcacaggacacacaggcagtgccattgtgggcagagctggctccagagccagtcggcctgtgttcgtgtatcagctttgccgctagtagctgtgtgaccttgaacaagttacttaacctttctggccctcggttatttgaaatggagataatgaccgtacttaggtcataagttggttgtgaggattaatgtaattaatttgatacttggaa

SEQ ID NO: 241784 - DNA, 381 bp, Homo sapiens
gtccccagtgcttagaacagtgcctggcacagagacggggctctgtaaagatctgctgaatgaacactttatcctcttacttcttatccttcaagcctcagatgttcccccaggatgccttcttcgtttccccagactggttcaagctgcacctccgacgtgctcccacagcccctgagctgcctccctgcagacgccatacctgccgtggctgcttgtttgctgagtagcctctcccactgaaccctgggcaacttgaggtcagggaccatgctgtttactgtcacagtgaattaaaatgtctaaaacggtgtctgaccactagcacatacttaacaaataatttttataagtgaataaacattctcctcttttttcttc

SEQ ID NO: 241785 - DNA, 375 bp, Homo sapiens
ctttggacctcaggcctccaaccatttgtttcaaaagtgggcaatttctttaagctagacatttccttaatgcattaaatatattttttctgcagtaaatggaaattaacatctcaaactgtctttcattcaacctggtgtgttaaagaggacttttctggcacataccaatgaagtttcagaaatgccctgaagtttccaaaccatgtgataacttgtgaaaataagaacaaaagtttgtcttttttttttttttcctgtggcctgggtgatggaaagaataaagggaaggctgtatggcagttctgtaattcagtactctttggcttcttttaaaggaagctggggtttcaataaaagaatcattttcactgc

SEQ ID NO: 241786 - DNA, 358 bp, Homo sapiens
tcccttttactctcctatccatattcccccagatcgtagttccctcacctctttcacacaatcttccctgcaaaactccacccacagctttcaatacctctccccacttctctgctctttattgggaagacaagcacagtttcttccttttgggaccattcctccctcctccggcttttcaggtctaataatgtatccattctctatcacaaaagccaagctagaatcctctttggagcaccgcccaggtcaagaaactgcacagatagagcagagggagaaaggaggttcagaacactcatgcattaattgttttggtctcatcacagtttctttttttttctttctttcttttctt

SEQ ID NO: 241787 - DNA, 389 bp, Homo sapiens
caaactctgtggttatattggagacatatcaaagaataatattactagctgatctccaattttcctttaacaatcttcaggagaacatatttatttatgcttttaggcagatatttatttgttaatttatcaaaaataggtaattcttcagtgtctgctttgtttttggcactctgcatagtgctaggggttttgtgttgaaaagcaggtgaaatcccttctgtactaaaaatacaaaaattagctgggcgtggtggcgcacgcctatagttccagctacttgagaggctgaggcaggagaatcacttgaacctgggaggtggaggttgcagtgagccgagattgcgccactgcactccagcctggtgacagagcaagattccctctca

SEQ ID NO: 241788 - DNA, 242 bp, Homo sapiens
aagcggaaggcttttattccccttccttctattgttgctcacctttcagtcaaagcatgggtctgcttcccaaacttcctccttccttctccgttcctgggtttcccttggagcaactcgccacagggcctctgtttggcctgggcctttccaggatgcgttacttagtcttggttctcaggatcaggtgagggcaactctcctctatgcttagcagcctgcccagctgctgccatttgcag

SEQ ID NO: 241789 - DNA, 341 bp, Homo sapiens
taagattaatagttggcttctcagaaaccatagaggtaagaaaacagtgggataatgtattcaaagtgctcaaagaaaaaaaaaccaacaactgtgagtcaagactcctatatccaacaataatcctatatccaacaaagcttctttcacaaataaaatgatccaaagtataggctgtctagaggaaactcacttagattcaaagatataaatagattgaaagtaaaagaatggaaaaagataatatcatgagaacagtaacaacaagaaagctggagtgactatactaattttattttatttttttattattatactttaagttttagggtacatgtgca

SEQ ID NO: 241790 - DNA, 594 bp, Homo sapiens
aactcccaacctcaactgatccacccgcctcggcctcataaagtgctggtattataggcgtgagccaccgtgcccagccctttaccatcttctaacaaaggtgttaggctaaagagacttcactggaacagcacggcccagatataaaaactggtagttcagcagttaaggtacccacgcaaggagcacccttgccttccactctcactgctaggccttccccaagcagtgcccccttgtctgaaaaattttccctctccctcttcccagcccctacaagctaagctgccacatcatgtcctttacatggttcccacttcctccagaaagattttctaggatggatggatcctaggaaagaatggatgacagatttccacagccccaactcacccagacatgaaaatttctgtttatgatctttctttctttcccacttatggaacctgcactcttattattaatgtatttatttgcctaaggtgctattttctcttgtctactgattgctcagtgcaacgcatctagctccaaatatgagcttctacaaagcaatgttttcagcctcattacatagagaaggactgaaggaaa

SEQ ID NO: 241791 - DNA, 411 bp, Homo sapiens
aagaagtcactagtactaaccccaaataatgaatatgttttatagttaacaaaatttttcccagatcaataaggttaataagtgatactgtcacttgggcatgttaataaattttttaaaaaataggctgagccagctgaaaagctacaactggaaatagattatagcattttgccccaggctttggcagcaattgaaacaaagtattttgaaacacagcaaattggcatttctctgacttccaatgttcagtctctccaagcgggacacctggttcaactacacaaaacagctattcagaattagagtctgggcttttgttatgcaaaaggtaaatgagggtagcatgaacttttccaggaaaagctgtttttactttttaccctagggagacctctcttcagaaagaaa

SEQ ID NO: 241792 - DNA, 394 bp, Homo sapiens
agagtgggcttcctactcctgccccgaggaagtgctgtctgtactgaaacaggacagaagtgactctactgtgaacccctcaagtatccagaagccgacatacagtttgtatttcctggaccacctggtcaaggccctgcagaagatgtgcctgcacgaactcacggttcccgtcctgcagttgggggtgctgatttcggactccgtggtgggaagcaagggcctgtcggatctctaccaccttcggtgggtacagctcctttttcggagtgtgatttccccaaagcaaaacaaaaataaacaacatgttaaggtattaattctgtagttgactgtgtaaataataaagtccctgggacttgaacaccaagtaaataaaaatatttgaatatga

SEQ ID NO: 241793 - DNA, 368 bp, Homo sapiens
ttaccatgtgacacgctgctcctctttgccttctgccatgagtaaaagcttcctgaggcctcaccagaagagctgtgcagatgctggtgccatgcttgtatagcccacagaactgtgagccaaataaacctcttttctttaggaattacctagcctcagttgttcctttatagtgatgcaaaacaaactaacacatccccttttgttaaaagaggaaacagattcagagtgaataaataatttatttaaggtcacagaacaagtgagggggttgaaatgtgagcccagatccatctgattccactcatgtgatttttcactgtgctgagaaggggtccagcttagaccagggtcaccaccctcctttc

SEQ ID NO: 241794 - DNA, 266 bp, Homo sapiens
tttttctataaattaaatgatatctaccgtagaggcaaatagtcattgctgaaaagccagttccagaatcctaggctttattcaattcagtggtatttataatcaattgactcacttattaaagtagtataagaaagttaagagcttcagccgggcacagtggctcacgcctgtaatcccagcactctgggaggctgaggcgggcagatcacgaggtcaggagatcgagaccatcctggctaacacggtgaaaccccgtctctact

SEQ ID NO: 241795 - DNA, 461 bp, Homo sapiens
agatcaaccttttcttctgtaaggttttgcacaactgactccagagaaaacacaacaacaccatcctcatcagagctctggacaaattcttccatttcctacagaggaaaaactttcttcattataaagatgcaatgccacatagaataatatagtttatgtatacttctaaaataaaattttgaagttgacatatatatagttatatcatccctattttctgaggtgcattttagaatagaaatgttcaagtttgtgttagaaacatatggcttcagtacataataattatttactagaaaaagcacacaaccaaataattataaagaacatttaagtgagaaatgtgcagctcatttaatatttaatagacatcaaattctaaaaacataatggtttgcaaactcataaaactatttcaacaatatcaagtgtcaatttgctggcattttgtgatgtca

SEQ ID NO: 241796 - DNA, 411 bp, Homo sapiens
agtaaagagttggtatctgactcttccaaggctctgatccagtggtgacctgattagttggttcccagttcataccagttgagtatttttattatcatccctacccttaataacccaggatccttgtagggtaggaattgcaaactaattgtctaggccccttcaggggcctagacagcttatggaaattagtggagtggcagggtagggctgtagcaaaataggaaagctcacacgttatctaaaggaagtccacacaactcaattccatccagttccatgcaagaatgcagacttgatggtgctgtatcgtatgatttttgaacagaaactggaaagacagttttgtagtaaatctcaccaattttaaaaaatatcgactactgggcaacatagcgagactccaactca

SEQ ID NO: 241797 - DNA, 368 bp, Homo sapiens
aactcaatctgctggctgtggagaaaggcaacttcctcttgtctcttcccatgttgtttcagcctgccccactactggctcagtttagctcacccaaagtccattttcagtttcatggctcatcatagacttgcaaatactatgcgttagcttcgtattacagaagagaaaatggtaatgtgatttacgcaggatcacacatgagctacatcctgttttcattcgccataaaccttccccaggtccccgtcaaattcatccgtccatctgtccatctacttattcaacagatacttattgagcacctacaatgagttgtgcacttctctgggtctgtttctggggattcagcagtaaaccaaacacac

SEQ ID NO: 241798 - DNA, 167 bp, Homo sapiens
ctgtgacttgatacatctgtcagatttttgtaatctcgataaatgtgtattgaagttttttccctttttttaaaaagccaaactaatatttttctgtgagttaatacatctgtcaggtgtgtatgtaacattactggacattaaaaaaaaatattacattctcaccc

SEQ ID NO: 241799 - DNA, 217 bp, Homo sapiens
ctaaaccataaaaacactctaaagtggggttagagttgctagtggtaggaatagtaatggatataagcactgggtaaggaaaggaaaggaaaagacagactaagcttttcttagctttaatttggtagggcttgatccaggaacaatggcccatgattctgatgataatggcgtttgcttgactcaggtgtgatgtgtccatcccctttctgctgta

SEQ ID NO: 241800 - DNA, 276 bp, Homo sapiens
acgatgatgaatagaagtagcgatagtagccttgtcttgttcctaacctcagaggaaaagcattcactagtttatgttaaaagatgttagctaagggtttttgtagatatccttcattagattagaaaagttcctttctattcctgttttctggtagtttaatttgaaaaagtgttgaatttgtcaaataatgtttctatatctatcaagatgattatatgctttttctcctttattctgttaatgtggtgaattacattaaaataatgttaaagt

SEQ ID NO: 241801 - DNA, 706 bp, Homo sapiens
  misc_feature (95)..(95): n is a, c, g, or t
  misc_feature (98)..(98): n is a, c, g, or t
  misc_feature (106)..(106): n is a, c, g, or t
  misc_feature (155)..(155): n is a, c, g, or t
  misc_feature (261)..(261): n is a, c, g, or t
ccttctcattcagtctttttcctttacctaccctttaaaggttcatgttcttcaaagtttcatttccttttgcatattctcctttgataacagcnttntccgtagntaaaacactcacctctttgctgatggcagcctgggttcttcattcctcntctggatccctgccatgtctttttgtcatggccctcaattgtgtgcatgtaaggaagtatgtgtgcctctcttagactataagtctccagcacctaccataaggtntggcccatagtagacactcagtaaatatttgaaggaagaaagaaagaaaatgccaggagtagtggctcatacctgtaatcccaatactttaggaggctgacctcaggtgatccacccgccttggccccccagagtgctaagattacaagtgtgagccaccgccctcggctgtgagagggcttctctccggcctgtggtaaagctagagaatcatcctttacacactagagatgtggatttgcgataaactgcagacctagataagacactgctgcctaatcagcgtgtgatagttcatatcctctctcgggctgtctttgaggaggatcctgttttacatcactctccaacctaggaggttgatgatctttgatttcaattgttagctcccctggttttataaattgacagatatctaacaattcagctggccacaaagttctgg

SEQ ID NO: 241802 - DNA, 357 bp, Homo sapiens
tgaagagtacgtacatctggtagtttgggtgtatgaaattaagtatacaaatgctcatacatctaataattaatgtttgatttaattggaaaggtcttgcttttaaggtactagacatttttgaatgaaattataaaataatagtaaggcaactcatttccaaagtctaaaaaagagaaacaaatacatttgctaaattttggccataattcctcaaatcactgccagcattaaaactttcacgccatcttccagccagcaacaagatgtgaccaatgggaacacgaggccatttaggtgaaggagatagttctggctctgagacatggttcgtccccttccccctccccataaatg

SEQ ID NO: 241803 - DNA, 386 bp, Homo sapiens
gttgtttacctctaaagaaggttgagtttttctctagcaggcagtaacttgacttggacaccattttgatgcttggacacctgcctttcagccttgctaggttttctctatagctgccttaattctaggaatacactaattctactcctaaagtctggcttttctggggtctctgctgaatgcccaagatgttcagtgtggtcactctcctctggctggtcagaactccaaccgcccccagtgctatctcagctctgtgagctttattgagctcactgttgccttgtagttgctgttcctcagtagatgtcctttgccctagtctcttgtggaacatttttctgtgcacaaaaaactttatgtttagtcaatgacttgaagagatt

SEQ ID NO: 241804 - DNA, 372 bp, Homo sapiens
caccatgttggccaggctggtctcaaactcctgacctcagatgatcctgaaagcaacaagatggtgccttcccccttttccccttcctttgcttgagtgataccagaggtatctagttaaaatagcaggtttaaataaaatccggtctcataacataatactcaaaatatctaggtttcaagtgaaaatcactcatcaagatccagaaagatctcaaactgaatgagaaataaatggattccaatacagagatgaaagaaatattagcattatcaaggattttaaagcaacaatcataaatatactctaatgagcatgcttaaaacaaatggaaaatttgaaaagtttaccagagaaatagatagtctcagc

SEQ ID NO: 241805 - DNA, 1020 bp, Homo sapiens
cccacgcgtccggagaggtggagggcaccctttgtggaggaggacccctaaaagggtgccctccacctctccctcctgctggttggccggctcagagatgaagggggagagatggtggctccaaggctctgccaccgccacctcccaagcctgccaacgtgaatggcttgcagaatcagtcagcaggccagcggccttgggaaagagccactgtcctcgcagcctgggccagctgggggaacaatgtagggtttgttgcttaggggtcccaggcttgcgggggggttggcacatggtgggcagtggacttgagctgggatggtctgagggggcactgacacgctcacccgagggcagacttcagaccagccctcagatcctgatgccaggttacagggctgaggggagcctgaaatccactgggtctccctgctccacttgggagtcaccttctcatcacctatcctggaactgaatgcaattacttaaactcagtctcagcttcctcatctgtaaaatgggaataatctgtccttcacagaggattatggtcatttaatgagacaagatacataaagcactttgcatggtgaaaaaaaaaaaaaaaaaaaaaaaaaaaaaaaggggggcccaaaattcccagggggccatcccccagcttttcttgtaccaacagtggcccctatggtgagtgtcgtttatataggctagggcacgcgtggcccggccgtttaaacaaccggtgcgtggcagcggggacaacaccgtgctaaccctggggaatctcggtgaaaaaggaccccttactctggctgtggggtcggcacctctgtggccccactctaccttaccagaagatattaaaggcctcaaagggtaattataaacattccaacggggtctttcatggttgtaacccaacgctgcattgtgctcggccgacaggacaagtttggcattaagggcattatgacttcagcacatttttttccccgtgatctcttatataaacgggccacc

SEQ ID NO: 241806 - DNA, 1824 bp, Homo sapiens
ccactgcccccggcagacccttcatgcagcttctcctgtggggtcttgcccttgaagtgccacttcccccagccccacctctggtcccttccagagggcacccttagccttgtaggtccctgggaagctggcacagcatcaaccagaagtgatgcctcagccaggccaccagtcgctccccgcctgggagctcagctttcctcagaaccaccccccctgtctgaagctctgtcctgggtcccaccagacttctgcccaccaggcctacctacagcatccacatggggcctcaggaagggccccgggggcccagggatgggcaggggcagggtttccaagcgcctggggctccattctcctctgtccacccagccacaccccttggcctcagcctgccctgtacccaagcttccctccccctctcctggggatcttaacggccttgttctctctccctggcacccacccccagggcgggtgatgccgccaagagagagggaggccgttgctaggtgatggcgccgccatgcacacaccctttgtgctggggagtgacacccacccgtttctcagcagacctgttgccacggtgactgaagcccccagctctgtctgtagaaacttcagatgggtgggggagcaggttggagaggggaccaaaggcaggcctgtcgtgctgaagctcttggggaccgtttcctcggcatttccccaactccttctccacccccctgccaggcccggaagtaccaccagcttcctaagggatgcaggaaggggccgggtgaactgaggtgaagtccagggcaggggagtcagacccctcaacatcctgtttaggggtcctcctccacaaagggtgccctccacctctccctcctgctggttggccggctcagagatgaagggggagagatggtggctccaaggctctgccaccgccacctcccaagcctgccaacgtgaatggcttgcagaatcagtcagcaggccagcggccttgggaaagagccactgtcctcgcagcctgggccagctgggggaacaatgtagggtttgttgcttaggggtcccaggcttgcgggggggttggcacatggtgggcagtggacttgagctgggatggtctgagggggcactgacacgctcacccgagggcagacttcagaccagccctcagatcctgatgccaggttacagggctgaggggagcctgaaatccactgggtctccctgctccacttgggagtcaccttctcatcacctatcctggaactgaatgcaattacttaaactcagtctcagcttcctcatctgtaaaatgggaataatctgtccttcacagaggattatggtcatttaatgagacaagatacataaagcactttgcatggtgaaaaaaaaaaaaaaaaaaaaaaaaaaaaaaaggggggcccaaaattcccagggggccatcccccagcttttcttgtaccaacagtggcccctatggtgagtgtcgtttatataggctagggcacgcgtggcccggccgtttaaacaaccggtgcgtggcagcggggacaacaccgtgctaaccctggggaatctcggtgaaaaaggaccccttactctggctgtggggtcggcacctctgtggccccactctaccttaccagaagatattaaaggcctcaaagggtaattataaacattccaacggggtctttcatggttgtaacccaacgctgcattgtgctcggccgacaggacaagtttggcattaagggcattatgacttcagcacatttttttccccgtgatctcttatataaacgggccacc

SEQ ID NO: 241807 - DNA, 162 bp, Homo sapiens
ctgaggcttggaaagaatgccacatggctaataaagaatagaagcagggcttgaatcaaggaagtcttgataagggacttcacactctcaaccactgcattatgtggccaagtgggagagctgagggatgaaaaacacaagacatttcacaataaatcatga

SEQ ID NO: 241808 - DNA, 577 bp, Homo sapiens
atggagtgctcccaaccagaagatgagggaaatggagataatgaagcacgtccctcctaccaaacacgataaattctacaggcactgtaagatcaagaatttaagattatttttgtcccaccctattttacaggtgaggtatcaagcacagtaactcgtaattttcttttggcccaattgaaaggtatcatataagagaaagctgtgtgtgcgtgaaaaggatccgcctttctttctgaagaaaagggtggttacggcttcggaaacgcttttcaagccaactctgcagcccggctggcggcggcagcggcggcggcggcaacgtcagattcccgcagaggcggcgcccggcaggggcggcaggagctcaggagaggcccccggggatcgggctgggccccacgtgagagctaagcgactgccctcgcgcccgcagaacagcagggcctgcatcgactctaaggcgagaccagaaacttgctagtggagcaattctggtgcccctgcccgggctgtgaaccctctgagatcatccctcaatcaaacgaatagaaatcctcgggaagaaaaaaaaaat

SEQ ID NO: 241809 - DNA, 608 bp, Homo sapiens
ctattatagttctttttgtttgattgctttttcttggtttgaatgaaaaatatctttaagaaagatttgctaatctttttctgttttatcactaagttaaaattatatttatttttactaagtagttttcagttttgtgttattaaattgagtagcctttgtttttttttatttttagcactcccctaaatggtttctaccaattcagtctcattgaagctttctatccttaacatttgtaaaaataatataatctttcattaatagcaaataagctttgtttggttttgctgctcatgcatgcctaatgctgttctgtgtaagatatatctcactagttagcttgactaaaacttcttaatgtaaaggttttattgatttagtaaattaatgtccctaaatattttgtctaagatagtcactgttaataatttggcttttcagaaagtgtataagaaaacaaaaattttttttttgagtttggaaattaaatgttcttaagaatatttgctttttttctagctctttccattttttaaaaaattctttttatttatttatttatttatttatttatttatttatttatttattttgagatggagtct

SEQ ID NO: 241810 - DNA, 409 bp, Homo sapiens
gagtgttgcaatagctgctttgcttgagtttcaccagccacatgttccttattcattccattccccatcacaaattcccaaagtagctgaccttcgccgggaggtaggcagagaggctcacagaaggtaaaaattcccactggccttagttatcccaggaacttacgcatttactttttattaaatttattttgattttttattttatttttaaatgtttgtgggtacatagtaggtgtatatatttatggggtacatgagatattttgatataggcatgcaatgtgtaataatcacatcagggtaaatgggttattcatcacctcaagcatttatcctttgtgttacaaaaaatctaaatatactctcagttattttaaaatgtacaataaattatttttgacttcag

SEQ ID NO: 241811 - DNA, 300 bp, Homo sapiens
tgagcctactggggggctggcttcctgggaaaagctgtgggcccgctccaagcctattgtgaacttcaaagatgacttgaaacccacgctggtgtgaaaagcaacagagctggtctagacacagaggtcagtccaagagaagctgtaccaaggcccacaggagaagagccaatttctggtctttggggaacagattagtgccctgcatttgaccagcccataccatgtttcagctaggctcactgtgttactttgagtacttcttgatctataaaaagagaggcattgcctgtcctgtta

SEQ ID NO: 241812 - DNA, 363 bp, Homo sapiens
caaattgaattgtatccgcaaaaggaaacgttgaagtcctagcttctggtactttagcttctgtgactttacttggaaataggaaatagggtctttgtagatttttttaagatgtaaattgggccaggcgaagtggctcacgcctgtaatcccagcactttgggaggctaaggtaggtggatcacgaagtcaggagttggagaccagcctggccaacacagtgaaaccctctctctactaaaaagaataataatttaaaaattagccaggcatgatggtggtgcctgtatttcccagttactcgggaggctgagtgaggcaagagaatcacttaaacccgggaggcggaggttgcagtgagct

SEQ ID NO: 241813 - DNA, 589 bp, Homo sapiens
cccaaaatatattacaaagttgtagtaaccaaaatgggcattaaaaaacacgtagatcaatggaacagaatagagaacacagaaataaatgcacatatttatagtcaactgatttttgtcaaaactaccaagaacactcattggagaaagaaccgtttcttcaataaatagttctaggaaaagtggatgaaactaaacccctacctctcacccaatacaaacgtcaacttaaagtggatcaaagacctaaatttaagacctgaaaccatgaaattactagaagaagttctttgggggaaatgcttcaggatatgagtctgggaaaagattttatgaataggatatccaaagcacaagcaacagaaacaaaaataaacaaatggcattatagcaaactaaaaagtttctgtgcagcaaagggtacaaccaatagagttgcaagatacataattaatatacgaaaatcagtagcttttgtaggcacatacaatgaactagctgaaacagaaatcaacaaggcaatcccatttacaatagttgcaaaacaaataaactgcccagtaaataatgtaaccaagaaggtgaaagc

SEQ ID NO: 241814 - DNA, 547 bp, Homo sapiens
cccaaaatatattacaaagttgtagtaaccaaaatgggcattaaaaaacacgtagatcaatggaacagaatagagaacacagaaataaatgcacatatttatagtcaactgatttttgtcaaaactaccaagaacactcattggagaaagaaccgtttcttcaataaatagttctaggaaaagtggatgaaactaaacccctacctctcacccaatacaaacgtcaacttaaagtggatcaaagacctaaatttaagacctgaaaccatgaaattactagaagaagttctttgggggaaatgcttcaggatatgagtctgggaaaagattttatgaataggatatccaaagcacaagcaacagaaacaaaaataaacaaatggcattatagcaaactaaaaagtttctgtgcagcaaagggtacaaccaatagagtgaaaagataatttacaatattagagaaaatctgtgcaaactacttatccaatttggggtgaatatcctgaatatacaaagaactcaaacacttcaacagctaacaaaaaat

SEQ ID NO: 241815 - DNA, 1989 bp, Homo sapiens
  misc_feature (578)..(578): n is a, c, g, or t
aagtgaatttgcccatttctgcccacaccaatcttataacattccaggaataaaatctgcactcgagtttaaaaataaaacgggtggaacaaactgaattagaagtccttggcagacatcccccccagcagaatgttctctcaattggtggtattgcaataaaagagatgtatattttttagtctgctcttcctccctgataatttcagccagttgtatttctctattctaaaaacctggtatgcttggatttaatctcaccactcctatctacgctcctgctcctacccccacacccatttcccccaaaaaaaccccacatctgcacagaccctccttcccaagaaaacatggaggcgggctgctctctgataccgtacatgtgcattccgactgtgctgaggaaggtcatagaaacatgagagggctctgctgttgtcagttgtaaagactgccaagaaagaacaacaaaaaaatctcaaatgcattcacatttctcccgcctcttttttcttctgtaaatattcaaccctttttagagaggcttttgataatgtgttatctcagcaaacaccacnaaccttggatgtacgcagtactccctaatcccataggaatgactcagtcaagagagttagatgaaatatggttggcaagattgggtggggaatcttgttactacacacacatacacacacacacacacgcgcacacacacacacacaccagcagcaccagccactgcacccctatcatcgccatagacattatgtaaaaactagacattctcctctcccttacacagtcagttgcatctttcccaaaaatggaaggggaaaaagctttctttggctgagccatatgcaaaaaatcatggaacatctgtgtaagtaacaacatacaacaagacaaattattggtggtaaaaggcaaagcccttgtttcaaaaacatgtctggaaatagtgtgtatacagaaccttcctttgtgctaattactcataataactgtcagctttgtgtaccacaggctgggctgttaataactagtggtcgcagtacggtgttctttttctttccctttctttttttttttttcctatccttccttccctctttcctgccttcttttcattgttgttgcacaaatcatatagccttattccaatagttgctggaagaccaaatcagagatgtgggggattcagggactcgcgacatcttggagtatactagtggataaatgccacttcacccctgatgtggccgtttccctccaacacttgtctaaggagtgcagggactttggggtccaagcaatgtatcagtaaacttcagaatttttttcctaacatttaactctattctcagtctcaacacccgccacaaaaataatgtcactccaggcaaatttagtcgcttacggattctgagtcttattgtgattttgcctgagtggcaagcttttcaggcacgtgtacttaaaaatgtgatgtggtagaatttgcctccagctaggaatccacagacttgggtttgagctccacgtcccacagtcaccacgtgatcttcagaaaagaatcactgaactgcctgtgcctccatgcccccgtttgtcaagagggaggtggtaatacctgctgcggtttttatgtggatcgaatgggcctaaaactcatagaaacacagaatgcttctatgataagagaaaactccagccaggctcagtggctcacacctgtaatctcagcattttgggaggccgagatgggtggatcacctgaggccaggagtttgagaccagcctggccaacatggcaaaaccctatctctactaaaaatacaaaaattagccaggcgtggtggtgggcacctgtaatcccagctacttgggaggctaaggcatgagaatcacttgaacctgggaggcggaggttgcagtcagctgagatcgtaccactgcactccagcctggaggagactctttctc

SEQ ID NO: 241816 - DNA, 413 bp, Homo sapiens
aaatctccatctgaaggtactgatgactcaagtctgtggtcctgcataagcaacatctttggagctgttagagaagccctgcctcaggttatctgcaaatctcagcaactgaacagtcaaaaatgacacaaaggaggccaggcatgatggctcacgcccgtaatcctagcactttgggaggccaagatgggaggattgtttgaggccaggagttagagactagtctggtcaacatagtgagaccccatctcaatttttatttaaaaaaaaaaaaaattagccaggcagagtggcacaagcctatagtcccagctacttgggaggctcaggtggcaggattgcttgaaagtttgaggctgcaataagctatgaatgcgccactgtactcctgcctcggtgacagaagaagaccc

SEQ ID NO: 241817 - DNA, 313 bp, Homo sapiens
aaggactttgtgtcagtttctcctgggacaaatctagtctggaccactttgcaacatttgttcaaactgaaaattttgacaaagacattctgttcacaaagagccaacaaatgttctgtgtttcgatacatttggaggttacaaaatgttgcctggtcttggcagataactaagtctggggacccacatagtgcaagccatgccctgtttaatttgtctttcaatggcaaatgtgtttcttctgtgattcagcataagggatgataccctccaataggactgtgtgacctccctgctgcttttgtggtataga

SEQ ID NO: 241818 - DNA, 456 bp, Homo sapiens
agcctttgacaggctcagtttacctgctgcttcttccaagcccaacttcctcctccagctctgcaggaggagatctgcatgacctcaaggacagcacaccccagggtggcagcccctggaaagcccagcaggagagccgtcagcggagggatgtcatgggagccagtggcatccctagcaacctgcactctcccaggtcccagccagatcgccagctcagccaagcaggagaaaatggctccctggaaccctgtaagtgactagcctaggctcctctgcccaaagacctgtgtcgaaagatccaagacacttccctccgccgtctgaacacaactgggcctttgtgtgtcggggccaaacacggttcctaattggcagcataaacaatgggcctctgtgtttgttcccagaagacaacacagttctgcagcaatgacacgtgtttcaatgtacaaa

SEQ ID NO: 241819 - DNA, 451 bp, Homo sapiens
gctggcatacagtggcatgctctcagctcactgcaacctctgccccctcaacctgtggtactctccctgtctaatcctaaatttcaaacgccagagccacacagccctaggagagcgaaccagatggggcagtgactggtccaaggaccaggtccaagagtgtccaggttcctggaccatggccagtccacaagcccatgcacccaggtctccggggcttgcttcatctctgctggacttgtttccgcagggttattactgttctatatctgttatacctcccttcatccacggcagggactcctagaaacagactttcactcccatggaaggcagctccacacttccaacccaccttagcgcaggtgaatggaaggcgaattggaacaagtattcccaatgctgtttcagaatctatccttccatttaaaaataaaaaacagaaacaaaa

SEQ ID NO: 241820 - DNA, 650 bp, Homo sapiens
aaataacagatttaagtggtcaggaattttgttataaatatagaatgatgattatatgaaatcttttcctgtgaaagtcaaatttaagtaaaatctttatcaccatctgcaacatttgtctgcagcctggcttaccaggttatcataaagaacatttattttacagatacattaaagaaagtcaaaaccctgattatgtgtaaacaattttacataaggaaatatatgaattttaattatatttttctaaaatccgtactcagcatgaaattaatacatcttaacccctccctgtgacttcattattatttttaatgtaactttagaagaacccagtagagagagcagcgtgctaagtgtgtttctttcttttccagacaactttgaatggagaggagcaaattagtcttttggtttaattctgtctcagtttgcttatctaaagaaaggaaaacagagtggctacacttgtttagaaccatatgcatactccagagaaagatgctctattaatccaaaaaatacagccacttgaaaccagccaaagcgaaagtgtaagggacttcatggaaaggaggcagttcaccaaagttattgaggggttttatattttaaactccgccagtgaattgacgtgtaatgtcacttac

SEQ ID NO: 241821 - DNA, 395 bp, Homo sapiens
tgtttttactagagacagggtttcaccacattggccagtctggtctcgaactcctgacctggtgatctgcctgcctcggcctcccaaagtgctgggattacaggcatgagccaccgtgcccggccctctttctctttttaaaagcagatctcatctaaatctcattacctcccaaaggccccacttcttaatttcataccattgagggttaggtttcaacaaaaaatgatttaaggggacacaaacctgcagtccataacaagcaggtagtgtgggtcaactatggttttgtttttaacaaatgttttgactgttcaaagcctcttgcaattcatatgaatttgaggatcatcttttccacttctgctaaaaagctgtggcagtttggataggga

SEQ ID NO: 241822 - DNA, 1416 bp, Homo sapiens
agcggggggtctcgggcaggcgcggggagcttaccgacctcccgcccccgctgcgcgcgtttctggccctgccagtgtctccgccggttgaaagcgcgtgtctgcgtcgggttctgttggagtgcgttcggtgcgccgtgggtccgcgctgcttccacccaacttcctgttagtttctctcctgtcacaatggcatgatctcggctcactgcgacctctgcttcctgggttcaaggattctcctgcctcagcctcccaagtagctgggattacaggtttccatcattatcttctatggagttcttcattcccacatctgtggaccttaaaatcctaccgttgagtgcctgccttggatcagcagtcagttcgttaccttggttctcagacgatgcttgcaacaacgccatgcgattcgcccactcttgggttacattagttatacactctggaggtgacttgacctgtcattgtgaacaattattgctcttggacgacccaggacataggccagccagtacttaccccagtgtgttggagaatcgcgctcggcttcttcctctgtgctgagtcatgaaagttgccggagcaggtgcagttacacaacctccaggtatgatcctgtttaaggactggatttaggataactacttagaggttaaaagtcacaagggtgtatggatgaggctggagtgatctgggaccaaagacatctaggcttgctgtcaaggcttctgatcaacatgagatgaccgccgtgtggtaaactgatgaaccccgaccctgatcaacatgagatgaccgccgtgtggtaaactgatgaaccctgaccctgatcaacatgagatgaccgccgtgtggtaaactgatgaaccccgaccctgatcaacatgagatgaccgccgtgtggtaaactgatgaaccctgacccattaggctttggctacagaatgtggaaataagttgtgttactacatgtgtgtaatcctagggtgcaggacaccggccgggaggttccatagagtgatgggttctgcaggtaactcatcctctagtcctctgtaagctcctagaaggaagaaattatgtcctttagactaataaaattcctccaaaccaaatacagcacctactgtgaagacacaaagatacttttagaatagtaaaaactttatccattgagaaattccttaatgaaacagtatccaagaagtcatttgccagcagatttcttagaggtgcgataaagaagaggacattgccagtcgtcacagcagctgcaatagctcctctctattgttaaacagtgggatatcttgtgcaggttttcagttgacaatcaattttaaagattagtttcggtccccatcaatcaattatttattaacccatcaataaaaatttaaatgctctgtg

SEQ ID NO: 241823 - DNA, 1261 bp, Homo sapiens
agcggggggtctcgggcaggcgcggggagcttaccgacctcccgcccccgctgcgcgcgtttctggccctgccagtgtctccgccggttgaaagcgcgtgtctgcgtcgggttctgttggagtgcgttcggtgcgccgtgggtccgcgctgcttccacccaacttcctgttagtttctctcctgtcacaatggcatgatctcggctcactgcgacctctgcttcctgggttcaaggattctcctgcctcagcctcccaagtagctgggattacaggtacattagttatacactctggaggtgacttgacctgtcattgtgaacaattattgctcttggacgacccaggacataggccagccagtacttaccccagtgtgttggagaatcgcgctcggcttcttcctctgtgctgagtcatgaaagttgccggagcaggtgcagttacacaacctccaggtatgatcctgtttaaggactggatttaggataactacttagaggttaaaagtcacaagggtgtatggatgaggctggagtgatctgggaccaaagacatctaggcttgctgtcaaggcttctgatcaacatgagatgaccgccgtgtggtaaactgatgaaccccgaccctgatcaacatgagatgaccgccgtgtggtaaactgatgaaccctgaccctgatcaacatgagatgaccgccgtgtggtaaactgatgaaccccgaccctgatcaacatgagatgaccgccgtgtggtaaactgatgaaccctgacccattaggctttggctacagaatgtggaaataagttgtgttactacatgtgtgtaatcctagggtgcaggacaccggccgggaggttccatagagtgatgggttctgcaggtaactcatcctctagtcctctgtaagctcctagaaggaagaaattatgtcctttagactaataaaattcctccaaaccaaatacagcacctactgtgaagacacaaagatacttttagaatagtaaaaactttatccattgagaaattccttaatgaaacagtatccaagaagtcatttgccagcagatttcttagaggtgcgataaagaagaggacattgccagtcgtcacagcagctgcaatagctcctctctattgttaaacagtgggatatcttgtgcaggttttcagttgacaatcaattttaaagattagtttcggtccccatcaatcaattatttattaacccatcaataaaaatttaaatgctctgtg

SEQ ID NO: 241824 - DNA, 977 bp, Homo sapiens
tgggggttagtgtaagtaataattttagtataagtaataatttccattggattgtaatcagtcagggatgtttattttaatttctaagataatttataaaagaatagtgtatatagtcatgcactgcataatgatattaggccaacaaaagaccacgtatatgacagtgatcccagaagattttaatactatatttttactgtaccttttcagtaaaaggtacgtatattcaaaaggtaagtatattcaaatggtaagtttgaatatacttaccattgtgttacagttgcctgcagtattcagtatagtcacatgctgcacaggtttgaatcctaggagcaataggctacatcatacggcgtaggggtgtagtaggtatacgatgtaggctcttgtaagcatgctctgtgatgttcacacaattatgaaattgcctattgacacatttcttagaacatatccctgtcattaagctccacatgactgtatatctaacaagttaaaagagggaaaaattaaaacaacatttgctaatcaacagaaaggcaaaaaaaggaatataagtaggacataaaataggtgggtcaaattgcaaacaaagagtaagtagctacaaatctatttaagtaattacatttcatgtaaaggattaaatactccaagtaaaagattaggtttttcagactggataaagaaccaaccctcccccaatatactgcttacaagagatataaacacatggatggaagaggtgatataatacgaacactaaccaaagcaaagccggcataactacactagtatcaggcaaactatgcaataatgctgcttttaaataaagatatgtttcttaatgataacagggccaatccaacaaaaagatatcacaaactgaaatctgtaggttacaaataacttcaaagaatataaagcaaaaattggcagatataaaatgacaaatctataatcctgttggg

SEQ ID NO: 241825 - DNA, 211 bp, Homo sapiens
taagaccgggtcttgctctgttgcccaggctggagtgcagtggtatgataatggctcactgtagcctcaaactcctgggctccagtgatcccaccctagcctccttagaacaagcacacaccaccatactcagctaattatttttcttttttagagatgaggtttcagctgacacacgctggctcatgcctgtaatcctgtttccttggga

SEQ ID NO: 241826 - DNA, 635 bp, Homo sapiens
cccttgaggaaggtaggactatcccccctatttgacagaggaaggcaccaaggctgcccagggctgaacccccagacctaactacaatctgagctctgtgatgaccgagatagtgaggcctcctgtccctgaggttctggtgagggagccagacaggcagataagcaagtgcaagaaagtgctgagggctgtgaggtgtgcggaggcattctaggacacctccctctatggtcacttctctgccgtgtttaatactaacagtgaattgtagaatatagtactttagttttattccatgcaaatctacagctccagttagtgaaatggatcatacacacagaagatatggacatcaaaagttgaagaaaagtgagtgcccttgtagttttcctgcttgctgccttctcctcccttaggttgagagtttcttcgttgcacaaaggagcatcaagagaaacaagttcttcagttacccatatttacctgtcacaaaacctgctttgcaaggctgacatcagctaaaacccagtgtcttctgatagaaggatttattgttgagagattcttcttcccacttatggcaactgtatataaacagttacgagtatacctaatgatgggaagatttgtaacat

SEQ ID NO: 241827 - DNA, 1903 bp, Homo sapiens
aacacattgttcaggtttggctcccacttgccacttgctctccgggtctcaaaatgctgccatccacctgccctgcacagggagcctcactcatccactcactgccaccagtaagcaccaccctacacccagcactggcccctgaatggccagagggaagaccacccagaacactggtgaaggcattaatcagggacccagttcaagccaggcccttctgctgctcccgctcggtgtcactgtgaggcactgggagtgcccaggacacagtgacccaggcctggacctgctggcacgtcctggatagagcaggactcacaccagagagatgagggcttcgggtaaggacagacccgggctggctgggccgcagaatgtcatctcctgctagccgtggcttcctcatcaccagatctataaaaacaacttcccacggccgtgagggctcgagcgagatagcacagaggaaatgcttccccacttgtaaaactctctctgtgggccactatcgtgcctggctgccacacttcctctccgctccaactaaggcctcgctgttcacatgcaggcagctccccgaggaggttgtggggccaggatacagggccttgtagacgagcaagaatgcatggtctcagggggatgggaagccttctgagcgcttcctccagacagtgccggagaaggggcctggctgctccttgccccggctgcgggccaggcgcccagtctgctatgtctctagcatgtgcccctccgagatcagtgagagccccagtcatgcatccccaggggtcctgtaacagaggaccacacaccggggggcttcaaacaacagaaatgcatccttgcacacttccagaggccaggagtcctaaggcatcggcagggctgactccttctggggtctccgagggagaattccactccatccgctcccagctgctgctggccccggctcttctctgcttatggacacttcagtccactctgcctctgctgtcccatggattttctcttctaagaacacttgtcattgaattcacagccctccctacttcagaacaatctcatcgcaacatccttaactgaatcacacctacaaagaccctttttccagatgaggccactctcacagtctctgggccgtgggcttattttttggggctgccattcaacccccctcatcacactctcacactttctgagctgagatccacagtaaggaatacactgtttcatcttcgccctaggcacatactctcatccgcagctgaaatgcagtttcagaatgtgaatccttatttcacgttctgtgtggtgatgttttctgttttctctcttgcctcctcctcagcattggctacacacccactaattgattcccagagctcacagcctggatcaaagttgtttctttgttttgtttgtttgtttgtttgtttgtttagagacagagtcttgcttcagttgcccaggctggagtgcagtggtgcaatcacagctcactgcagcctcaacctcctgggctcgggtgatcctcttgcctcggcctcccgagtagctgggactacaggtgcatgccatcatacttggctaatattttcgaaattttcctaaggctgggcgcggtggctcacgcctgtagtcccagcactttgggaggccgaggcaggtggatcacctgaggtcgggagtttgagtccagcctgaccaacatggagaaaccccatctctactaaaaatacaaaattagctgggcatggtggcacatgcctgtaatcccagctactagggaggctgaggcaggagaatcacttgaacctgggaggcagaggttgtggtgagccgagatcgtgccattgcaccccagcctgggcaacaagagcgaaactccatctcg

SEQ ID NO: 241828 - DNA, 398 bp, Homo sapiens
ctaccacccagaatctgaaataaaagccaaagctggccaggtgcagtggctcacacctgtaatcctagctctttgggatgccgaagcgcctggcctgggtgacagagtgagactgtctaaaaatgaaaacaacaacaaaaaagctgtatttattgtctgtgtaagtaaggaaaagttgtgtgctgatcaggcacagtcttatttgaacaaagcgatttgctgatcttagttggggttcttgggaagagtttgttttaggttgaggtggctacaaagacagaaatgagttagtctgaggcattgtttatattgattatacaggcaagaataggttgatatctgccttagaattttgtttattggaatgagtctgctaatgggctgactttcaaaacttg

SEQ ID NO: 241829 - DNA, 287 bp, Homo sapiens
ccattaatcatttctctatagacctctgttatcttttatggagacagtatttagaaactaagtcattgtatatagctgttttttagcttaacattttgtcattgttttccatttaaaagacaatattgcttatgtgataatgattatttagtgtttgttgaaacttgctttatgtcctagagaacatgatcaactagtgttttatgtgtgcctggaaagattgtgtatctaatttttgcgtgtagtgttctgttcattaaatttaactgtgttgtttaaatcttctc

SEQ ID NO: 241830 - DNA, 385 bp, Homo sapiens
cagggtttcaccaggttggccaggctggtctcaaactcctgacctcaggtgatccacccaccttggcctccgaaagtgctgggattacaggtgtgagccactgtgccagcctgattctaacttttttcattctgatttacaaagccctatgtaatcaggtccctgcctacttctcctctctgaacacatttcacttacaagtgtaaatcacaatctgttaagacattcatttagctatgaaattaagataatctttttttgcaacagaaaattgctagatactattcaatcattctatgtcttcatttcaaggaaggtccaagaaaaaaaatgtgttttggaagtcatgaaataagatctaattaataaaatgcctcatctggta

SEQ ID NO: 241831 - DNA, 358 bp, Homo sapiens
gtggggaaagccctgatttgtagtgtttgcccattcttgtggtataagtattctcacaagaatctgaatatgaggccagactcagtggctcacacctgtagtcccagcactttgggaggccaaggtgggtggatcacttgaggccaggagttcaagattatcctgaccaacatggtaaaactctgtctctactaaaaatacaaaaattagctgggtgtggtggcacatgcctgtaatcccagctactcgggaggctgagatgggaggatcactggaactgggaggtggaggtttcagtgagctgagactgtgccactatacccgagactgggcaacagagtgagaccctatctttaaa

SEQ ID NO: 241832 - DNA, 99 bp, Homo sapiens
aagaaaaaaaaaggctaagaaactctaatatgaacagttaaaaagatagctggtttgagagagagtaagggtttgatagtgtaaatgtaaaaataattt

SEQ ID NO: 241833 - DNA, 478 bp, Homo sapiens
acacatcctctttgcctgaggaagttggagtagttctacctctgttatggcatttaaaaattgtatatttaatttttcagtgtatttaacttctctttgtcctcttgaagttgggaacattcagttgtactctgaaccagtggatattgtgacctggcgctgtgccacttgggccagcttttgcttccttaatgaatgcacttccttcatctgttagtgataagcaggcaagtgaggaattcttatctgcatctatggattgaacatctgtttctattccactgtgtttcagttttaacttctttgcttagaaattaatgtgagcaagtgagcctcctctttttaaagccattttggattgagagtatttgttttctgagcattttatatgcattaaattgataatttagattttttttctaatgttttgagtgatacagaaatcatcatcatgtgaaaacatttgggcagtgaatct

SEQ ID NO: 241834 - DNA, 1479 bp, Homo sapiens
acacatcctctttgcctgaggaagttggagtagttctacctctgttatggcatttaaaaattgtatatttaatttttcagtgtatttaacttctctttgtcctcttgaagttgggaacattcagttgtactctgaaccagtggatattgtgacctggcgctgtgccacttgggccagcttttgcttccttaatgaatgcacttccttcatctgttagtgataagcaggcaagtgaggaattcttatctgcatctatggattgaacatctgtttctattccactgtgtttcagttttaacttctttgcttagaaattaatgtgagcaagtgagcctcctctttttaaagccattttggattgagagtatttgttttctgagcattttatatgcattaaattgataatttagattttttttctaatgttttgagtgatacagaaatcatcatcatgggtttccttaaatttctgtggcaatgggcttattaaaaatgtaattttgtgcatggtgatttttggagggatatcaaacttatcctatgggtgttcagttttgtcagagagttatgatacattttattctgcatattaaaaatgttccagaaaggaaagcaaaaaaatcaccatggcaactcagtagaatgcccttattttgtttttctgaaaggaaaattctaaatctgagtaagaggtataaaaaagagcagtgcagattgtgtctctggcttccaggaagtgagctcataaaagaatgggtttgatgccctgggtgactctgtgttatttaggaccccatttgttttttctcataaggaagagctataaaaaggtggcgtatatattgacactactaaaacagatctgccaaagagcctgttgaatttttctttgtaatgcaactttttggagccaactgtaagtgtcaaggctaaggatgaatggatagctgcaggggttggtgggggaaggttcttaaggtgtcatcacaccacttttgacacttcaacactgaaggagtgctactagggtgagtttgattagaatgattctagcagagtgtcaaaaaagaaataatacatagtcaatgaattgatacattgattaatagtaaaaagtagaatcaagccatgtaccatttttgtagagagactggtgggcagatcagttgtcaacatggcatccagtagtagcaccaaactggtcgtgtagaactcagtgtctgacctgtaaatggttgctattccagggcttctgttacccttcttggggaagcaccagaggacctacaggaacatcagtattccttagaggagggatgaagtgctcaggcatagatcctgactgacaaggctggaagtagcttgggaaagttacttaacctctccaaacatcagttttcttatctatgaaatggttatggttataacagctatcttatagggttgttttcaggaatacatgagttaatatgtacaaaa

SEQ ID NO: 241835 - DNA, 1383 bp, Homo sapiens
  misc_feature (1273)..(1273): n is a, c, g, or t
  misc_feature (1350)..(1350): n is a, c, g, or t
acacatcctctttgcctgaggaagttggagtagttctacctctgttatggcatttaaaaattgtatatttaatttttcagtgtatttaacttctctttgtcctcttgaagttgggaacattcagttgtactctgaaccagtggatattgtgacctggcgctgtgccacttgggccagcttttgcttccttaatgaatgcacttccttcatctgttagtgataagcaggcaagtgaggaattcttatctgcatctatggattgaacatctgtttctattccactgtgtttcagttttaacttctttgcttagaaattaatgtgagcaagtgagcctcctctttttaaagccattttggattgagagtatttgttttctgagcattttatatgcattaaattgataatttagattttttttctaatgttttgagtgatacagaaatcatcatcatgggtttccttaaatttctgtggcaatgggcttattaaaaatgtaattttgtgcatggtgatttttggagggatatcaaacttatcctatgggtgttcagttttgtcagagagttatgatacattttattctgcatattaaaaatgttccagaaaggaaagcaaaaaaatcaccatggcaactcagtagaatgcccttattttgtttttctgaaaggaaaattctaaatctgagtaagaggtataaaaaagagcagtgcagattgtgtctctggcttccaggaagtgagctcataaaagaatgggtttgatgccctgggtgactctgtgttatttaggaccccatttgttttttctcataaggaagagctataaaaaggtggcgtatatattgacactactaaaacagatctgccaaagagcctgttgaatttttctttgtaatgcaactttttggagccaactcaagtaactggcagaagttttggtgataaagattttcggacaggtttagaaaatggaatcctcctctgcgagttgctgaatgctataaagccaggacttgttaaaaagatcaatagattgcctacccccattgcaggactggacaatattatcttattcttgagaggttgtaaagagctcggccttaaagaatctcaactttttgacccgaggtgacctccaggatacatccaacagagtaacagtcaagagccttgattaaagtaggaagctgaaaaatgtattaagttaccatttactggctgggaaaagcagcaaacaagctgcacatcctacagcggaacgacactaaaaccngaaggagtttgaaagattgttggctcaaatgcgaaaggacactgatgacattgaaagtcctaaacgcagtatccgangacagtgggctacatccgactgctgggaattcc

SEQ ID NO: 241836 - DNA, 444 bp, Homo sapiens
ccccccccccagtgcttgttccttcacttacttttccaacctccacttccccaaggagtcccaggcaatgcctgttcagctggtctctcctggggcaagcctctgaggaggaaagagtccgctggacctggggttggctctggggcagttatcttggtccctccatttcctcatctacccaatagcagcaaagaatattgattggcatggtttgggaacatgaacagagatgactgctgaaaacccatgagcaccacggtgagtctttctgatcatttctgggttctgagcactgggtaggctgttcccaccacataatccactcaaccactgctgcaacgggatggaagagtggtccagagcctgggccctgaagccagactgcttgagcctgaattcttgctctgacacttatcagctctggcactatctgcatagtacctt

SEQ ID NO: 241837 - DNA, 375 bp, Homo sapiens
ggtaattacacgtggatctgtccctttataatgattacgttattctgtagtctggttgttgcaaaatatattttgctgttcttccgttaatggacatctgagtcatctccagttcattactattacaagcagtgccataacaaacatctttgttcaaaaaattcttgaaaaaagatgtacatattacagattctagaagtggaatcgttgggtcaggatgggtacctgttttgtttttgtttttgtttttatcatgtaaaatcacaaatatatttaaaagatgtatagagatctagaggaagagatggattatgagaattgcctcaggtgattctagaggctggcaagtcccatgcaagctggagaaccaggaat

SEQ ID NO: 241838 - DNA, 460 bp, Homo sapiens
gttataatgtggtagagatggtaagcagtcaagtggtagtggtggaaatagtatgtggaatccttagctagtgcttatacttcttaggtatagtcatcatagacatgggcaggaaagaaaatagtgctcaatctccagagaaagagaatgtcagagaatttttatccatagtttgcccatgcacatgggtgtacaatagatttggaagcagaactttttccaggtgcatacttttaaaatgtcatcattccctaaacattatagtataacagctatttacattgtattaggtattagtaatctagagatggtttaagtacataggaggatgtgtgtacgttatatgtaaatacttcccaggggcgtccaatcttttggcttctctggaccacattggaacaagaaatatcttgggccacacatgaaatactctaatactaatgatagctaatgagctaaa

SEQ ID NO: 241839 - DNA, 1022 bp, Homo sapiens
ctttgggaggccgaggtgggcagatcacctgaggtcaggagttcgagaccaggctgcccaacgtggtgaaaccctgtctctaccaaaaatataaaaattagccaggcatggtggcacgtgcctgtaatcccagctacttgggaggttgaggcaggaaaattgcttgaacccaggaggtggaggtttcagtgagccaagatcgtgccactgcaccccagtttggatgaaagagtgagactccgtttcaaaaaaaaaacaaaaaaaacaaaaccaaaaaataaaaaaacacatcagcttgacattttggaggcattcccagactcagggttagtcagcagattagcatttaaaagaaagtcttgtccctacagattccctgacctcagctacccatgaagggtgggaagaggagtccttagcaagaagtccaggaagttgacaacctcctcagacctgataggacactcctctctccaccctgcctcctgactgatttaatctcaggggtgtgaggacctctgagataggccccaggagtctcacccgcaccacttatgtctcagggctaaccagagactccctgaaacagatcctagaggattcccaagtgataggataaatagagaggtactgagacttcctggcgtgggtgacctctcccaggctggccaacctcccccattcagaaatttgctgagcaccaggagtgaatgaagtaaaggaagcccctaggagttcaagaagcagagatttccaggtccatgcaccaaagctcatgtgctcaattctcaggaaaggcctcactcagttaaaaaattttgtatcatgaaagggtaaatgaattaattagtgaatctggtttctaagccaatggcttactagaaatattatagtaaatcagaaaaaaaaaaaggcggtggctcacacctataatcccagcactttgagaggctgaggtgagaggatgctttgagcccaggagttcgagactagcctgggcaacatagcaaaccccatctcta

SEQ ID NO: 241840 - DNA, 399 bp, Homo sapiens
cttggtctgactgttctcttatgcgtaggttcaggttctggagtttgggcaagaatagctggacagggcatgtggggttctttttactgcatttgggggcacaaccacccaggttggcaccctactcatgaggctcagtttgcactctcggttaaggtgctgactgccagatttctcctttgcaggggtacattttccctttctaatttgtcagtcatctgtgaggtgccagtgtaagaccctgtgagtatcctgtgccctggcagtctttccatcccctgctttcagcatccttgaggatcatggcctgagtcccctttgaggctggggtttgcaaatggtggtcatccaatttcttgtacattttttattggcattcttctgaaataaatgttctct

SEQ ID NO: 241841 - DNA, 562 bp, Homo sapiens
tgggctctaagcctctccaggtggggatcactcttcggggaagaccagacagggcagatggagctctcaagtcacgtgaacacacggccaccagttccacagggcagagaccggcatgtctccagttgaaaagccacgcccgtcatctttgcacgcccacatgccttaggtcaccctggctgcatcctgtggcaggtccgtgggttcctgggggtgccctgctcccagctgtgcccacgtgtggtgggagccccagagtggccccaaggctcctcaggtgcacctgaaccttctgcacctatggcgcagcctggagaccgtgctccccagcagaagccctctggaggcggcctgcctctgaccatctgccttagcttcctgcagctgctctaacaagttcccatgaacccagtggcccaacagaaacttaattttctcaaagttctggacgccaaagtccaaaatcgccatcacttggctgacaaggtgctggggccatgccggacccagagactacaggtgagcagttatctgtgggcctcccagcacctgcggcggccgc

SEQ ID NO: 241842 - DNA, 452 bp, Homo sapiens
aaaacagagaagaggaagagctaaggtcataatcacaggctgccttcagctcttcggaaaaactacgcttcctctgccattccccagtcctcacccttactccccaagggtggtagggaagggaaacggagcgatggcggcactagggtggcaaggaagcttgaagccatgtcaaataaatagttgaaagcaccagccgctgtggctcacgcctgtaatcccagcactttgggaggcctaaggcaggcggatcacctgaggtcaggagttcgagaccagtctgaccaatatggtgaaaccctgtttctactaaaaatacaaaattagtcgggtgtggtggcgcatgcctgtaatcccagctactcaggagaatcgtttgaacttgggaggcggaggttgcagtgagccgagatagcgccattccagcctgggcaacaagagcgaaactcctc

SEQ ID NO: 241843 - DNA, 341 bp, Homo sapiens
ctaaataaaaatagaaaataccctttgctgcagtagttcagttgtttaaaaatattaaatctgaggcctggggtggtggctcaatgcctgtaatcctagcactttgggaggccgaggtgggaggtcaggagttcgagaccagcctgacaatatgatgaaaccccctctctattaaaaatacaaaaattagccaggcatgatggcgggcgcctgtaatcccagctgctcaggaggctgagacaagagaatcgcttgaacccgggaggcagagtttgcagtgagccaagatcataccattgcactccaacctaggcaacaagagtgaaagtttgtctcaaaaa

SEQ ID NO: 241844 - DNA, 356 bp, Homo sapiens
ttcccacaagatctgactgttaaaaagagcctggcatcttcctctctctttctccctctctctccatgtgatctgcacatgccagctcccccttgccttcctccgtgagtgggagcagcctgaggccctcatcagaagcagatgctggcaccatgcttcttgtacagcctacagaaacgtgagctaaataaacttcttttctttataaattacccagccaggggtaagcctttatagcaacacaaatggaataggactctctctaagcctcagttttcatacctgaaaaagggagataatgaatcccatctcatgacttgtgaagttagtaagtcacatctcacacttagcacaga

SEQ ID NO: 241845 - DNA, 380 bp, Homo sapiens
gcaattggcctgttaactcaattttgaaaatgtgtgggtaagtgtgagcccaggttttaaaagatttggatatttctgcagctgtgaaaggtaaggaagcagaatactagcccctactcctgaacccaaaaaacccatggatggtgtgacatggaaatatcaagactagttaattattgagcagagagtctcccaggtctggtatgtagcagcagaaaatgagtgtgtgagaagctctaaagaagatgggactcaccaaatgtcagaccagcctgtctgtgttagagaaagaacccctgttttttcagatttttctcttggccatcctggactacacaagatgttaaaaactttctagtgttttcatgcttcatgtatac

SEQ ID NO: 241846 - DNA, 657 bp, Homo sapiens
agctgtctctttttagaagcatctcatgagactaatgtttttaggaacctgctgtaggaaattcatttattcaaaaaatatttgttgagcatctgttatgtgctagtgactgctccaggtgcttgggatacagcagtgaccacctccaaccaagatcccgctttcaagaacttccattctagcagaagtgatgaactcatttttatggagcacctactgtgtattaggcatgtgagttatcacacattatctgctttacccctcacaacagcctggtgaggtagatggactattttattttattttattttatgacagtgtttcactcttgttacccaggctggagtacggtggcgcaatctcggctcactgcaacctccagcctccaccaggttcaagcgattctcctgcctcggcctctcgagtggctgggattgcaggcatgcgccaccatgcccggctaatttttttgtagtttttagtacaaatggggtttcaccatgttggctaggctagtctcgagctcctgacctcgggtgatctgcctgccttggcctcccaaagtggtgggattacaggtgtgagccactgtcccaggccagatggaccattttaaagattaggtaactgagctctaggggtcaagagacttggcca

SEQ ID NO: 241847 - DNA, 670 bp, Homo sapiens
tgtgctaaagactcattttaaaatcactttcactctgttagaaaaaaagaatatttactttcttctctcaagtacagaatgtagtagagttcagtttcattaacaggttttacttgctatacatttaaaagactgatttcaactgctgatttaacatatttattaaatgcctactaagtgttaggcactactctagaagatgtgactataacagaaaataagacagacaaggagagacaaaactatataaataagccagaataaatgatcacatggtgacaactgctatgctgagaattaaaatgaatgatgtcatcaacagtgactgggtatctagattgtgcggtcagagatggcctctctaaaatgatggcatttaggctgggatctgactagcaaggaggagccagccatacacagagtggtagaagtacactccagtgtcccagtggggccactaatggatgtaagcattaatgcaaacttgatgtgttggagatacagaagacttgtggagctggagcatagtagggtagcagatagacagtacaaagtggtcttagagaggcaaccacaactccatcatgaagagctgggtgtggtggttcacccctacaatcctagcactttgggaagccaaggtgggcggatagctttagtctgggagttc

SEQ ID NO: 241848 - DNA, 614 bp, Homo sapiens
tgtgctaaagactcattttaaaatcactttcactctgttagaaaaaaagaatatttattgctatacatttaaaagactgatttcaactgctgatttaacatatttattaaatgcctactaagtgttaggcactactctagaagatgtgactataacagaaaataagacagacaaggagagacaaaactatataaataagccagaataaatgatcacatggtgacaactgctatgctgagaattaaaatgaatgatgtcatcaacagtgactgggtatctagattgtgcggtcagagatggcctctctaaaatgatggcatttaggctgggatctgactagcaaggaggagccagccatacacagagtggtagaagtacactccagtgtcccagtggggccactaatggatgtaagcattaatgcaaacttgatgtgttggagatacagaagacttgtggagctggagcatagtagggtagcagatagacagtacaaagtggtcttagagaggcaaccacaactccatcatgaagagctgggtgtggtggttcacccctacaatcctagcactttgggaagccaaggtgggcggatagctttagtctgggagttc

SEQ ID NO: 241849 - DNA, 601 bp, Homo sapiens
cggcccgggaggcggaggcgcgggggaggaggccccgcttggctcctcagccccggatgctgcatgacttcatccttccgccggctcccctgctgaggtagggccggtccggcagcaagcccgccgcccgcgccccgccgcagtcccgctcccgccccgcgcccaccccgcgcccgccatgtccgagatcctgccctacagcgaagacaagatgggccgcttcggcgcagaccccgagggctccgacctctccttcagctgccgcctgcaggacaccaactccttcttcgcgggcaaccaggccaagcgaccccccaagctgggccagatcggccgagccaagcgagtggtgatcgaggatgaccggatagacgacgtgctgaaggggatgggggagaagccgccgtccggagtgtagacgcgccggctcgggcggcgggctccgggcccagcctcgcagcggccaggagcgcgggccggcgatgcggctgccggcgcccccccgccccggcccaggcgcccgcgggcgggggctgcagggccgtgccgccgccgccgccaggcactccggagctgtccgcttcagcaccacggcggccgc

SEQ ID NO: 241850 - DNA, 255 bp, Homo sapiens
gagattcatagaatttatatgagtttatgaagaccacaaagctagtaagtgtcagagttgggactaagaatctgtatcttctaactgttagactgtattttttctgtagtatacttcaacaaaagactggataaaaagtgtggatgggtctgcttatccacccaataaaatggaggcaactcaaaggatttcaggacacatgaaatagtgaaaatcatttttgtttgcaaaatggtttgtcatttttgttagaag

SEQ ID NO: 241851 - DNA, 734 bp, Homo sapiens
tagtctatatatatagtaagcggagaactagttttacagtgctcatttcaggtcttcagtaagtgtgtatgatgatgtcagaagtattcattggctcactttcaaatcattgaaaattcagccatgctaaggttggctattacgtgtattagcgtttccaagcgagtggtcttggctggggtgagattgtcagctgtctgttaggattagtcacaacaaacatggtgcaaatggtttccaacaacagcgcacttcaaggttaccttcataattcttttctgccagaacccaaaaaacaatactcttgagctactcagtgttccaattgttaaaaatttcctgaaattttccttcatgtattcaaagtgaaacataaagatctagaaggatggttgtgaaaagtatggactttatagtatctagtgggcattttcattgagcccaaatgataaattctgttttccaagtcttttaagtgaaaaaaaaaaagattttccttgttataatatattcctaaattctagagtattttcactctacttctatttcatttgttccttgtacatacttgactctgaaccaaaatcagtgataatcttagtttgaataataattcagatttaaaaaattgtatataaaatccaatttggtttatgcattttttagcgtttattgttccttttaaattttatatattgtaagagaatacttttattacagtactaatattattc

SEQ ID NO: 241852 - DNA, 460 bp, Homo sapiens
gtccatcagcagatcctgccagttctgctttaaaaataaatccagggatcagctacttctcaccacctccctggtgactctctgaatgtctaaatctgaccatgctgcttctgctcaaatcctttccaggtttttactcaaaggcaatgccagagtccttagaatgaccttcaactttaggtctccaaataccctttcctaaaccccctcccctaggcccaccctagccaggagcaggtgttgccctcgaggccttaccatctgcccttctctctgcctggaactctcttcccatcatccctgtggccttggctccagtggtgcttctcaccaaggtgagtgctgaccacctctgctaccatcactccccccgcccctgtgactccggattctcttaactcttttttttgagatgagtctcactctgtcgccaggctggagtgcagtggcacgatcttgg

SEQ ID NO: 241853 - DNA, 459 bp, Homo sapiens
ttcgaaaggggtaggacgtcttcaaatcttatttctctgcctttttgtattttatctccactttgtcttagctttcagcctaaggacctagaatgacaagataaatttgtggagattcctgtgagatataagtaaaccctactgaacagggcaggagaagcagctagttatattgtatcccgaatgccagaggatgtcactgtattcataggttttcaggatagggacctgctttttttgcattccaagagcaaagatctaagttttaccttagtctactgatgtaacaataagataaacatcaaccgggttgcatttaattgcttatatttgccactttattacatcaaagtgatttttaactatgaaatcagtttagaactgcttttcaatcctccaaagtagttgtgtgatttcccttatggtcaagattttgttaaaaacagggatccaagaaat

SEQ ID NO: 241854 - DNA, 335 bp, Homo sapiens
agcccagatggtttcactggcaaattctttgaaagaagatacaacactaattctaaataatcttttccaagaaacagaagcagaacaatatcttccaactcattttaagaggccagaattaccctaatacaaaagtaaaacatcatcacaataaagtaaaactatagtccaatcttttttatacacatagatgcaaaaatcttgcacagaatactagaatatcaagtccagcaatacttaaaaaggctacacattacaattaagtgggactgatctcaggaatgcaagtctggtttagtaggtaaatatcaatcactgaaatgtatattagcaga

SEQ ID NO: 241855 - DNA, 320 bp, Homo sapiens
tacaggggatataaaccagatgtgttgtctccatagattcccttctctatcaaggaattattgaatcttagatttggaaagcaccttaggtcattcagatcagtgtcttagctttaaaatcttttttctcttattcttttataaggttttcctatttatcaggcctgaagtatgccttttttgtttccccacagttcttagttttgttctttaaacaaatagaaagaggtttaaccttttctatcttcagattttttttttcctgaagtcacctattctttgtgtgaaacaagtcttgtttcggttgttagcctaagaat

SEQ ID NO: 241856 - DNA, 399 bp, Homo sapiens
tggctgtgtccttccaggaacacagctcccaaagagaggcccatctgcatggccccagctctcactgttctttgctaacacaacttccattcgtgcctctttaggcttggaagtggcaaagcctgtccactcttgctagtctctgagtgcctcatatccctgatttttcccttttgctctatccacaactcaggaagtaatttcttcattagagtcccctgtaccacatggactggattcaactttctgctattttcagtattaaattagttaatatttgtagaatgcttacaatagtgcctgacacataataagcatgctttatgtttgttaaatcaataaaaataaacaccgatgcggcagcctcccatctaatcggccaccactccaatcacatat

SEQ ID NO: 241857 - DNA, 546 bp, Homo sapiens
agattgagttcagctgcctgtaacagaacaccaaaaattgcaatggcttgagcaaagttaagtcatttctcttttatatagaagaatacagaggtagtcatccaggacagatagagttgtggtcatctatttcttgcaccttgctaacatttgtcttccaacctgaggatcattctgtgatctacaattactgctggaattccaatcatcctgcctacattcctggtgcccaaagggaggaaggaatagcaaaaggccgggtgggtggggtggctcacacctgtaatcccagcactttgggaggccaaggtgggcggatcacctgagattgggagttcgagaccaccctgaccaacatggagaaaccccatctctactaaaaatgcaaaaaattagatgggcctggaggcacatgcccgtaatcccagctacttgggaggctgaggcatgagaatcacttgaacccgggaggcggaggttgcagtgagccgagatcgcaccattgcactccagcatgggcaacaagagagaaacttcatctcaaaa

SEQ ID NO: 241858 - DNA, 351 bp, Homo sapiens
catgcttcgtttgtcagagccaggatggtaacacgggacactactgttgaccaaactacaggctttatttgggttttaccagtttttccacccacctcccttttccgctccatgtaaacgtgtctgtggtgaagatgcggggctcggtctgatttccaaagctgcttttgcccctgtggcctgaagtccaacgattccagctttttattccaatatctggttatttaaaacatatttaatgttctctacatataaagcttattcagaaaagatttaatgtgaattatactgaattatatgctttcctttttgaatgatcatataacttagtgcttaattaccacatctggc

SEQ ID NO: 241859 - DNA, 777 bp, Homo sapiens
cctggccagcgctgctggcgggcgttagggtatttctggaaaactcaaactgtttttcctctactctgataccacaagaatcatcagcacagaggaagacttctgtgatcaaatgtggtgggagagggaggttttcaccagcacatgagcagtcagttctgccgcagactcggcgggtgtccttcggttcagttccaacaccgcctgcctggagagaggtcagaccacagggtgagggctcagtccccaagacataaacacccaagacataaacacccaacaggtccaccccgcctgctgcccaggcagagccgattcaccaagacgggaattaggatagagaaagacggccaccatgctgccactgggctcagagcccgccctgaatgagctgctgcttcgcaaggaggaggagtggagggcgctgcaggcacaccgcacccagctgcaggaggcggctctgcaggacacacggagccagctggaggaggcgcaggggaaactgcggtgcctgcaggaggactttgtctacaaccttcaggtgctggaggagcgggacctcgagctggagcgctatgacgccgccttcgcccaggccagggagtgggaagaggccaggcgggcagaggtgagcgagctcaagatagaggcagctaagctgaggcaggcgctagccagagaggccaggaaggtggaggagctgcagcagcagcagcagctggcattccaggagcatcgcctggagctggagcgcgtccacaggtgagccaccgaccg

SEQ ID NO: 241860 - DNA, 646 bp, Homo sapiens
agtagagacaggtttttgccatgttggccaggctggtcttgaactcctgacctcaggtgatccgcctgcctcggcctcccaaagggctgggattacaggtgtgagccaccgtgcccggccgtggtaactgttgatagggaatgtgaggtaggtactgtggtaggaaaattagggcccctcacggtgcaccctgaacctgatttctctttactgcagcggccaccatgctgccactgggctcagagcccgccctgaatgagctgctgcttcgcaaggaggaggagtggagggcgctgcaggcacaccgcacccagctgcaggaggcggctctgcaggacacacggagccagctggaggaggcgcaggggaaactgcggtgcctgcaggaggactttgtctacaaccttcaggtgctggaggagcgggacctcgagctggagcgctatgacgccgccttcgcccaggccagggagtgggaagaggccaggcgggcagaggtgagcgagctcaagatagaggcagctaagctgaggcaggcgctagccagagaggccaggaaggtggaggagctgcagcagcagcagcagctggcattccaggagcatcgcctggagctggagcgcgtccacaggtgagccaccgaccg

SEQ ID NO: 241861 - DNA, 468 bp, Homo sapiens
caggatgatcccaaggagcagaaggggccagtgatggctgccatggggggcctcactgaaccagtccctacgctggacctgggcaagaagctgagcgtgccccaggacctgatgatggaggagctgtcactacgcaacaacagagggtccctcctcttccagaagaggcagcgccgtgtgcagaagttcactttcgagttagcagccagccagcgggcggtgagtaagccaccattgtgctcatggggaaaatgaggaccacagagagccactggttagcctaaagtcaaacggtaagccaggctgaggactgtgatgttcccatcagattaggctcctgcctttcagtgtgatccttgaaaagtgttatctttttaggcatctctccctggatacagaacaaagtaaacaaagtggattagggggttgaggataagccgtggagtgaagggactctggctcctacca

SEQ ID NO: 241862 - DNA, 497 bp, Homo sapiens
ttttttttttgagacagagtcttgctctattgcccaggctggagtgcagtggcaccatctcagctcactgcaatttccacctcctgggttcaagctagtctcctgcctcagcctcctgagtagcttagattacaggtgcacgccaccatgcccggctaacttttttatttttagtagaggtggggtttcaccatgttggtcaggcttgtctctaactcctgacctcgtgatctgcccacctcggcctcccaaagcgttggaattgcaggtgtgagccaacccgcccagccccctttcactgttttaatagcgtccttggaagaacaaaaagtttttcactttaatgaaatccatttcatctattttttctttgtcatttatgtaattggtgtcatagctaagaaaccattgactaaccctaggtcatgaatatttactcctgtgttttcttattagattgttatgcttttagctcttacttttagatctatgattca

SEQ ID NO: 241863 - DNA, 533 bp, Homo sapiens
aaaattaattaaccaaaagctggttctttgagaagctcaagaaaattctctttagactgatcaggagaaaagatagattaccaatgtcagaaattaggtagcttcactacagattctacagatattacaacaataataagagactattacgaataacttctaggaatacatttgacaatttagatgaacccatgcagattccttaaaagatacaaattagtttacttaggaagaagtggaaaacctacatagctctatgaaagatgtgttatcacaaagaaaacggtagacataggtagctttagtggtaaatgttgccacgtatttaagggaataatactaattctgcacaacctctcacaagaaatataagaggaaagaatactcagttctgtctctgaggccagcattgctttgatccccaaatcagacactgcaagaaaagaagacaattatccctcatgaacatcaacacaagaattcttagagttttatcaagtccaacaagttaaataaaaaggattacactttta

SEQ ID NO: 241864 - DNA, 456 bp, Homo sapiens
ttcttgttacacacgtagatttttcctccctggaatgaatcatgttaatgttcatctcctccatgcctgctaaactgtggacactgggctactccagagagaaacggagccagcttctgtcttccctgctagagcttgtgctccggaaggagtcactcatcaaaaccaattgatgaaatgattattgaataactattatgtaacatgcctccaagaagacatacagaatgcagcaagcatgtgaaataggaagctttcgtagcctggatttcagggagcgagctcagatctcaaagagtcacagtaacgatgagagatgaggggaaagactactcccagttgaagcaaacagcctgggcaaaggcactggggcagggagggctatgcccatgcacagatttggaaactcctcctctttttttcatgaataaattatgacatattttctcatcaaca

SEQ ID NO: 241865 - DNA, 173 bp, Homo sapiens
gctggacaaggaagacaaatgctccaagtgtggtctctgggctctaagttccctctagacaattgcgtcctttatttaatcacttctccccacaatatctgttggatcatacattatgccagttaatacgcaaggactttgggactcagtattgaataaaaatgataataacc

SEQ ID NO: 241866 - DNA, 408 bp, Homo sapiens
atttcaataaagcaatgaggcagaagtcagattgcagtggattgaggattgaaaggtgaggaagtagaaggaacaagtgtagataactctttgtgaggtcctaaattgatagtctttttattaggcactacatataagtttcagaattccaaaagacagatttcaggcaaagaagttttccaataaaacccctgtatcagtcagggaccaatcaggcaaatagaaaccattctaagtatttaaaatagagggaatttaacctttgtgagaattggaatggtgcctcatatgagtcgatgcagctgtgcaggtgcctggcttgttcgttagagagcaggcagagagggttcagctatttcttgccttttggtttggtgcctttgtgcaggatacaacctccatatctgt

SEQ ID NO: 241867 - DNA, 512 bp, Homo sapiens
aggtacttagcaaaattctcagtaaacattggttataatccctccaacattcagacttaagttctgcctattctctttcctcagtattctttattcctgtccatataaccattgtccttttgtaggccttcactaccttaatgtggactatagcaatagtcacttgattggtctcttggcttgttcccctccaatcttgttctctacactactgcaagggtgatctgtctaccacatagattttgaattatcatctacagtagtaaaacagttttcatggcatacaagcttcaataatttagtctagatattccgcttgatctcttttcacctcttttccatttatcttctagcaccactgcagtgcttgtagttccttaaatatgctattctttttgaaaaagcagcaaatctctgtgcagttgcctttctaactggaatatcttcccccttcttgtgttctcacaaaattcttattcatctttcaagttcaagctcaacacccactacct

SEQ ID NO: 241868 - DNA, 425 bp, Homo sapiens
cctaggattgctaagaatcaaatctgaattatgtaacagttctccgtaagcttccagactactaaaataacccttcattatttaggtttgaatgaactgccttgcaagttaaatatggttaaaaaaaacccaaaccatatattgtaattaatgaaagtttaaattataacaaaaaattacatattagtagctgcctattttgtgggaaattcctaacctcttcccttttttttttttttttttgacatggagctccttagacgtggctggctatgtgggtaagacgaagtgagccctcctcatgtggttgtggtagtagatccctgatggattcagtcttgtgggtgaagattaagtgaagggaaaggaaaggagcaggcagctggaactgtctgtgtccatatccgtcctgttctaatattaaa

SEQ ID NO: 241869 - DNA, 368 bp, Homo sapiens
taagacagtctcactctgaagcccaggatggagtgcagtcacacgatctcggctcactgcaatctccaccttccaggttccagcgattcccctgcctcagcctcccaagtagctaggattacaggtgtgtgccaccacacacagctaatttttgtatttttagtagagacggggtttcgccatgttggctggtcttgaactcctgacctcaggtgatctgcccgccttggcctcccaaagtgctgagattagaggtgtgagccaccatgagcggccacatttattgaacatttctattttttctcttttgaactattcatccatgttctttaatcattttgtactgagttggtctttaatttgtaaaa

SEQ ID NO: 241870 - DNA, 682 bp, Homo sapiens
atagaagaatcccatttctcatgagaaaatcaatggataaaattcagtgtttcttcaaaaccaaaacttcctttatcaaaacctgtagaacacaggtttcagcaaacttcgtaaaatattcagatcaaatttgggtttgttattgattttcaggaggattaatctctttatattaaaagctcatttggtcacacacaaaaaagaacatctgtttagtttttttctaggattatggcataatattaataatataatccatatcctttattgtgtgcctattatagccagaaagtttgcaaatatttaactggagaaacagattagttgaatgtgaattcaaattccaatgctgttgtttattactggcatagaaattattaagttttgtgagcatagatttccttctctgtaaaaagaggatgatagtatcttctctttaaaattattttgtggttaactggtacaagccatgtaacatcacattatatataatgtgtgatatgtataatgtgaatatcttatgatatatgtatatatatattatgtgtgtaaaatatctgccaggtacctgccctccaagagttttgaaatttggctaaggtcaccaactgggttgctgggactcaaacccagttcattcagattcaaaatccacaccctttctaatctaccttactgccat

SEQ ID NO: 241871 - DNA, 500 bp, Homo sapiens
gcttccaggctctaagtttcatctcactctgcagagctctttcttatttttgccacctatgtggcaattatgtacagtgatgtcagacctgagtttgaaccgtgattctgtcctccactgtagctgtgttactacaagtaatttatttatacggtcaggtttcctctctgtaagatgggaaaaagaccatctaggccaaagcaggcggatcgcctgaggtcaggagttcaacactagcctggccaagatggtgaaacccatctctattaaaaatacaaaaaaattagccaggggtagtggcacatgcctgtagtcccagctactcaggaggccgaggcaggagaatcacttgaaccaaggaggcggaggttgcagtgagccaagatcatgctattgcaccccaactagtttggtggctatggaaacgaagaaagaattggatgcagaattgttgcctaacctgggtgacaagagcaaaactccatctcaaaaaaaaaaga

SEQ ID NO: 241872 - DNA, 593 bp, Homo sapiens
cttgaacctgggaggtggaggttgcagtgagctgagatcgtgccagtgcactctagcctgggcaacagagcagactctgtctcaaaataataataataataatatttaattaatttaaaaataaaaaccaaaagagaagatctgatggacttaaaagtcatatatctcaggtgataggtgaaaccacaagtttgccttgaaaagtgtgttgataacaatagccatagctaacaagtacttgctgtgttccaaagctctttctgttagcacttcatttgtattaatatcattcttccaccaactttgtaagggtactgttattatcctcagtttttacagataaggaaagcaaaagacagccaggcaccatggctcatgcctgtaatccaaaactttgggaggctgaggtgggaggatcacttgagcccagtagttcaagacctgcctgggcaacatagcaacaccctgtgcttacaaaaaaaaagaaattaaaaactagccaggcatggtggtgcctgccagtagtcccagctatttgggagactgaagcaggaggatctcttgaggctaggtgttggaggctgcagtgagct

SEQ ID NO: 241873 - DNA, 296 bp, Homo sapiens
tacatatattaaaaaaaaaaacacagctggcttgaagaggccccaaatttggggtaatttgagcatcaaatgtagtaatgataataatggatcatgatacaattaagaaaaaaaaacaaatttatgggtgtacagtgatactgggaaggaggatttttcattacagaaaaacaccagctaataaatacggaagacattatcaaaataaatcacccttttgcacccctaaagtaatatctgattcaagcaaggataatcatgtaaagcctttgtatgaaaggtggttggagaaaatg

SEQ ID NO: 241874 - DNA, 343 bp, Homo sapiens
aggtagggcttgtaggggccaagggtgggggctgtatttggcttgttgactccctcgtggcctgagtgccagacctactcattccgcctcgtgcccccagggggcttggcgggctgcttgtgggccttactctcctagagctgttcgcctcttacctggcactgtcaggtgcttgcttcccctgcccctgggtggggatgggtgcagggttgctgcttgcccagggccttagctagaggaccctcctctgccccagccccaggtgtggctgtgagtcagatggacccagacccctgtaccgaaccagactgggtgctctcctctgggggcagagggagtggtg

SEQ ID NO: 241875 - DNA, 596 bp, Homo sapiens
gccggtaccggaccctgcagccgcagagatgttgatgcctaagaagaaccggattgccatttatgaactcctttttaaggagggagtcatggtggccaagaaggatgtccacatgcctaagcacccggagctggcagacaagaatgtgcccaaccttcatgtcatgaaggccatgcagtctctcaagtcccgaggctacgtgaaggaacagtttgcctggagacatttctactggtaccttaccaatgagggtatccagtatctccgtgattaccttcatctgcccccggagattgtgcctgccaccctacgccgtagccgtccagagactggcaggcctcggcctaaaggtctggagggtgagcgacctgcgagactcacaagaggggaagctgacagagatacctacagacggagtgctgtgccacctggtgccgacaagaaagccgaggctggggctgggtcagcaaccgaattccagtttagaggcggatttggtcgtggacgtggtcagccacctcagtaaaattggagaggattcttttgcattgaataaacttacagccaaaaaacttaaaaaaaaaaaaaaaaaaaaa

SEQ ID NO: 241876 - DNA, 755 bp, Homo sapiens
gccggtaccggaccctgcagccgcagagatgttgatgcctaagaagaaccggattgccatttatgaactcctttttaaggagggagtcatggtggccaagaaggatgtccacatgcctaagcacccggagctggcagacaagaatgtgcccaaccttcatgtcatgaaggccatgcagtctctcaagtcccgaggctacgtgaaggaacagtttgcctggagacatttctactggtaccttaccaatgagggtatccagtatctccgtgattaccttcatctgcccccggagattgtgcctgccaccctacgccgtagccgtccagagactggcaggcctcggcctaaaggtctggagggtgagcgacctgcgagactcacaagaggggaagctgacagagatacctacagacggagtgctgtgccacctggtgccgacaagaaagccgaggctggggctgggtcagcaaccgaattccagtttagaggcggatttggtcgtggacgtggtcagccacctcagtaaaattggagaggattcttttgcattgaataaacttacagccaaaaaacttaaaaaaaaaaaaaaaaaaaaaaaaaaaaaaaaaaaaaaaccggagggacacaaaggcgggggggggaaaaacgggcacggaagggggcggggccaagcgggtcccggcccacgatctggtcacaggggcgaacccggggggccccaaaaggggccgaaaaaccggaaaccggtaccgaaa

SEQ ID NO: 241877 - DNA, 504 bp, Homo sapiens
tcagaaatctaaactttgtttttaacacatgcgtaaatgataagaggactaaatactgtcaaggtccatttcaaatcttgcaactactttccataaacatctcacaaaccagaatttctcactgaagtcgtactacccgctctgggcttcctgcaggctttgagccagtgcatccaaggcctggtagaagagttaagcagactcctgcaggagaaattgtccctgtgttctggatggtgcagcagtacagaaatcactgccatcatgatggcaaggagcttcaattgacgaattccacttcgtgcttaccatgtgctgtccacctggtatgaggtgccatgggaatgcacagatgacacttctggttttttcgggagctcacagatgtgtggacatagataaagtgggttgggacaccccggaccatgggctaagacctaagacagaccttgaaagatgctaacatagaggtgtaagcactaaaaaagcatggtagttgagtgc

SEQ ID NO: 241878 - DNA, 346 bp, Homo sapiens
catccagccctcttcccagcttcctttctccttccagcttcctccttcctgtattccctcaacatctgttcttccctaaaaccttcaagcccttggtcctcccttcctctcatgtctattaggcccatcttggcttttctagatgcacattagaatcatctctctcaccccaaactgctaaacacagatgttcggaggctggggagcaggcagcagtattgaaacctccccagtgatcttgatgcacagtcacgattgagaacactgcttacaaggagcctggacctttgggggatcccctcagtctctctagccctctcttctacttctcccttgctctcttctc

SEQ ID NO: 241879 - DNA, 556 bp, Homo sapiens
gaaatgagtcccagattcccaatgcagtattgattttattacttcagctagtatccaaattgagctccattttgtttttgttaggggttgaggagggggagagagaggcagagacagaagaaggaggagaggaggaaaagaagaaacaggtagaatgaatgtcaatagataagtagagataaataaatagtacttaaaattatttggaatattagaataattcttaaaatcctcagtatatcaggcataagatagtaaatttcagtaatctgagatggcctccttgatgagcataggcagctgaactgggctaatctacattatgctcatacatttgactaacttttctgttactcagacctacaataatttattttgttgcattagtacacaagccacataatgactgtaaaagctagaaaaatgattgtctatgaagtataaatattaattattttatattaagaatgtatctagttgctgggatgacattagttgatttgtacacatcacctctgatgttctcaacattcacatgatgtgcaatatggatact

SEQ ID NO: 241880 - DNA, 473 bp, Homo sapiens
ttttgtgtcaggctccagtgtgactcagcacagtgttcacagcccatgctctcaagaatctcagcttaggaggaggcaaagagccgctctacagtaaggtaaataagtcatttagtcaggaactctgcacatttacctctgcatttatcaaatatttgttgaaggaaataataaaagaagtgaggaggaagaagaggtttcctgggagaaagcactcgaggagcaataggtgtcctctttcatttccactaaatatgctgctcaatgccttgtggcataacagaatcaaaacttttcagatgccctgccgctttaacaagacccaggatatgtcaaaatggctcccacagaactttcatttgatcttatctttcgctgtcacacacatcgacctgcattttcttttttctttttgattctttatgtctgcaaatgaactgatgtaattaaaaaggtgaagaaataaatctatc

SEQ ID NO: 241881 - DNA, 751 bp, Homo sapiens
aagaatagatagcctcaaagatgtcatgcttgggattgctttaaaataatagagtgggtggtaaaataggttagggaggttgaatgtggataatagttgaagacttgattggtacatggaagctcattattggctgtacctttgtgtatgtttaaaatttttcatgataaaaactttaagtcatactcaggtaatctgaacttcattttgtgaagtattttaactttatctttcacttagtctttactagagttatttttgtggtaagtagctactaaggctgtaaaccagcaaattagaaagggaattattctccttaggacttctgtaatacaagttattttaaaaatgccttttcctctggcaaataattgttgccctcaattaacaaagtacattaaagaatttttttgaaaactaagtataaagaagaaaaaacacattaataataccatcacccgagataacagcaaaataataaaaatggctatttctttccagttgtttaatgcatatacttaatataagtaatcttgtataggtttctttaccctgaagtgaatatcctgtatgtaaatctgaatgactttgaaagatgttttactatgtgttaaagacaaatttcaaataatgaaaaagccaacaaaatttctactgagctgtttatatgaaaaccttcatgctgatggtattggttaataatagctagtatttgctgaacacatgctgtgtgccagcaaacctcacaata

SEQ ID NO: 241882 - DNA, 477 bp, Homo sapiens
gaattgagcacagagattatttaatctagttttatatgctagagatgtaagaataagcagtgaaataaccattgttccttgccctttgttctttcagcaagttgcagtcatttttgctacaacatcagactttcttggaaaaatgtgaaacatggatggaattcctagttcagacagaacaaaagttagcagtagagatttcaggaaattatcagcaccttttggaacagcagagagcacacgaggtaagttgtatcagtagatttgggggtaataagaaatttttaggcccttagaagatgctacgaaatgctgtgtgggagaattaaaatcatgccctttgcacgagtgtctaaatgcatgcatcattttgccttctttcttaagcttgaggttttgataacttaattataaaaatgtagtcctattcgctgctccatgattgtttataagcacgtgtcaatcttcagttccttg

SEQ ID NO: 241883 - DNA, 659 bp, Homo sapiens
  misc_feature (549)..(549): n is a, c, g, or t
  misc_feature (592)..(592): n is a, c, g, or t
  misc_feature (597)..(597): n is a, c, g, or t
  misc_feature (652)..(652): n is a, c, g, or t
aagaaacagtggtcagcccaggaattgattaaaacgtatttggataatttaataaactgactagaaaaaattatgtatataaatatttgtataatatttaatgattaatacatgatgatgatgatgataagccaaaactcccaaagtatgcattcaaacacttaagagtacctgctagaaatataatctctgtcttccaaaccagtacaattaaaataagaaagtaaaactatcaaaccaaaataatacaggcagaaggaagatggaagtaacaaagaaaaagctggtgacagcaaacaaaataaggtgcatgaatgaatccagcagctttatcagtaatcaccaaaaatgtaagcagattaaactcacctattaaaagacagattatattggataagtaaataaaattcagcaatattcagcttacaaggtacatgtagaataatactacacagagtttgaaaataaagagatttaagaagacttagtagacaaatactgtacttacccaaaaggttaatataaaccaaaatttttaaaaaacaaaanaatccaatttatttggtggaaaaggatgaagggaaaccacctngccanttaaataaaggggttaaggaaaaaacaaaccctttaacctttaggaaagggaaancttaaac

SEQ ID NO: 241884 - DNA, 714 bp, Homo sapiens
cccagctactcggaagcctgaggcacgagaatcgcttgaaccagggaggtggagggaggttgcagtgagccaagattgcaccactgtactccagcctgggcgacagagagagactgtctcaaaaacaaaacaaaacaaaaaagaacaacacactcaacaatggcatatccattttatagaatgagcaactgttaacagttatccttcttgtcagcagaagcaccagagggttaagaaaaaagtttcagatgccttctctgcccaccaggagtttgacattcttgttctctaagggcagcattggtgttgtggaaagagccccgagagtcagcaaactcgagttttattctttgcagtgctactaaatacctctgtgactttacacttgtcatttaccttctttgggctgttggtttcctgtttgaaaaagaaaaaattggggccaagtgtggtggcgcatgcctataatcccagcactttgggaggctgaggcaggcagatcacttgagcccctgaatttgagaccagcctgggcaatgtcatgagacctcgtctctacagaaaatacagaaaataaccaggtgtggccaggcgcaatgactcacgcctataattccagcactttgggaggctgagtcaggcagatcacttgaggtcaggagtttgagaccagactggtcaaaatgatgaaactccgtctctactaaatataca

SEQ ID NO: 241885 - DNA, 507 bp, Homo sapiens
cctaaacataaatcaatttaagcatcataaaataatatataattgtatgtgtacagtctttgggtaggaatgatcttcctaagaacaaagagcaaaagcagaatccacacaggaaaattttgtccaatttgcttatttataaattaaaattttctcaacacaagagacactaatgaatagtaaaacaaataccacactcagagaaaaatagttcaacagaacaaaagggaaattttattaaaagaatatacaaatgaccaataatgaaaatatgttaaatgtcacaagtaaatgccatgtaaaataatgagttatcactgttcacagatcagattggcaaaatatttaaaatgatcaagaatatgcattgatggtccaggagtaagacagcacactgatctcttaatgcaggttttcttgggaaaactgttttagaggaaaggttcgtagaatcagtgaaattttacttctaggattccattcaaaaaaaaaaagttggcaatgaat

SEQ ID NO: 241886 - DNA, 369 bp, Homo sapiens
ctaccctaagggttgagggttgatcagaaagagatatgaggaagttatctgggaagttatctgggaagagagaattgttttatatcataataaagatgtggcttactctggtgtactcatttgtcaaaattgtaaagctaatatgtaggcatttcaaggtatgttatatatgtagtgatagatataggtatatagtgataaatgagagatacaggtgaaaaaagaatgacaaaaataatgatagccattgcagttgtataatgtaggacatgaggattctttatactgttttgtttactttgtacatatttgaaattttcataataaacagtttttcataataaagagcttttaaaagccaaagtactt

SEQ ID NO: 241887 - DNA, 1318 bp, Homo sapiens
tgacccggaaacggattatccggagccaaggtccgctcgggtgagtgccctccgctttttgtggccaaacccagccacgcagtcccctccctgcggcgtcctccacacccggggtctgctggtctccgcggatgtcacaggctcggcaaccgccctcctgtcggcggggagtcccgcgacgcccggaaatgctccgaagcctgtcgctcagctgccagatctgcgtctgtgtccggttccgtcactgaggtcgcccctgtccggcccttcctccctagttctcttcaccgtccgcccatcctgtcgcgcgccgcgtcaggtccccattcggcatgtggcttgtcttccatcgtccccaccctcgcccctcttggcccctcagggcagccctgggattcggcagacgccagtcctccctgagatgcttccccgtccttccctccgccaggccctacgtctccgcaaaccccacgcttcggggtggccgcctcagacaggaccctgagtccgagactggggtaggggacctgcccgatcctgtaacaaccctcgtgcttctgcacaatcgcctcccactagcggtgactgttgggtgtctaccttcccggtgtcccactgagaagcgggctcttccttggcaggggcttcttcattgcctcgctgtggatgtcgaggtggggcaggagagtgaggagaaaacagagaggagggaggtagagccaacgagcgagaaaaggggagggaagtttagatgggaagtggatgggtctgaggaatttgaacaaacaccgacagtgaaggagagtgacctgagcaagcagtagtggggtaaatggaaatagacaaaatgggaatcagcagagatatggaggacagaatacaatgaggaggccttgaccgtcagtagcagagagggcagcagaagcctaattcccaaattccttagatggttttctgatttccaaattagtttcccttttaaatttattgtgtcaggttcagcttatgaggcctcaatacttttcagtcttaattgtatattgaaaatactttttgtttactaaatgctttttacattaattcagtgtgcacttcgtaaggataatgatgatttgagttagtttagtattcaacagcttcctctattcctttatatgatctctgtatttaatagctgtggcataaagtttccaactaagtataagtatcaagttttctttgtgatgttttctgcaaatattgaaggatgacctggattgtcctagaactttgttccaacagattacatgtgttcataacgaataaattgctcaaagat

SEQ ID NO: 241888 - DNA, 546 bp, Homo sapiens
atgaaaatgactctgtaatatcttgacaacatttcagtttattagggataatataccaggaagatctttgatgattaaaaactgtgattatctaagggtaaatatattatcaaagagtcgttatactgtggcattacataatgttataaatattttgtacgtttttaatagtgattaaatgagattaggtatttaaagcactttgctgctgcagccagtatggaaaacaatatgcaagttcttcaaaaaattaagaataaaactactatatgatccagcaatcctacttctgggcatttattcaaagaaaacaaaatcagtatttcaaagacaattctgtactcccatgttcattgcagcagtattcgcaatagccaagatacagaaacaacctaagtgttattcagaaaatgaatgggatagggctgggcatagcagctcatgcctataatcccagtgctttaggaggctgagctgggaggattgtttgagcccaggagtttaagaccagcctggggcaatatagaaagaccctgtctctgcaaa

SEQ ID NO: 241889 - DNA, 472 bp, Homo sapiens
aagcttgaaaacatcacagttagactgtgtcattttctggtctttaggtggagccactgctattgcaggtttcctaaacctaaacctatttatagagaaattcctcttcagtcattttataaccaaagcctcttgtaagtatttaacattacattttagctctagtgaatttcaactatataggaaagaccctgagagaactaccattataaaatatgtagcccattcatacatattttaacattcacaatactacttattagaatttgaatttatttctcagacttttctgagaggttagaagggccctgttgtgtttaacccaaagaccagttcaaaaactagggaaggagctgtttaagaggaaggaatgactaacgtctgaaggtcagaggactaaaatcctggtgattgaacaagttgctttttatgggttttccctctaaaaaaacaaaacaagccgggcaaaaaa

SEQ ID NO: 241890 - DNA, 367 bp, Homo sapiens
atagattcaatgtagtcttaatcaaaattccagcaagttattttttgatattattaaactaattctaaagtttatatggggaagcaaaaaactgagaatagccaacacaatattgaaggagaacaaagtgggaggactgacattgcctgacctcaagacttatcataatgctacagtaatcaagacagcatggtattagtgaaataattgacaaatagatcaatggaacacaatagagagcctagaaatagacttacgtaaatatagtcaactgatatttggcacaggatcaaaggcaatataatggaacaaagacagacttttcaacaaataatgctggaactattgggcatccacatacaaaaac

SEQ ID NO: 241891 - DNA, 133 bp, Homo sapiens
aatactcatactttatggtttagtgatatccctctatattcatttatttagttttcaaaacaattctgtaagtagcttttatgaagttgccagtgataacagaacacttgaagacttgtctaagatttaatag

SEQ ID NO: 241892 - DNA, 395 bp, Homo sapiens
ctctaatcttgatcctccaacctttttactgtgtctcacccccttaatgttctctcttcttccttagccagcttaatgtctgtgggcaatcattataattattcccatcaggctgggtatggtggctcatgcctgtaatcccagcacttcaggaggctgaggcgggcagatcacctgaggtcaggagttcaaaaccagcctggccaacatggtgaaacctcgcctctactaaaaatacaaaaattagccaggcacggcggcagatgcctgtaatcccagctactctggaggctgagataggtgaatcgcttgaacctgggaggcggaggttgcagggagccgagatctcaccattgcactccagcctgtgagacaagagtgaaactctatttcag

SEQ ID NO: 241893 - DNA, 426 bp, Homo sapiens
ctgagctcaagagatcctcctgcatcagcctcccgaagtgctgggattataggtatgagccaccaccctgacctccaaataccttttgaactcaggcttggatttgaactctggttctatcaactattagctgtgatttcagatcagtgacttgagcaatttgtgccttgtttcattaagtggagatgacaatagcacctgccttgcaagaattatttgatgtggccgatgagaaaaatcagaattatgaaaagtgcttcacaccattcctggcatgtgaagagccctctctaaatggccattatgctaattagcaccttaaagggaaatcattttcatgaaattttatttgaatctggctagagaaaatgctcaccttcttccttgtgttttgcttatttgattaaatgtctttgatttctgtga

SEQ ID NO: 241894 - DNA, 2261 bp, Homo sapiens
gccagctgtgtgcggatggggcggggctttggaggccgcgtgaccagcggcgggtcacgtgacgcggtgcctggcgccgagcctcccaagatggcggtgtgcatcgcggtgattgccaaggagaattaccccctctacattcgcagcacccctacggagaacgagctgaagttccactacatggtgcacacatctctggacgtggtggatgagaagatctccgcaatggggaaggccctggtcgaccagagggagctgtacctgggcctgctctaccccacggaggactacaaggtatacggctacgtcaccaactccaaggtgaagtttgtcatggtggtagattcctccaacacagcccttcgagacaacgaaattcgcagcatgttccggaagctacacaactcctacacagacgtgatgtgcaaccccttctacaacccgggggaccgcatccagtccagggcctttgataacatggtgacgtcgatgatgatacaggtgtgctgagtgagctgtgctgccagccatcgcagaggagcccgcgcacgactgtggtggggccgtcggtctgttctggttgcctcttcctgaatgggacgcctggggcttcagggcaggcagctgtgcatgttctctcaactaaaggtcttgtgagaggagatttggctttttccttccgtgtcagccaaggatttaattaagaagaattcaactaaggacttttctggggtgtgggcagaggtttgggatcagatggcgcaggtagcctgtcctcagttgtcccaaaggggcagaggcaggggtgcctggagccaagagttcctgagcctgcaggacctgtgaccatgtgggtcacccactggctgaacaggtgggctggtctggagggggtggcctcctgagcccagaaccagcctaggatctaggggcacaaggggagccggcgtggcttcccacaggggagggccctcctctttctggacttggcctccattctttgcatctggctcaatgtctggattccgcccggccttaaaaggagcccttgtgaaacctgggaagcctcgtggccccgcggcgttggctcagctgcagccctggtcctaaaccttggagcgcagacttgaggcaccccctcctgcctgttggtgctgagggggttgggtgctgtgtcacttgatgacgtggctgactaccacccagggcagcggccgagcccatagtggcgtcagtgccgccggcgtccttggggtccagcggtcaaggctcagcccgctgaggggacccccccggagttggttccagcactggtccaggactggagagtttctcaaggaccttgaggaccccagaagcccttgcagcaggaaaggctgtaagggggggtcagcctagggcaggacctagggaggggaactttcttgatacgtatttgccttttcatcccatctagcaagcacagtgttaattttagaaattatagaagaaaaaatcagcaaggagtgtgggaaaactgcatgccccaggcctcccccgccccagggtgaattggaagtcctggaatgggccgaggcacaccaggcagctgatctgggtgcatgtgggccacagaccactctcacaaggttaaatctttaacaagagcctcatgtttgttaggagaaggtgggaccccagcccaagcacttccccattgcagcctggcatgaaatctttgccttttagtggggatcactcctgcccgagtcctggctgtggtggggactctgcaagttgctaacccagcgtccattctctttcctccgtactaacagaaccccggtgcctctgcccagttccaatagcgggcagacgagagccatgtcctgggctcccttgcagcccggggtgtgcagctgtggcgtggaggtgggtggtgctgggagagacttgcagggaagctcctgtgaaggggactcagctgccacatgcaggacccttcccctttgccttcttcctgcctggaacatggatgtgatggctggtgctgggacagctgtcctgagagcgtgaggaaagggtcacaccctaaggacagtggagcagaacacaggaaggaccctgggcctttgctgacgcagaacgcgggaaggacgctgggcctttgctgacgcagaacgcgggaaggaccctgggcctttgctgacataccagccccagactacttaaattcagctttttttttaatgtgagaaaataaatgcacccctctctggttt

SEQ ID NO: 241895 - DNA, 962 bp, Homo sapiens
gccagctgtgtgcggatggggcggggctttggaggccgcgtgaccagcggcgggtcacgtgacgcggtgcctggcgccgagcctcccaagatggcggtgtgcatcgcggtgattgccaaggagaattaccccctctacattcgcagcacccctacggagaacgagctgaagttccactacatggtgcacacatctctggacgtggtggatgagaagatctccgcaatggggaaggccctggtcgaccagagggagctgtacctgggcctgctctaccccacggaggactacaaggtgtatctttcagggcagggtgtgtgtcagggaggacctacagttgcaagatgtactttaggatcagataacttgaaaccttttagaagaaaaagaggtgagagtttttagccagccagggaattagggtagcttgaggtgaatgaaggcctgtaactcttctctttcattggaagagccatttgggaaaagcaaggctagaattccccgtagaatgttttggtttgcacgtgtccgttgtctggtttgcagaggaagtgggacacttctgctttgtacctgcaaggatttctttctgtgcttttcagggggagccaccacctttgagcaggggataatagtttcatttatttcattaggccttgcctcttatgtcactagacactcgtctagtcccttgggacaaatcacttgaggccatggaattcaaagaccttcccaaaagtcatcatgtagcctgtccatggtgacatttgctagtagccactattttacaaaataatgtggcctctagagaggggatccgccttgttcacgaagcctctggttttgcagttacctttccgggccaggcattgattcatgaagagggtgaggtgttccagacagacagactcggagtctaagtggttcggctcctggagtgtgaactgggtaaggcttggctg

SEQ ID NO: 241896 - DNA, 772 bp, Homo sapiens
gccagctgtgtgcggatggggcggggctttggaggccgcgtgaccagcggcgggtcacgtgacgcggtgcctggcgccgagcctcccaagatggcggtgtgcatcgcggtgattgccaaggagaattaccccctctacattcgcagcacccctacggagaacgagctgaagttccactacatggtgcacacatctctggacgtggtggatgagaagatctccgcaatggggaaggccctggtcgaccagagggagctgtacctgggcctgctctaccccacggaggactacaaggtatacggctacgtcaccaactccaaggtgaagtttgtcatggtggtagattcctccaacacagcccttcgagacaacgaaattcgcagcatgttccggaagctacacaactcctacacagacgtgatgtgcaaccccttctacaacccgggggaccgcatccagtccagggcctttgataacatggtgacgtcgatgatgatacaggtgtgctgagtgagctgtgctgccagccatcgcagaggagcccgcgcacgactgtggtggggccgtcggtctgttctggttgcctcttcctgaatgggacgcctggggcttcagggcaggcagctgtgcatgttctctcaactaaaggtcttgtgagagggaaaataaaaaaaatctcacttttcctataaaataaaaacactcggggggggcccgtacccaatttgccttttgtgagcggttttcaattaattgcgcgccgcttccaacc

SEQ ID NO: 241897 - DNA, 730 bp, Homo sapiens
gccagctgtgtgcggatggggcggggctttggaggccgcgtgaccagcggcgggtcacgtgacgcggtgcctggcgccgagcctcccaagatggcggtgtgcatcgcggtgattgccaaggagaattaccccctctacattcgcagcacccctacggagaacgagctgaagttccactacatggtgcacacatctctggacgtggtggatgagaagatctccgcaatggggaaggccctggtcgaccagagggaatacggctacgtcaccaactccaaggtgaagtttgtcatggtggtagattcctccaacacagcccttcgagacaacgaaattcgcagcatgttccggaagctacacaactcctacacagacgtgatgtgcaaccccttctacaacccgggggaccgcatccagtccagggcctttgataacatggtgacgtcgatgatgatacaggtgtgctgagtgagctgtgctgccagccatcgcagaggagcccgcgcacgactgtggtggggccgtcggtctgttctggttgcctcttcctgaatgggacgcctggggcttcagggcaggcagctgtgcatgttctctcaactaaaggtcttgtgagagggaaaataaaaaaaatctcacttttcctataaaataaaaacactcggggggggcccgtacccaatttgccttttgtgagcggttttcaattaattgcgcgccgcttccaacc

SEQ ID NO: 241898 - DNA, 673 bp, Homo sapiens
aatttttttggggcaaggaatttgaatagatattctctaaagaaaatatacaaacagatagtaagcacatgaaaaatttcaaagccacaaagacataatgcttcacgttcactaggatggctataatcaaaatatactgctggcagaaatataaaatggtatagctacgttggaaaatgggttctgcggtgtctcaaattatgacaagcaattcatactcctaggtatatacccatgaaaaatgaaaacgtatgtccacataaaaatttaaacatgaatgttcacagcaacatttgtaagcagccagaaagtagaaacaactaatgaatgagtaaataaaatgtggtatattaatataatgaaatataatttggcaacaaaaaggaaaaagtactgaaacctgctataacacagataatccttgaaaacattacactaaatgaaagaagtcacccacaaagagctacgtattatatgattccatttatataaaatgtccacaataaacaaatccatagaaaaaatgtggactataggtagcctagggttgggagatttggggtgatatgtggagtgactgctaatgtatacagagttccttctgggggtgatagttatacaactgtgaataaactaaaaaccactgagttgtacactccataaggttgttatt

SEQ ID NO: 241899 - DNA, 385 bp, Homo sapiens
ttgctgaaactactggaatcagcttagttcatgtgttgaactgaccgaaacatgacttattcatgttattatttataaattggattacagttttctatttaaagatttttatttttatatttataaatattagaagtaatatctcttaacacaaaactttaaaaagtgaattttaatacccaaggaaaaaaactgtatgccattaattctccgactttactaaagaaattggatgtgtattttaggactatttgaacataataactcattatagaaaattttagaattaaaatgtctttcagtgtattgcaagttttgatagttttgtattgttttgcctatttttacaataaactgaatattgttaagtgttcactttgatgag

SEQ ID NO: 241900 - DNA, 399 bp, Homo sapiens
atcaagtggtaagcccgtccgaagactgcagtccttcagatcactaggatgctgctaattgagtaggacacagcagcttacagtaaatattactttctggctactttcttatgatagttgaaattacatctaatttatcaagaaagtgaatgcttatttgatttggctatgaaattatgctgctcagttttaagatgtcttcatgaacccagtctcagtgaagatgtttctgtattttagggtttgtttgggttttttggcctcatcctcccacgaatgtttaaaattagcttggcattttaaatctgtgcttttatgttaggtcttagataattataaaatagaagaaaaattaagagcaaaactgtataatttatttagacaaccagttttgtagag

SEQ ID NO: 241901 - DNA, 589 bp, Homo sapiens
gttggctataaggaaggatgaatcaatggttgaataaatgggggatggatggatgattggatggatagttggatgcatagagggtgatagaggtggatggatggatagaccgatggatggatgggggtggttggatggaagatggatagatggagggtagatagatggagggtgaatggataaatggatggatagatggatagatgaatggatggatggtgatgaatggatatgaatgggatactcattctctttgattcagttaaaaggctgagaagtggtgtaatgggatgtgcagtagactaagaagaggggacacaggttccaggccaaacttttgtggttactttactgtgtgccctaaggcaagttatttaagttgtctgacgatcccttttcttagtgtaaaacaacggacttagataagatgatttatatgacatcctataagattttagtcttgtaattctatgaccccatggagtagaaagtagagcaatatatttatttttaacttatctttaaaaatagatagaggtatatgtaaatttagtttttttttttctagagaccaaagcagagaaacaca

SEQ ID NO: 241902 - DNA, 312 bp, Homo sapiens
tcatgcttccagcacagaataaaaagtaaccattttgaaatatgtcagaaatgtctgttcttgaaaaggcctgcccacaggagaaactatcttcccagtgcctaaccaacctgagggaaggcaaattcctatttccagccccttctagcaatcctgtctcatgtaagtggggagaaaactgagaagcactggtaaagtccacggtccaaaggcacaggctcaccaagacctaatcataaaactatagagcacttgccttccctctgccccttactactacatcactacatgtctcattaccagacttcctta

SEQ ID NO: 241903 - DNA, 740 bp, Homo sapiens
gttacagctcacattttttcagtgtttagtgttagaagtgtttggggtctctagaagtttggtgatgtttttgtgaccagaaatatgccatagaaactttcccacttgtttacatcaattggcctatggtaaagttggttttaaagtcaaagtttctcttattgtgtaacttgccattgacatctactcatgttacttaaataagcgttttgtttgtttgtttgttttttgtttttttgagatggagccttgctctgtcacccaggccggagtacagtgccctgatctcggctcactgcaacctccgcctcccaagttcaaacgattctcctgcctcagcctcccagttagccgggattacaggcacatgccaccacacctggctaatttttgtatttttagtagaggcagggtttcaccatgttggccaggctggtcttgaactccagacttgaggtgttctacccgcctcggcctcctgaagtgctgggattacaggcatgagccactgcgtccagccaaataatgagtattaattggctgaatagcaagtattctctgaaaacattatttaataatacaaaacttttaaatattttagcaataactgtgttttcagatttgcactcagaaaactagtatgacttttaatattgtatcccagcttttctccttttaaaaaacagaaaaccctaacttctgtaacttgactgagattaagcgtatctgataccattgtt

SEQ ID NO: 241904 - DNA, 453 bp, Homo sapiens
gctacagaattttagaatggaaaacatcgtcttgctgagctgagctggacacttggttgtcaattctgaagaatctgtaaggcaggacattctaatagcttcatttttgttttttttttttttttttttttagctgcagttaccatcctcaaatacaaaagtaattgatactcagcaatgaaagctgcatgtgcatgtaggggagagaaggaggtttcaccagactgacaaatggagtcatggttctgggaaggagcaggtaaggaggaatttgacatttaccctaagatcttatgcagtctggactgtgatgttcttgtggagggcacgttggcttgtgaaacaagtgccatgaggccctcaagccaaactcttccaactgaataaatgagctaattctacgataccagccagtagatgtctctctctgttatatcccttctgatcattacc

SEQ ID NO: 241905 - DNA, 766 bp, Homo sapiens
gcccagcttgtaatatctttttatgtctgacatttttgagctatctttttatgtttatccattagtggttctatagcactatacatagggattataatcaaaatttttaacatgtggtaaggcacagacactgaccagaactcaggccttgcagaaacagcctatgggcccagactggtacttcctggctgaatattggccatggttttagatgtattttattttataacatgaatgtgtattctttcataagggcttatcagtcagtatatttgccccagtgtttagttgttacaaggacatgatatgcttacttactatcagtttatgatgtagaaaatatattttgtaattataagaaaacaagacttttcctatacccagaaatccctttgcatttccgaagatcagatattttgcttaaaggtctgatcatataggaaatatatgcagaacattttaaagaaaatgcctggctgggcacgggttctcacgcctgtgatcccagcactttgggaggctgaggcgggtggctcacttgaggtcgggagtttgagccagcctggccaacatgatgaagccctgtcactgctacaaatgaaaaattagccaggcatggtggtgagcgcctgtaatgccagctgctcgggaggctgaggctggagagtcgcttgaacccgggaggtggtggttgtagtgaaccaagatcacaccactgcactccagcctgggcaacagagtgagactctgtgtctaataaaaggag

SEQ ID NO: 241906 - DNA, 500 bp, Homo sapiens
aatcctaagtgtgtacgcaatagagcttcgaaataaaggagcggaaactgaaaaaaatacatccataatcagagctgaagacttcaataatccactctcagtaattaatgggacacataaatagaaaatcaggaagaacataaaagacccgcaaaacactatcaagacctaatagacatttatagaaatgttccactcaacagcagaacatactttttatataagggtatgtggaacattcaccagtacataccatattctgagctacaaaataaacctcaactatttaaaatcagtagaaaccatacagagtgtgtttttacatgaaaacagaattaaaccagaaatcaattaattggaggatatctgaaaaaccatcaaattattgcagaattaaagaacacatgcatgatactggtacaagaacagacacatagatcaacggaacaaaatagagaactcagaaataagactgcacaccagcaaccatctgatcttca

SEQ ID NO: 241907 - DNA, 285 bp, Homo sapiens
atttgggttaatttctgaattttcttctttgtgaattgatttttctcctatatttgcatctgctattatgtattaattattgaggctttgtaatgtgtcacaggttctgtcaaggctgggctgtcattgttctcctattacatattttttcctagctcttcttgcttgtttattttcccatttgaacttcaaaattactgtgttttattaaaagacccttgtaagatagaagacagatttgatttcattaagaaaaaacagaaaaaaaagcaaattcaaaagaca

SEQ ID NO: 241908 - DNA, 589 bp, Homo sapiens
cacatttctaagctcaccaccacttataattacagaagattgatggctatataggacatctcccaccaagcctgcagaatgtccagatgtcccaagtacagcccactttactcagagataacgtcaatgagcagactcaagttgaaggattaatggtcactagagcaccaacagcccctacctttagtgagcacatctgcacattccaagtttaatcatagctccttatagcttcttataagcagagatgttcctaaaggacaggggttcctcctcctgctttctgggcatgccctactctctaatggagtagtttccaataaatttgcttctttgtctgtgctccaattctttcctgtgtgagatctaagaacccactcttggggtctagattgggatccccttttctggcaacatcttgagtatgtgaccatgagaaatgttagaaattggagtgaaaggtacgtaaacatttgaacccaataccattctctggttctcccagaggcacagtaaaaaaaagtattgacatagaagaaggaaacaaaaagttgtcaggagttaaagaataaagatttttttttctgga

SEQ ID NO: 241909 - DNA, 507 bp, Homo sapiens
attggctagtcttttgcaaattcttactttggaatgacctttagaacctgtggcatatttttttttttaatattgtccagagtggcatttcttcagggtagatctcatttgtaaatatagacaaaagtcattcagagctgagttcaatgactaaaagtagatgaccaaactgggtgatcaaatctaggctccacgctgaggtgcacttctaagataaggtgcctgattttcccatgtgggctttttgcctatactcttgcccacccacccgcccacctaggggagcaatggacacctaccaatggtcatagctcttctctaatcatactcctctgccctcagcttgtttaacagtatttctcaactccatctcatcttcattctactccagactcgtagatcttgaatccagcatttgattctacctctgagtctttgaaccaggtgttagcaatgattttcccaatgtttgaactactacttttccaaataaactctgactttaaa

SEQ ID NO: 241910 - DNA, 389 bp, Homo sapiens
tacttggcagggatatggaaccagatgacctttggtcccttctggcctggagaatctgtaatgataggggtctaagcctgccctgactacacccgggatttgaatctagatttctcctactcctaagccacagggttacgttaagaatattagtcgcacgcctgtaatcccagcactttgggaggctgaggcgggtggatcacccgaggtcaggagtttgagaccagcctgcccaacatggcgaaaccctgtttctactaaacatacaaaaaatcagccaagtgaggtggtgggtgcctgtaatcccagctactcaggaggctgaggcaggagaatcgcttgaacgcgggaggcggagcttgcagtgagctgagatcatgccattgcat

SEQ ID NO: 241911 - DNA, 276 bp, Homo sapiens
tctgtcctacaaaacctcagctccatacacaggagactttctatcacgctgctgaagttggagctgaagaacaaagaacaagcttgagtgtcccatcacctgctcagaataaagttgggtgaaacattctgtataaacactgctgtctacagggcctgcctactgagaggatggtctgggagtatagatgtggctaaggggataatgtagttgtggaaaggatattcatacacagaataaatgcaagaaattcctccactaattctagacagcatc

SEQ ID NO: 241912 - DNA, 337 bp, Homo sapiens
tgccaccagcagtgcttgctacagcccacagccttgttttcttctctcccagcctcctcccctccccagcaggagcttttcagcccccactcaccactgcaccacagtttctttcttttgtcctctctggactctacttttttcctaacactttccctagctcaggctagttctcacccactctgtcttccactttcttcaccccacagagctgagacactggggccttctttctttttctcctgggctcttaatcgtgttcttgaccagaagatagcagaagctttggccttcttcagcttgattccaccctgggttccaaattcagtccttccca

SEQ ID NO: 241913 - DNA, 317 bp, Homo sapiens
ctactaaaaatacaaaaaaaattatccggtcgtggtggtgggtgcctgtagtcctagctcctcaggagactgaggcaggagaatggcgtgagcccaggaggcggagcttgcagtgagctgagattgcgccactgcactgcagcctgggcgacagggcgacattctgtctcaaaaaaaaaaagtattaaagaatctcaacaggatgagtaagttgaggaaatctgttatacaaacatggtgactatagttaataacaatgtattgtatacttacaaattgctaagccagtagtagcattaaaaaatgttcttaccacc

SEQ ID NO: 241914 - DNA, 149 bp, Homo sapiens
tccttttactgttttaatgtggctactaggaaatttaaaattacatatgtgactcacatttctcctggacagcaccggtctaaaggctggggtgcagtccaaggaagtactgcaatataccactagggggaagcattatagcagactcc

SEQ ID NO: 241915 - DNA, 327 bp, Homo sapiens
gaaaacaaaagaaaagcactcatgccttctgtgaacaggcacagactgagctctcctgctgtggccagggcaccagagctgccaccgccccccaccgatggctgctctccttgctagcatgtcctcacctgtgtgtactgggaagagcagaggactaatctttgtctagccaatgtaagagaaagaggccattttgacggtgtgtgactgcccctggcagttgcaggtcacttcagctcatcctggcccagcagcgtgtgggtaggtctacaatttaaacccacagagttggcgggcggatcacctgaggtcaggagttcgagacca

SEQ ID NO: 241916 - DNA, 464 bp, Homo sapiens
gctgaggcaggagaatcacttaaacccgggaagcagggaggttgccgtgagccgagattgcgccactgcactccagcctgggctacagagggagactccgtctcaaaaaaaaaaaaaaagaaagaaaagtgagtggaagagaaatctttcgagttagaaaatataataagtgaaggctgggtccggtggctcacacctgtaatcccagcaccttgggaggccgaggtgggtggatcacctgaggtcaggagttggagaccagcctggccgacatggtgaaaccccatctctactaaaagtacaaaaattagacgggtgtggtggcagatgcctgtaatcccagctacttgtgaggctaagacaggagaatctcttgaacctaggaggcagaggttgcagtgagccgagatcgcaccactgcactccagcctgggcgacagagtgagaatctatctccaaaacat

SEQ ID NO: 241917 - DNA, 348 bp, Homo sapiens
gctaatgaataaaagtaagttgtaagcttcatgctttaggtgttttaaactttttaaatatgtttggaaaatgtggcctggcacagtggctcacacttgtaatttcaacactttgggaggcagagatgggaggatagcttgagtccaggagtttgggaccagcctagtgagaccctatctctacaaaaaataaaaataaaaaaattagctggatgtggtggcatgcaactgtggtcccagctactcgggaagccttatgcccaggagatcgaggctgcagttagccctgccactgtattccacccttggtgacggagtgagtaagaccctgtctcaaaaaaataaaaa

SEQ ID NO: 241918 - DNA, 372 bp, Homo sapiens
aatgagcattccttgtgccagactgtgattgccaaataccatttcctacaaaaaataaccagggctctttgaaacaatggctgctttcagatttggagcaggagatatacaagatgtgcctggttcatctttttacaacagcaagcagggaaactctggaggactcccagggtcatgttgtagaaggactcaggaaccaacgtgaagaggttcctactggtcaagtttgaacatcatattggataatacagcactggattgaaacatatcacacaggtttaaatacatgagtttgtagtgatactcaagaaaaaaaaatcagtcacttttgcaggatgctaggaaattaatgaattactttgaaaactggta

SEQ ID NO: 241919 - DNA, 443 bp, Homo sapiens
tctctttgttgattggttgtcagtccctctcactgagagtgagcgccacctcccatgcagcactgcacatgtgccggggactcttccggactgttggcaggtgttaccagtcttgcctcccttttcagagggagaggtcggggaattgcccaaggtcacccagctggtttggctgggctggctagtgacctccgcgcttgctgccctgtccactgcagagctccagcatgggagtccttccaggcacctgccgtggtgaatgttgaacttagagcaggggccaggaggaagccgctaactccctctgtgtgtttgcattagggttacagatgtcaggaatggctccaggggaggtgacagttcaggtgccttggaggctgagtaggagtccagctgggagatggaaggcagggcagcccaccaggggaacagcgtgtgcaaag

SEQ ID NO: 241920 - DNA, 557 bp, Homo sapiens
cagagtagaagtttcaactcctttccatggggactgtcaggagccctatgccatcaatgactccaaggttcccagtcaaacccaagagcacaagccatcgacccaaaatttgcagcttcagaaggatgagcttgacagacaaaatcccaagcgcattaacgcagtctcccatttgccttcgagaacacccctgatccagacaaaaaagagcacttcctccagcagcagtgagtttgaggatctgaatgcatatgcttcccaaagaaatttttacaagagaaacttaaaccgctactgccaggagcgctggccattccagccatgcctcactgggaggccctgagcattctagccggcggctgcacagctgctggggcatctccatgaggaagagggcggtggacaggagtcatgaagactaattcggaaactcccctgaaggaggagaagacatctgagccatccttgtgccaccaagcaagagtcactccagctcctaaaaagccaccatgggaagagctgcctccaattaaagttcttgattgcaccagaaaaag

SEQ ID NO: 241921 - DNA, 506 bp, Homo sapiens
actttgtacagaataggaaaaaatggcctaggcagaaggatctgctggccatgggaagctacagaagatttgggagaggggaggagtattatattaatgccttgggagaggctgacccaatgatacccccaccacagtcaatttccaataggcatctggaattcagattccggaacccatgcccctcattcctttgcctccaacagcagcccaccaaaacctgatcttgaagatcttctgtttatgctgcagggactgtcaggagccctatgccatcaatgactccaaggttcccagtcaaacccaagagcacaagccatcgacccaaagtaggtatcagataaggacactctgcatggcctctctaaacctcactttgctcactctctgcctgctgggatacccccaaactgccttcatcactatcactgagtgataattccaatttaaaatgaggtgggtgttggatggctaagtactcaaaccaataaacaagagagcttaaa

SEQ ID NO: 241922 - DNA, 591 bp, Homo sapiens
cactcacagctctgatttactctcatcaaagggtatggagccaagtcagccaaaaggaaaggtgcatggagtgaactcgggaaaccaggcatgcacttccagaggccacacctaattcctccagcagtggatcatggtgacgtgtgaaatgtcagccagggacactctgatcctagcctcagcgcccttggtttcatgggggcggccacaagagcaccttctctccaacatataccaaaatgccaggctcccagaaagaaggcctgtgcctgcacgaacagcctagatagatgcagcaagccactctaggcctgcacgaacagcctagatagatgcagcgagccactctatcaggaagtgataagaccccccccccaacacccaagttcccagccaaggaccaactgtgcacccaggcctgtctaaggacagcagtctgttgtggagcctgccaggttaactcttttctgcacagagaaagttcgggaatgagttgtgggttaaagagggtgaccagaaaaggcctccctgacgtgacattcaccaaagacctaaattgagagagggagcagcccagatcctttggaggaa

SEQ ID NO: 241923 - DNA, 446 bp, Homo sapiens
gaattaggtgggtttctttttgctgttaaggtctcatgtattttaaatgtatatttttattatgaatgacaaagcatcttttggtatgttttagcagtttccatttcttctgtgaacttcatcatctgttaccttttaaaaaattgaatatttcaaaatatatatttttttgagacaggatcttgctttgtcacccggttagagtgcgtaagtgcaattatagctcattgcagcctcaacctcccaggctcaagtcctcccgagtagctaggtctacaggcatgtgctatcgcacccagctaattttaaaacattttttgtagagacagctctcgctgtgttaccaggctggtctgaaactcctggcctaggtgatccccctgcctttgcctcccaaagtgctgggattacgggtgtaagccactgtgcctggcctcaaaatatta

SEQ ID NO: 241924 - DNA, 311 bp, Homo sapiens
atattcttgatgatagacatatggtcattcttcccatttctaatttactgcaaaaatatcatttatatgaatccagataatgactttttcttaaagaactacgtgtaaaatatggacaaataaactttgagtgaaggcctaaaaaatacctctaaattaaagtgggaaaatttaggatatagattttgtgacatcatatcacttctgcctattaatcccttatttatatctttgtccttgtttgaaatccctcattgatacaactaacactgtagctatctaaaaatttagctctcttgctaactcccttc

SEQ ID NO: 241925 - DNA, 567 bp, Homo sapiens
ctcgagggctctcactggatttgatggcagaggctgtttctttatccttggctgaacgcccagttgctactttccttaagcttcccctctgagaagaggaggatggtttggtcccaattggctgactgctgagggaagcccctgatgaaaatccttcatctgcatcattcaggtttacagactcctctcctccatttacaccctcagcacctaagaaaacaaatcagacagactcagcaatagctaaattaaataagaagcagctgtgaataacaacactgaccttatctcttgggcaatgttcgctataggttgtcaatggccctactatcaacacttcccctaaataatttaggggaaatcttaatctacacagaattctactatgctaatagatgttagtttagctttatttagtccagtttttgtacaactatccacaaacatatctagtatactgtcaatatttaggcatgtaaaacgactaggtaaaatacaacagtttgttaacataaatttttataatacactatcattcttcttctgaaatgaccatatctacctact

SEQ ID NO: 241926 - DNA, 495 bp, Homo sapiens
tgctgaaccatttgaaaggaaattgtagcggacattctgacgtgtttcttcaaacacttcaggccacgtcaactaaggacagtctgatacaaccacagtagcattatcacatctaagaaaattaacaataattcaatattcagaatagggcaggaagatcaaaacctgaacccatgccaggtgctgagagcagatgaggggcatcagagggtgggcgcccgagccgaggggtgtcgggcgcatccgctgcccagcggaagcggcggcctgagtggagtcaccgtgcaatgggtgggtgtggctttgtgagccaagccccaggagaaccagaacccaccttttcctcagtgccctgaccagctgtcccgcagctgtggcttaaatgccaacttccagttcgtaaatttcttcaattattcctccccaaattatttacatatgtatatgtatttaaatcaggatttaatcaaagttctcacgctgcatttagctgtt

SEQ ID NO: 241927 - DNA, 775 bp, Homo sapiens
aaatttcttcaaacaaagaacagcctgaaaatcaaactgcaggccccagataagaaagagcccatgccttgaatagaaatgttcactttgtgaacccagatgaacaaattccattcctttttggacaaatttctctctcctgggcaggccttagtatcttacttttcacctattttacatatgcttacatttctgtaactggctgtaggctaagtctacatttacatagggtgaatcatcacttcagttgctgattgttcccaggacaagattctgggccaagccttcacctctgtctccaattggtcctttacgctctcatacctctttctaagtgctgctttctcgaatagagtctgcagcccagtcagcacattcctccccttcccagtccatcaaaaccccagactcagcttcatacttggctatcctctttcaggcctaccctccactgtggagagctttcttcttttgcttattaaactttcactccagcctcaccatttgtgtccacatgccttaattttcttggccgtaagataaagaattttggatgatacctgaaacaatgagaccactacactgtggcgcattggtgagactgtaacaaaacaaaatatattctcaaaccacaatagaactaaactagacatcaataacaaaggtagatggagattcctaaaatatccgaaaataaaataatactctcttgaaaaacacatgggccaaagaaaaagtgtaatgaagaaaatgttttaaatatttgaattaaatg

SEQ ID NO: 241928 - DNA, 800 bp, Homo sapiens
tcaaaaaaaaaaaaaaaaaaaaaaaaaaaaatctgcgagcatctgtgagaacaccataaattctaaggcagaaggaaaatgtcacctctttgacattgttaacgtgcaccattttgattcttaatatagcagaacattttcccacatatttatattctcttgtcagttggtcttgtcttttggtcatttgtcaaatgaagtcttacattttattgccaatttatgtgaatttgtttaatcaacatattaccctcttttaaaaaatttttttgagacagggtctccactcttgcccatgctggagtacagtggcatgatcacagctcactgcagcctcgacctcctgggctcaagcgatcctcccacctcagcctcccaagtagctggatacaggcacatgccaccatgcctagcaaatttaaaatttttttgtagacatgtgttcttactatgctgcccagtcttgtaatcaacaaattagcctcttgccatatatactacaaatatattccctagcctgttgtctttttttttagtaatgtttctttttttgacttaaattttttattgttgagtctcttgatctcttctacttcaatatcagcatttttccttagaaattttttattctctactttcagaggcttgataaatattcaattctaattatgtgtgtgtatttgaatatagtcaggcatttttgtgatgttttagtgaattttaacatatgtataaaaagtgctcaaatcataagtctacagctcgttgaatgtttatgaactgagagtcttttttttttt

SEQ ID NO: 241929 - DNA, 1050 bp, Homo sapiens
ctttatctccgccggactcggggtacctgccggattcgaggtaaccgccagctggtgtggggctggtttccccaacatctggtggccaacgcggggctccccataatctctacaaataatccagtgaaggaacgccagagcgtgcaaagtggaggacgactgacaaaggacacctgaatatgttttcacttcaagctctacaggaggacaaggactcaggggtctgctggtccatctctgcaccttgaaacagcagctggggcaccagaagtaacccttacagccaacaccatgtgatgatgaggaggagtccatctgggttaaagagcccacgtgtgagccaaggcaggaaaccccgggatccagaaagccttctgtttttgcgatgctgcctgggatcggagccgcacaacctgtcctcattgctctctccggaggccgggcaggaacctctgccaaagcttctacctcagccgctggcaggccatgcggcctggggcattcacggagttccaacgagtctgttactggctggggagtgctggggccagggcatggccgtgcccgctgatcctcctcctgcctctccatatcggacttctcctcgaccaccacctggaccactgccacgatatcgtccacagcagcaccttctcctccccctagggcgcctccacgctctgtgccctggctgtcctctccagcagagcctccaatttgaacggggtacactgtccgctccacgtctgtggtcatggatgaagctggaaaccatcatactaagcaaactatcacaaggacagaaaaccaaacaccgcatgttctcactgataagtgagagttgaacaatgagaacacatggacacagggcagggaacatcacccaccgaggccggtcgcgggggtggggggttgagggagggatagcatttggagaaatacctaatgtaaatgacgagttgataggggcagcaaacaaacatggaacatgtatccctatgttacaaacctgcacgttgtgtacatgtaccctagaacttacaggataat

SEQ ID NO: 241930 - DNA, 415 bp, Homo sapiens
cattgagaaagtaggtggaaagggtgcgtttgcggctctgggcttgccgcacttcctttttttctcggcgtccttgcagccctgaccccgtccagtcatctgccccctctcccactgggcaggaccatcatgttggccaacccacctcccccagacctgccaccctgtggccactgggctccttcccttcctctctccagacacctgtctcgaggacccgggttgtaaaatcaagtgtctgggagggccagcccgcagggaaaatgagcggggctgcagtggacagctgagaggaggggacactggtcgactggatggcacatgcttcgtctgaaggggcgagtccccacgccacacattctgtgcacccagaatgacaagatcttttttttcccaaagaaaagccactaatctg

SEQ ID NO: 241931 - DNA, 541 bp, Homo sapiens
  misc_feature (410)..(410): n is a, c, g, or t
  misc_feature (458)..(458): n is a, c, g, or t
aatgctctcagaaagcaggacgtggaaacggtcatcacagaccaacagaacggaaggctaagtttgtccttttaaggaacaaagaggaaagtgtaattggataaaagtacaaatgcattaggaagatactatgatcatggtctattatgtaacatggatattataatattataatatataaggcaaaaactatatataaatatataaggcaaaattcttaaatttataaggcaaaatggaaattcaagaagaaactggcaaagtcacagccattgctgaagtctttgcagatttctctcagaaattaaagcaatcaagaagcacaaggaagccaggctggtcttgaactcttgacctcgtgatccgtctgcctcggcctcccagagtgctgggattacaggtgtgagccnccgcgcccagccttcattattcttttgacatttgatgataaatactgnttatgattttctttctctttttttttttggtagagacagtctgggcaacatggcgaaaccccatctctactaaaaatacaaga

SEQ ID NO: 241932 - DNA, 407 bp, Homo sapiens
tgcagtcagatagtgatcactggaagtcatagtcaattacatctctggtgtctgggatgggaaaccagacagctgagggctggagcagataggagtcctctggctctccctcacctccacgtagcctctctacagtgcccacagcatggctgcttcagggtgtacaggcctgtacatggaagtcagggctacctagacatgtgtcccaagggaaggagggggccaggcagaggctgtattgtcattgtcccagccctagaaagcaggcaacatcatcttctaatcattgtattcactggggcagagacagagaccctccccgattccagattctggaagagcatgtggcgctgaaaatattattgaagccagctttggaaaatacaatctcttacaaatcctttaaa

SEQ ID NO: 241933 - DNA, 1006 bp, Homo sapiens
agtagagagagcatttcgctatgttgcccagtctggtctcgaactcttgggctcaagcaatcctcccaccttggcttcccaaaatgctgggattacaggcatggtggcatgcacctgtggtcccagctacttgggaggctgaagcaggagaatcatttgaacccggcaggcagaggttgcagtaagtcaagatcacaccactgcattccagcctgggtgacagactgagactctctcaaaaaaacaagagtgaagtgggaaaccagttaggtgggcattgtggtcatccaggcaagagatgaaggtagcttgaccggggtggagacaatgaagatacagatttttgagacttgctatcacatctctcaatatcttctcttccacaaaataaacagttcagtgttcctctcatctcctctcataacaggtttggtgtctcttctcacctgggtgtttctcctcctgtttctcctccatctgattcctctgtaaagaactcagtctttccctcagctgtttcttcctatcctgtgccttgcttgtagttctagggaattaaaatcttcaattcaatgactatcgttctcatataaagaggggagctgggtgcagtggtgcatgcctgtagtcccaactactctggaggctgaggtgggagaatcatttgagcccgagagtttaagaccagcctgggcaacatagtgagacattgtctcaaaaaaaaaaaaaaaaaaaaaaagttggggggtagcaccagtcttccctgtcattagtcaattaccagtctttcaattattcaaccatgaccctcgaatacctattgtgccaattgtgcttggaggagacagagaagaagacatgatctctgccctccaagagctcagggtataatgggaaagataaggcccaaataaatataataaaagctagaaaaacagatcacaaagaaagtgagataaagggctttgggaggaagaaagaacttttagcttttgggtaggtgaaa

SEQ ID NO: 241934 - DNA, 790 bp, Homo sapiens
agtagagagagcatttcgctatgttgcccagtctggtctcgaactcttgggctcaagcaatcctcccaccttggcttcccaaaatgctgggattacaggcatggtggcatgcacctgtggtcccagctacttgggaggctgaagcaggagaatcatttgaacccggcaggcagaggttgcagtaagtcaagatcacaccactgcattccagcctgggtgacagactgagactctctcaaaaaaacaaaaaaaaaagatcacagatcatgctgggtgatgtgtggactggaagggaacaagagtgaagtgggaaaccagttaggtgggcattgtggtcatccaggcaagagatgaaggtagcttgaccggggtggagacaatgaagatacagatttttgagacttgctatcacatctctcaatatcttctcttccacaaaataaacagttcagtgttcctctcatctcctctcataacaggtttggtgtctcttctcacctgggtgtttctcctcctgtttctcctccatctgattcctctgtaaagaactcagtctttccctcagctgtttcttcctatcctgtgccttgcttgtagttctagggaattaaaatcttcaattcaatgactatcgttctcatataaagaggggagctgggtgcagtggtgcatgcctgtagtcccaactactctggagcattcaggtcgatacccatgcatccttagggcacggactgtagttcaagaacgcgatgtgtctgtcagacccagagatgttccctgatctcaa

SEQ ID NO: 241935 - DNA, 487 bp, Homo sapiens
catccagatcagggagattgatagagaaaaagcagccctgaagagatttttggtaaagcttcacaagacaactggctattttcctcaaaagccattgtggtgactgatgctgtgccaccataggggacgagttcatctgaaacatccaatacagacagaacacacctgggtctccttctgtatctctctgtgacccaagaaagcagtagaagtggctactgggacaagccaaaaaagaaaaaaaaggactagataattgaggacacaaatggactgcctctaaaataataaacaaaacctcctacaaaagagagaataatgcgctgatttttttcccagctgattctatttctttacaacttgaggtggtaatatgcagtgcacgtgttattttcttacagattctcctggaggcaagaataaagctgagctattttagagatctttcagatactgatcatgaaatacatattatatttgccttaat

SEQ ID NO: 241936 - DNA, 403 bp, Homo sapiens
ttttttttgagatggagtctcactctgtcacccaggctggagtgcgatggcgtgatctcggctcactgcaacctccgtcccccgggttcaagcaactgtcctgcctcagcctcctgagtagttgggatcacaggcgcctgccaccatgcccggctaattttttgtatttttagtagagatggcgttttgccatgttggccaggctggtctcaaactctggacctcaagtgatctgtctgcctcggcctcccaaagtgctgggattacaggcatgagccgccgcatccggccctccattcctcaattttttagaagtagatagatgctacataatatgtacaactcatttgagagaaaaagcataaccttgtatgatgaaagcaaatgtcgacgcggccgcgaa

SEQ ID NO: 241937 - DNA, 623 bp, Homo sapiens
gttgccatctccattgctagtttattcccacttttggaccactctttttttttgagatggagtcttgctctgttgcccaggctggagtgtagtggcacaatctcagctcactgtaaccgctgcttcccgggttcgagcgattctcctgcctcagcctcccgagcagctgggattacaggtgcgtaccaccacgcctggctaattttatgaattttcattgtggtggccctggcaggatgtgcaacagggcgatctcggctcaccaaaaccaagcaatccactcggcttggcctcccaaagtgctgagattacaggcatgagccaccgcgtgcagccttggaccactcttaaaacataaattatagctctgatcatgtcattcttctatttaaaatctgtcaattaattccatagtccaccaaataaagattaccttagtcatcacgttattcaaggctccctaagatcagtgactctagcattacctatgatttccctttatggtttccaaactcaagtacacatccctccttagcaacttacatcttactctcccagctctctgccttgttcatattgcaagccaacatattcacctccttgcattacctaattcatctctt

SEQ ID NO: 241938 - DNA, 319 bp, Homo sapiens
actgggtctcagaagaggcttgggccccattgtcatggaattctgctaacattagactaggccagttaaggcaaaatcattccttttatgagtgtgtgtcgagtactaacactggtcctggtttatattagccagtcagtaaaaaggaaggaaattctcacatgtgctacaaaatgcatgaaccttgaggccgttatactctatcagtggagaaatggtcacacaggtcctagtacagttagactgtggaatactatacagtggtaaaaaaaacccagggtggagcttattgggatgaaaaacatactgcaggccaaaa

SEQ ID NO: 241939 - DNA, 353 bp, Homo sapiens
atacttatgtttatctgacagaagaaatgttatgatcacgaaggtggtttttccagagcaaggcttagcaattttgctgtggatgtgctgacccctgtgatttccccgaatgtgggaatctccattacataacttgtggcagtggggaactgtgtctgtgttttcccctgggttgttgtcgttctaaaagtggattttgtttgctgtggaagcatatataaggcgttagtataaactaataaacaggtctttgttcccatctgtaacttactttcaaagtaaagattttgccaggtagtggttggttctcacgcttgtaatctcagtagtctgtgagatgcattgataacttt

SEQ ID NO: 241940 - DNA, 446 bp, Homo sapiens
atcaaaggtgttaatggggttgtcatgatgggcatccatggacaagcagacctagactccaaccttattgaggtcaagattgtctaaaacgtgtttcctcaactcctccagacatcatttcaaaaatctctctggatcttcatttccgttcattcaatcttgtcttggaggaatggatgtttttccccctgtgaagatgaatccctctatgtacttctcattcgatccttccttatcaccacattaccttgtctctcctgcccttttacatctccattgttggctcattgggcataagaacatgttcagaaaactacacacaagaatgtggataaaccttcaaaatgttgagcaaaagaagcaagacacaaatatacatatggtataactccatttacaaaaaggtaaaagccaggcaaaagtaaactatagtgtttagagataca

SEQ ID NO: 241941 - DNA, 324 bp, Homo sapiens
gtcttctcaagggctccagcagcaaacctgcctgcagacactaccagacagccaacctaaaatctctggaccagtagtccagtgaagggctttccctaccaaacccagtctgtaaagactgtcataggtacctgcttttcaaatgcacagaaaccaatacatgaccacaaggattacaaataacccaagaaatatgacaccatcaaagaaataagagaccataaagaaatgaaaagttatgagctccctgacaaagggttcaaaataatcgtcctaatgaagctcagcgagctcaagagaacatagacaactaagtgaaatcag

SEQ ID NO: 241942 - DNA, 637 bp, Homo sapiens
aaaatttattttttttaaagtgtggcccaatatacataataaaatttaccatgttaaccattatgaagtatacagtacagtgacattatgtatattcatccttgttctgctctcatcacaccatccacctctggaactcttttcgtcttgcagaagttctgtacgcattaaatactaactctcatcgcctcttacccaaccctctggaaaccaccattctactttttgtctctatgaatttgtttatttattcatttattttgagatggagtctcgctctgtctcccaggctggagtgcagtggtgtgatctccactcactgcagcctccacctccagggttcaagctatccttccgagtagtagctgggattacaggcatgcactaccacacccggctaatttttgtattgttaatagagacggggtttctccatgttggccaggttgatctcaaactcccaacctcaggtgatcctcccgccttggcctcccaaagtgctataatccaaagggattataggcatgagccagcacgcctagcctgtatttgactactctacatatctcatataagtggattcatagaacatttgctcttttgtgactgatttatttcacttaacatggtctcaaag

SEQ ID NO: 241943 - DNA, 463 bp, Homo sapiens
gttatgcttcattagacccatacctcatcctgtaccgactccacgtgctataaatattatcttagatattaatcaaatgcaaagtgtgatagaaagaaagtggccattagatttagacagatctcaattcaaatcccaaactctctgcttactaccatggtcaaattgaataatccctttgcatgtgtgttttatcattagcaaagtgctgattagtgctggaacaagaaaagtacaagatgcaattggaccatgaacaagaagctactaacttctttagagaaagcattctcacaggtaacttcagagaaagcattcccacagaaatgatgtttaagcaaattcaagaaggatgagtagaggttaactaggaaaaattggaaggaacagtgttcccagcacaggcaatagcttacacaaaggtccggcacctttcacaggctgaaaaattacatggtttaag

SEQ ID NO: 241944 - DNA, 442 bp, Homo sapiens
aacatctagcatggtctctagcatgcagaacatgctccaaatttgagagctaagtttgtttatcatttgttagcatccctcctctccattccttgctcttcacaagccccagcccaaaatatcacttggagttcagtagaagtgagcaatggataagatttagaagcatagttagaatggatccagaaaaaaataaatgttcctttttccttcttttccccttcctagatccccaccataagcatacatttcttgtattagtctgttctcatgctgctaataaagacatacctgagactgggtaatttataaaggaaagaggtccaactgactcacagttccacatggctggggaggcctcacaataatggcagaaggtggatgaggagcagtcacgtcttacatggcagcaggcaagagagaacttgtgtaggggaactct

SEQ ID NO: 241945 - DNA, 575 bp, Homo sapiens
ggaggcagaagaagaaaggcaggagagaagaaaggaaggaagaaaaggataagtcaagcaaagatattgaggagcaattcattcatccatctgtctatctatccatccattccttccttcgacaaatatctgctgagttcctatcaagcaccattcttggcactaaggatataacagttaacaagcggaagctaccagcagctgaccctcaacatttccaggtgactttggtgtgtgcatatgtgagtgtgtgtgtacacgtgggtgcaagccctctgtctgcacaggcctgttgccagggcacctgtcttccctagggtctggtgcttttagcctctggctccagctcctattgcagcccgaaataaggctgtgacccatggcaaggcaggaatgattctcatcagctgaagccagagctggctgcaggggacaccctgctcgctgcctactgactgctgaccgctgactgcctacagggacgccacgcaactctcagcttcccgacagaggtgttaatcttgagggtctaagattccctcctgcctattgtggtcccatcctctcaggtacca

SEQ ID NO: 241946 - DNA, 379 bp, Homo sapiens
cccatcccctaggtctggcattcatcagcattcacacatctgcagaaggggtatgagggagaaatgacttcattaattattgtgtcaccaagtttttcttctcttgattcctaagaagaagaaacagagattacatgtgtttacttaagggtaagcactaactgaatgcttactgagtggctagatgaatatctaaaaaaaaaaatggtttctgtaggcgttggattctgctcaatgcttatgcccacccagaatgctctataaaaccttcactgttgttctcaggatcagccttcctgaattcatcctataaacttttaatgagtgacctgtttgtaaaactcccttccagattggcaaatacaagttgatagagaac

SEQ ID NO: 241947 - DNA, 266 bp, Homo sapiens
ttcacaggcaggtggatcaagcctccctttgaagtatcttcgtacagaaaagtcagccctttgcagactcaagaagggcccagtgcctaagtcttctctgcattcacatcaatgaatcacattctttaatcgtttatgaaggggcacagggggccatgaaaataacaagacctaaggtttgactgactccggatatctggctggaggagctgaacggaccaggagacaggcttcttgtgggggtgggcatcttggataaagtaagt

SEQ ID NO: 241948 - DNA, 443 bp, Homo sapiens
cttatttattaagggatcttttgtagagctaacttaaaagttgctcatctaaataagctatttgccatacataaaacctagtataagagtggaggtaatatcaggtctgtgaacaaacaggctaatgatatttattttatctcttgtgtagtatacataatatgtggttgcaaaaacctggcagtgttttagggataatgacctgactgctttatgagtttccgtatctctgggactgctaggaaaaactgtctttttatgttattctgtaataatgaaaaagtaataaataattaagattgattcttatcatgcttttttttaataagactttattatcctcccttctcagttggtggtagtttgattacacaggaattctatattgtgttttttaaatctgaggatagagtgctgactttaaatgtattatggattctttg

SEQ ID NO: 241949 - DNA, 414 bp, Homo sapiens
aatcccagaagagagagagagagaaaggagcagaaagactatttgaagaaatagtagcccaaaacttcccaaattttatgaaaacattaatcttcgtatccaagaaattgaacaaactccaagtagggtaaactcaaagggattcacatttagatgcatcatggtcaaattgttgaaaaagagatctcaaacgaaagaagcaagtaaagctaagaagtgacttctcttaagaaacaatgcaggcctgaaagcagtgagatgacatattcaaagtgctgaatgaaaaagactatcaaccaagaattatttttgcagtggtgcaatcatagctcactgtagcttcaaactcctgggctcaagcaattctctttcctcagcctctcaaataggactaccagcatgtgccaccacact

SEQ ID NO: 241950 - DNA, 732 bp, Homo sapiens
ggcagcacatgtgacctaatctatattttgacaaagaagaaagctccctgccctcccttgcaccagttcgtttggtaatttttaatcccaaaagccactgctaatacgtttttaaaaattgatgctagctattacgttgttagataaagctcatcttccaactctaaacttgctctttctaaaagtgaaataacactcaggttgcaaacatagtgaactggaatttcagaggcttgaactgacctacaaaacttgtaactgtagctctagttatacatccactgtggtcttggacatgtgaggtgtttgtctaccctcaggagttttagaagaagaaattttatggaattgctttccatattaagaaattagaatagccaggtgctattttaattttacagattcacaactgtaatcccagcacttgggaggccgagcagggaggatagcttgagtccgggagtttgggtggagtggtcaacacagccgagaccccacatctacaaaaaatttaaacattagctggcatggtgactcatgcctatagtctcagctactcaggaggctgaggtgggaggatcgattgggcctgggacatcaaggctgccgtgagctgagattctgccactgggtgactgggcctgggacgtcaaggctgccgtgagctgagattgtgccactgggcgacagagcaagagtgtctcgaaggaaggaaggaaggaaaggaaggag

SEQ ID NO: 241951 - DNA, 544 bp, Homo sapiens
tgagaccctgtactatgaagataaatgaagaaaatgattgaaatgatctcccctaaaggaaacaattttaggtttagatattattactgtaagggaaaataaaatccccagactacactatactaaactcaccatctctacagaattcaaaagatatttataaggacagaaaacaccactacaagtacacactacatgaacacatgtcacattttaaaaatttcatatatgcatgttcaggatacaagaagataataaagtttacactttgccaatttctgcagacatatgatcagctctcattagagtgccgtcaaaatgagtactgtgaatagggaactcttaaaattgaattggctaaatgtagtcttaaaagctatagtcttaattggctcactcgctacttacctaagctgtatttatcagaaagttctataaataccatgtcctaaaatgtactaccagtgcagtgaatattgtggttgctttctattaaactctccatttctttgatttctctatgaccacagttggcatttactgt

SEQ ID NO: 241952 - DNA, 377 bp, Homo sapiens
agatgttctcaggcgtacgcttctaaagaaacattgtagactcttctactggcctttatctagtcactgctttaagcaaggaataaaacatctgtggctaaaatttgtaaaactgtgtttcccacccacccttcagacctgacagaagagtttttaggattttaagggaacagctttttcgtgacccaaaagggaacagtggtgcaaagaccaatgtcacgtaggtacattttccccatctgtaaaataactttccgatacgattcccacacctggaatcagtacaatgttttgactgaggtattagaaaaacttatgagttcattatcatttgaacatatgagtaatgtaaaatttaggcagaattttatttgaaa

SEQ ID NO: 241953 - DNA, 461 bp, Homo sapiens
tttgaggaaactcagaaaaattcaagataacacaaagaaggaattcagaattatgtcaaataaatttcacaaagagattgaaataaacaatcaagcagaaattctggagttgaaaactgcaattggcatactgatgaatgcatcagagtcttttaatagcagaactgatcaagcagaataaagaattggtgagcctgaagataggtttttgaaactacacagtcagaggagacaaaagaaaaaagaattaaaaaagaaataaagcagcttccatgttagctaggactacaggtatacatcatcgcacctggcttagatgtcctaccttttgtgggaaagcctcctaaaatagaattgctaggtagagatatatatatataatttttaaaatttataataggcattgaaatattgcttttgaaagaccacaataaataaaacaaacatctaagagcaatgaa

SEQ ID NO: 241954 - DNA, 459 bp, Homo sapiens
caaaaaggttgggaggaggggggagtgaggggagacaggtttgaaaaggtaagttggaagacattgaatgtggatgtgacaatgctaaattatccatcagtgtgtccactgagtgtttttggagtataggagttgtttttgacttgctgttttctctcctgtccttcataaccatttgtctacagtatagtacttctatgatcctcatctctttgttcatctgactgcagcctgctttactgtttggcctgcagcaatggttttcaaatctttttgactagatactgcattaagaaatatattttattttgtagcctggcatgcataaactcctaaactctctgcttctcagttgaaacaaaagtttaaaaaccagtatttaacatttctaagcaaaatgaattctgatctttttatttccattcctttctaattttcttcactcctctccattcctta

SEQ ID NO: 241955 - DNA, 157 bp, Homo sapiens
cataaccctcatatagcattgttatgtgtgtttgtgcatgtgtgtgtactcactggggtaagatgtttatggagacatattaagaactgagaaagggaaaaccccacttatttgagagtttgggaaaaagagaagcagggataagatgaaagagaaa

SEQ ID NO: 241956 - DNA, 387 bp, Homo sapiens
ctgaagttaggtcataaaaggcatgcggcttccttcttgtgtgtgagaacacccatcttgaagccctgagcctccatgcaagagtctgattacttgagaccactatgctgtgaggaagccccagccccgtggggagaccacacataggtgcttggtctacagttctagttgagcacagaccagtccagatgccagacatgtaagggaaaaagctgccagacaattgctgcctccagtattagcatccaagatgctatcagcttccgagtcctcccagctgaagccccagacatcatggatcagagagaagccatctccagggtgtcctgtcggaatccttgtcccattgagttcatgagcataataaaatagttgttgttttgtgcc

SEQ ID NO: 241957 - DNA, 298 bp, Homo sapiens
aggattagggccctttttaatcctattgcagtcaccactagtgcaatctccccagatctccctggaataccccaaatgacagaaaaaagtaaatgtgttcctccagcagcttcttgctataagtgcaaaactccagtaagtcttattttatcttgaaaaatccatgtgactcttatattctgttatagaattgtatttgttttaatgtaaacattttatgttaaattagttagcaattagttagcaaatgcaaatattttaaggatgtactgatgaacaaagaagcaatgatcccatc

SEQ ID NO: 241958 - DNA, 429 bp, Homo sapiens
gtaaaagagcctggcatgtgctcctggaatcaggaggaatcaggaacctgtcacatgtctgaaaatggctaaacaggaggaggctcggtgaagggacatgtggtggcagggtgaatagacttggtgtgatggttaattttccacgttaacttgactgggccacagagttcctagatacttggtcaaacattctgggtgtgtctgtgagaatgtttctggatgagtttaacatttgaactggtacactaagtaaagcagattgccctccctaatggatgggtgggctccacccaatcaatagaaggcctgaatagaacaaagagatggaccctcatgtgagtaagagggaattcctcttatgtaattgcctttgagctggaacatcaatttttttcctgctgtttgacatgaactgaaactttcctggtt

SEQ ID NO: 241959 - DNA, 487 bp, Homo sapiens
tactgattgtgtgagggaaggaaataacttgaacttcagactcattcggcaggtcctgattctctttcactatcagcctccccacctattctgagccgctccgaaacaaaacaaacaagacccaactcctgggcagaaagggaacagcagctgagctgagcagcacatgcttggagcgttcctgccatcgacttcggattatttctgctttcttgagacgcagccatcagcatgggactcgatgcagcccggagagcaccgcccgcgcagcgacgcgcacagaccctcccttggagacgcgctccccggcgcgtgcggccgagcccgcgtgaaatgcacagaccctccggtgaggctctgcccacgtgtgaccctgagcactgcgaagcccttcccttccatcctcgcgtggccacccaaagtcttgcctacacctcgtacgtgcagatgccaattccatagaaataaatgatgtaaggacagaaat

SEQ ID NO: 241960 - DNA, 535 bp, Homo sapiens
gagaaacccagcagttccacctcactgctgcacactgattccattacccagggcttctggaggtcttcattcatcaaggcctgtctgctctcactgagtgcgctactttaccccaatgttatcacagacaaccaggactatattaaacttgtcaaagtaagagtcttttagagggatggaacatcctgaacttttttttcaaatggagacattttcctgtttcttgagtgtgttaagagggacaggggtcccccacctttagtttttggccataacagaaaaaaaattttgataaagatcagatattattattaccatttaaatatttacctatgaaatttagtgagtggcaatgaaacttcttggcatttaatttttttgatgttctgccattgggaacttatctttgcaacactttttgttaagagatgtcatgattctgggttggaggaagataggaatatctaaaatgctatgtcatggttcaattgtacagaaaaaaataaggtaaacatgaaaagaaaatccatttgac

SEQ ID NO: 241961 - DNA, 258 bp, Homo sapiens
tgcatccccggcctctattacccatgtttgagaatcactgttctagattgataccaatacaacaatttgttaacagctgttgtattgtggcatcactagaaatttcaaagtctaggtgcagtggctcatgcctgtaatcccagcactttgggagactgaggtgggaggatcacttgagcccaggagtttgaggctgcagtgagctatgatggcaccactgcacttcagcctgggagacagagcaatatcccatcttta

SEQ ID NO: 241962 - DNA, 449 bp, Homo sapiens
actgcagtgtgcttctttctggaaatgccttctggagatggaaagaggtgaccttcaatccagctccctacagaaaactgcctgctctgctgtgaggcagttagactcaaagtccttggctaagagcttccagggagccaagcagatggcagctccgtcaactgcagctgcaaacagcttcatcttcggtttatttccaggaaccagaggagctcggggatggctaacagctgtctacctgtagggactcaaatgatctctgggccatcaaaccatcatatactaaatagtgacttagcaatttatccaaatgcttcctggtggcctgaaagagctatccaaaacttccttgatattcccaaagagggactttcgctggttcaaaatagagtaaatatactctttattgaagatctttcacaaatgaaaagattctacaaaccatgact

SEQ ID NO: 241963 - DNA, 391 bp, Homo sapiens
acatacatgttgtacctcccatcattgaggtggaatctatttcccctcttctcgcatctgtgttgagtttttgacttattttgaccaagagaatgtggcggaaataacattgtgctagttccaggtctagatcttaagaaaccaggttgcctcagtttttgctttcttggcatcacgcttccctgtagaggtttagtaagacttctgaataatggaagaccacttgtcggagagagtctcagccactcctgaagctcttccaactactctatctgaagtgccagacttgtaagtgaagacatctcaaatcctctagtcccagttaagccatccaggacaatagcatgcagagcagagaaaagctgttcccctaaagccctacccaaattgc

SEQ ID NO: 241964 - DNA, 468 bp, Homo sapiens
agctcatatagatgcttaaactgatttaaaaattttaagcacatctatattttattttattagctatgtttaaaaaatgatctttggagtttctacacatattcgctaatgtctttttctcccaaaaccttttaaagacaaataatgcaaactagggttcataaactaagttgcctttagagaccacagtatgatgtaatgagaaagatgttgccataggctgtggtaagtactaggcataatagtcatggcatgcttcaccaagtcattccatttgaaagaaaaatttaaaatatctgcagccagtcaaaatactctcgtggattgcattcgttctgatggtgagtagcttgtgatcctcggacaaaactttctgaagctattatctcattagccttattttttatacaatatatttctagttttattactttaagattaaaacatcatttttgcccctttttggaa

SEQ ID NO: 241965 - DNA, 549 bp, Homo sapiens
attcattgtgtaccatcagcgcttaaatagtatgtctcaaaggactttctttaaaaggccagattcacccctggagtggagctgggcctgaggttaccagatgtctctgcaagtcatctgaatttatcatcttccctagttcagccatctggctcacatgctgggcagagactcattggctccttgccagaggtcgtgtgacttgaatacccatatcttaaacaagtctagaatatgaaagagggagaggagaagaattgatagaaagttagtcttcacccttagaattctgtactttcaaattttatttcagagatttgcatatcattgatttagggcagcattttacacttaattcatcttgattatttaaactacaaaacaaggatagaaacttaagacattttatcttgactgtatgaaatatataggaaaatatgagggatggagaggaggcgccttcttttgttttgtctttttcgataatttccctccataagccagttggcttatctttggcaaattaaagagattaagctagttaacaaa

SEQ ID NO: 241966 - DNA, 387 bp, Homo sapiens
aaaaacttcgtgggagtgtactgtggaaaatagtgtacttaattaattctcattgtaatcaggctaccaagagccttgtgttgctttaagagttataactgccaggcacagtggctcatgcctataatcccagcaccttgagaggccgaggcaggtggatcacctgagatcgggagtttgagaccagccgggccaatatggtgaaacaagctgtgtctctactaaatacaaaaaattagccgggcgtggtggcacatgcctgtaatcccagctgcttgggagactgagacaggagaattgcttgaacctggaaggcggaggttgcagtgagctgagattgcaacattgtactccagcctgggcaacaagagggaaactccatctcaa

SEQ ID NO: 241967 - DNA, 430 bp, Homo sapiens
actctctcaaaaaaaaaaaaaaaaaaaagagtgttaaaccatatgtccacagacggggagagggcagtgcttgtttcctagccactctgaaaggctgaaagctgttaaggaggcttagtgtcatttcaagcagtcttccttgcctctgtgagtagtttttccatatttatgcttaaaacaaacagaggaagcttttcattccaataatgaaataaaaggctaaattcaaggtaacaaacgttttagtgggaaagattgtcaaggataacaaaccaacaaagggaaatatctcttattagctcttttcttcttttgattagagaaaaaagccaaagaactacttttggggctttaagtggctagtggactaccccagaggacacaaagaaagagggttctcagtgtttctagggcacttcctgttttcttt

SEQ ID NO: 241968 - DNA, 912 bp, Homo sapiens
aactggactgttccctcacaccagacagaaagaaaaattaacttaaatcacagatccaaatctaagacttaaaactataaacctcatagaagaaaacaggaaaaatttttcgtggtttttgggttaggtaatggtttctcagttaggacactaaaactacaaacaaggaaaaataggttatttgaacttcatcaaaattaaaaactttagtgcctcagagggcatcatcagtaaaatgacatgacaatttaaagaatggaagaaaatatttccaaattgtatattgataagagacttgtatctaggatatatgaagaactcttacaactcaataataaaaagacaaataatctaattgaaaattggcaaagatctgaatagacatttctcaggagaagatatgcaaacagccaataagcaaatgaaaagttgcccaacatctttagtcattagggaaatgcaaataaaaaatccaaagaaattgaaatcagtgtgttaaagagatacctgcattccagtattcattgaagcattgttcacaataagcaagatatggaagcaatgtaagtgttcatcagtgaatacatggatagagatcatgtggtatatatgaatatatacaacagaatactattcagcctttaaaaagaagaaacttctgtcatttggaacaacatgggaagacctggaggacagcatgctaagtgaataaacatgttctcacttatatatggattctagaaaagtcaaactcatagaagtagagaggagaacagtgattaccagaggctggtggtggggtgtggacgggtaggaatgaggaaagcggagatgttggtcaaaggatacagtttcagtttgacaggaggaataaattttaatggtctttcgtacagcagggtgactatattt

SEQ ID NO: 241969 - DNA, 445 bp, Homo sapiens
tgtgaaaataaatgaccaaagaaagacaagacactaataaaaaagaggagcagagccagaagactgtcttctagtcatcagggtttatgaggctatggaaatgaaaccagtgtggtattagcagtaggcagagataaattggccaatgggatagaatggagagtccagaggcagacccatgggaactttgatgtacaacagaggggatgatgtgccttgtcagctggggaagagagaccaccattcagtaaatggagctggagaaaatccatttgaaaaaagattaaactgggtctttaatgcctcatgccacattaaaaaaaaaagtcaactctaggtggtttaaagacttacatatccaaaccaaaatcttaaaaccctttaaaaaaaagttggagaccttaagataaggaaggccaataagacagtgaaaggcatccactag

SEQ ID NO: 241970 - DNA, 259 bp, Homo sapiens
taatatggtgaaaccccatctctactaaaagtacaaaaaattagccgggcatggtggcaggcacctgtaatcccaactactcgggaggctgaggcagggattgcagtgagccgagatcgtgccattgagccactgcgctccagcctggacaacagagagactccatctcaaaaagaaaaagaaaaagaaaaagaaaaaaagatatagtctacgtcaaagaatttctcctccaaacaaaaaccaatgaatataagtatat

SEQ ID NO: 241971 - DNA, 1118 bp, Homo sapiens
tttattattattatattttaagttttagggtacatgtgcacaacgtgcaggtttgttacatatgtatacatgtgccatgttggtgtgctgcacccattaactcgtcatttagcattagatatatctcctaatgctatccctcccctctcccacgaccccacaacagtccccagtgtgtgatgttccccttcctgtgagttcttaaagtagaagaggaaggcagaagaatgagctagagagaacgaactcaagaagaaagaggagagagttcaaacatgagaagggcttgacctggtgttgctggccttaaggatggagaaatggggccataaaccaaggaagatgtcatcttccagaagctgggaatgggcctcagttaacagacagtaggggaatgaggaccttggtcctataggtaaaaggaactgaattctgccaacatagcaaataaacaaggaaacagattcttcctcagagcctcctgaaaccttgactttagcctagagaaacctgtgtcagacttttgacctagagaaatgttaaataaatttgtattgtttacatcactaagtttgtgataatttttaagtcagcaagagaaaacttctctacattttcaacttataaagttgtatacagtagtctcttacagcaacttatccttcttctgtatcttcagttctttcataattcttattttgaatgtgttagtatttttctctcatttattcttgatcggacttactgaatgttggattacttcactgtttttaaagaactaccttttggtttcactcatgtaatctgttttattatgtgctgttcatcttttcttttatctttattcatacctttacttactttagttgtattctgatgttcactttctatcttcctgagttgtatgtttagatattttacagtctttcttgttttctaataatttcttttcttctgagtggccttttatctctgtctttcagggttttggtaattggcactatcattatcatgaacttctacactggtaatttttaaacatttccttattagttcaacagttctttagaagaatgattttacctttacaagtgatgggatatgtgtgtgtataaaat

SEQ ID NO: 241972 - DNA, 1065 bp, Homo sapiens
tttattattattatattttaagttttagggtacatgtgcacaacgtgcaggtttgttacatatgtatacatgtgccatgttggtgtgctgcacccattaactcgtcatttagcattagatatatctcctaatgctatccctcccctctcccacgaccccacaacagtccccagtgtgtgatgttccccttcctgtgagttcttaaagtagaagaggaaggcagaagaatgagctagagagaacgaactcaagaagaaagaggagagagttcaaacatgagaagggcttgacctggtgttgctggccttaaggatggagaaatggggccataaaccaaggaagatgtcatcttccagaagctgggaatgggcctcagttaacagacagtaggggaatgaggaccttggtcctataggtaaaaggaactgaattctgccaacatagcaaataaacaaggaaacagattacttttgacctagagaaatgttaaataaatttgtattgtttacatcactaagtttgtgataatttttaagtcagcaagagaaaacttctctacattttcaacttataaagttgtatacagtagtctcttacagcaacttatccttcttctgtatcttcagttctttcataattcttattttgaatgtgttagtatttttctctcatttattcttgatcggacttactgaatgttggattacttcactgtttttaaagaactaccttttggtttcactcatgtaatctgttttattatgtgctgttcatcttttcttttatctttattcatacctttacttactttagttgtattctgatgttcactttctatcttcctgagttgtatgtttagatattttacagtctttcttgttttctaataatttcttttcttctgagtggccttttatctctgtctttcagggttttggtaattggcactatcattatcatgaacttctacactggtaatttttaaacatttccttattagttcaacagttctttagaagaatgattttacctttacaagtgatgggatatgtgtgtgtataaaat

SEQ ID NO: 241973 - DNA, 190 bp, Homo sapiens
agtgcacaagctcggcccttctgggtacaaatcacaattagatggacagttaacttcagacacttatatgattaagtaattgtgtgttcttttatgttcttagctaatgttaatgttttcccttagggtttctgccctgtggtgatttcacttcttttccccccaaaggtttgataaataacagctaaaa

SEQ ID NO: 241974 - DNA, 399 bp, Homo sapiens
tcccacatggactgtgggtttggccatgagacttactttggttgatggaatgtgagtaaagagaatgatgcatgcagagactccataaactcctgtgcattagggcttgtgctcttggaatgtttctgcatcatgaacagctgccaatctagtctactagaggctaatgaggggctgcatggagcacagcccccattactgaacccagccccccaccccacctaccagttgaatttggctgtaagagtgaacccagtcaacccatagaattgtgataaataataaaatgccattgttttaagtcactaaattttagtggggcttgttgtgcagcagtaagtaatgaccacactttgtcaaacccgagcatctctttctgtctgtggctcctcaaaagga

SEQ ID NO: 241975 - DNA, 316 bp, Homo sapiens
tattttttctttttaattagatcttccaaggaacttcacaaacttctgtgtttataagaaataactggagttactttttcaacatacaggttcctgagccccactcagaccactgaattagtgtttggggatgggcataagcatcttctttttttaaccccttgtagagatggagatctcactatactgcccaggctggtcttgaacttctgacctcaagagatcctcatgccagcactttgggaggccgaggcgggtgggtcaggaggtcaggagatagagaccacggtgaaatcccgtctctactaaaaataca

SEQ ID NO: 241976 - DNA, 980 bp, Homo sapiens
taagttacaaaatagtgttaatggtttattggtaaaaatccaaactctagagtttatggaattcgtagtttggttggtatattaacactccatcttaatctttgctgctattacaaagaatgaggaaagctagaaatatctataaaaataaaataccttaaaaccgacaagcaaaatataaaagttgcatacaaattgccaataaatataaacatcacaatagaaaaattaatcttaacaaaaataaactcataattgctattaagacattataaaaacaaaaaagtttaatgtgcatgtatatttgcaaacagacacagtacactccaaacaatataattttactatcattattatataatgcagcatacaaggttactgaggtgtggtattttttgttgttgttgttgtttgcttttagtcttcttttctggaagaatgctcaccaaattcacaggaaagaagtgcctaggtgatcatttactgctatttactgcttcctggtatggagcaaaattgccctctggtaggtaactacatttctaattagtatgaaaggttctactattttcctttcttttgcttatttccccttaagcacaatttgcagaccctacttctatttaactgatcatacccttttaaatgccttgtcatcatttttcatagttcctgcatcctagaaaaaataaaaaatcatttaaaatattccttggtgtctagaaaagaaaatttctctaacaatagagattatcattttgctttctcacttaagctgatctgaatgatgatttggtactgcctttatgagcagtcctccttaataatgactaattagggccgggtgtggtggtgcatgcctgtaatcccagctacttgggaggctgaggcacgagaatcacttgaacccgggaggcggagtttgcagtaagctgagattgagccactgcactccagcctaggtgacagagcaagacttt

SEQ ID NO: 241977 - DNA, 629 bp, Homo sapiens
aagcttactgtaaggaagcagggtaaccattcacagacaggacaggcaccaaactccagcccgtgccagcactgtgaggtcaccagtgatagcgagtaaacagtctgtccagctcagcccggattccatcagccctgctaattcattgcagctggacaggagagccagccagctactcaaaacattgttgagtccctttgctgggcagctactcaaaacatcattggtcccttggccaccaggaccagtggagacatgacattgtctccagcagggatggctcacttctgtagatctgggcgccctctagagggctttccccctgggtaccaggactcacctggacagggtctgagtcaagtgctgactctgggaggaagggactcttgggaaaaagacacagataccctgtcatccccacagaaatcagaaaaggattgctcttgtacagctgaagtgcctgggagggaggaagggcctgcactgatatgagcagatggccagcacctcaccggccacttgtttgtcctggtttatttcctcaggcagctttccgggctccagaggtaaattgccagctgtaaatttctggcccttctccaagatgataataaactgtatttgaagta

SEQ ID NO: 241978 - DNA, 1304 bp, Homo sapiens
aagcttactgtaaggaagcagggtaaccattcacagacaggacaggcaccaaactccagcccgtgccagcactgtgaggtcaccagtgatagcgagtaaacagtctgtccagctcagcccggattccatcagccctgctaattcattgcagctggacaggagagccagccagctactcaaaacattgttgagtccctttgctgggcagctactcaaaacatcattggtcccttggccaccaggaccagtggagacatgacattgtctccagcagggatggctcacttctgtagatctgggcgccctctagagggctttccccctgggtaccaggactcacctggacagggtctgagtcaagtgctgactctgggaggaagggactcttgggaaaaagacacagataccctgtcatccccacagaaatcagaaaaggattgctcttgtacagctgaagtgcctgggagggaggaagggcctgcactgatatgagcagatggccagcacctcaccggccacttgtttgtcctggtttatttcctcaggcagctttccgggctccagaggtaaattgccagctgtaaatttctggcccttctccaagatgataataaactgtatttgaagtagcagagagtggtgtgtgaatcatttttgattactcagtggccgcttgagtataggtcttgtgtgggtaactttatatggaaaataaaaaggaattggtgaagtactaactgctgtctagaatcacttagtggttatattggaataacatgctatgaattaaagttaataaaacaccacagagagacattggaaaatagaggtagaagagacaagtgtttccctcccctgcattgtatgtattggtcttgcaatgaatgacccagatgttatggtaaccaagggtgacactagctgaggtagacagatgagcaggtaccctgcttatatgatcataacttggttcaatttttaataagttgacattttgaacatttttcatgcttagaaaaatgatcaaacagcaagccagcaagctcttccaacatgatctaactcagcagtctccaaacaggatgcccctgagttgttcaagacatttttagggtgagaaagaagacagcagagtttatatttttgctgatttttaatttttttccttaaaatttgagtatattttataagatacaccccatgttagtacagtagtatgcacgtattatttataaataaaccggactagccggatgtggtgggacacgcctgtaatcccagctactcaggaggctgagacatga

SEQ ID NO: 241979 - DNA, 1338 bp, Homo sapiens
aaaaaattttttcccccaaaaatttttttaaaaaaaaaaaagggggggtgtttttaaaatttggaaaaaaaaatttttttttggggattattaaaagggtgaaaaaaaaacccgggggaaaaaaaaatcctttttttttttttttaaaaaaaattttttttttttttaaaaaaaaaaaaaaaaaaaaaaaaaaaaaaaaaaaaaaaaaaaaaaaaaaaaaaaaaaaaaaaaaaaaaaaaaaaaaaaaaaaaaaaaaaaaaaaaaaaaaaaaaaaaaaaaaaagccttaatattaatgctaacgtggcagaaaactagcaggttacattttataggctattgtagttttatttaccaaatgatattctctaaatcacttcgaccaataaatgtattctcctccttaaagcagagttgtatcaactctgtgggagcatttatgagctgtcagtccccacacttctagccagaatcacaataaggtctggctgggtgtggggtgctgcataggaaagggtctctggagaagcaagaagggcacaatcatggcccactgctcccctcttcttctcagtgctctttgccctctcctgctgcgtgcttcctcttcactccagtgctgatcctcctgctctctctggcagcttccacctcacccgcccctcttccacactataaccagtatggttggtgctggggcattgactcagcccccctgctttctgcatttgtaatagatattaatatgatttcctaaaacagaagattttgttgctttctttgaacttgtattgaaaaccatacagtctcactgttttgctttaattcctatccacactataaatggaagaaaaaaattaatagcttctgtttaatctgatgaatgtggctttttttcccttcactttaatgttcaagaagttgtggctatttcatagatttcttctgatttattctgtgggtccctgttatctgttctttatgtaatctttcagtagattttcatcctttcatatccacattcttatgtggacttgctgaagaaacagaatatcagttcaaaacaaaacctaggccaggcatggtggttcacgcctataatctcagcactttgggaagccaaggcggtcaggagtttgagaccagcctgaccaacatgatgaaaccctgtctctactaaaaatacaaaaattagcctggcgtggtggcacgcatctgtaatcccaactactcaggacgctgaggcaggagagtcgcttgaacccaggaggcggagattgcagtgagccaagattgcaccactgcactccagcctgggcaacagagcgagactccatca

SEQ ID NO: 241980 - DNA, 1874 bp, Homo sapiens
  misc_feature (1266)..(1266): n is a, c, g, or t
  misc_feature (1278)..(1278): n is a, c, g, or t
aaaaaattttttcccccaaaaatttttttaaaaaaaaaaaagggggggtgtttttaaaatttggaaaaaaaaatttttttttggggattattaaaagggtgaaaaaaaaacccgggggaaaaaaaaatcctttttttttttttttaaaaaaaattttttttttttttaaaaaaaaaaaaaaaaaaaaaaaaaaaaaaaaaaaaaaaaaaaaaaaaaaaaaaaaaaaaaaaaaaaaaaaaaaaaaaaaaaaaaaaaaaaaaaaaaaaaaaaaaaaaaaaaaaagccttaatattaatgctaacgtggcagaaaactagcaggttacattttataggctattgtagttttatttaccaaatgatattctctaaatcacttcgaccaataaatgtattctcctccttaaagcagagttgtatcaactctgtgggagcatttatgagctgtcagtccccacacttctagccagaatcacaataaggtctggctgggtgtggggtgctgcataggaaagggtctctggagaagcaagaagggcacaatcatggcccactgctcccctcttcttctcagtgctctttgccctctcctgctgcgtgcttcctcttcactccagtgctgatcctcctgctctctctggcagcttccacctcacccgcccctcttccacactataaccagtatggttggtgctggggcattgactcagcccccctgctttctgcatttgtaatagatattaatatgatttcctaaaacagaagattttgttgctttctttgaacttgtattgaaaaccatacagtctcactgttttgctttaattcctatccacactataaatggaagaaaaaaattaatagcttctgtttaatctgatgaatgtggctttttttcccttcactttaatgttcaagaagttgtggctatttcatagatttcttctgatttattctgtgggtccctgttatctgttctttatgtaatctttcagtagattttcatcctttcatatccacattcttatgtggacttgctgaagaaacagaatatcagttcaaaacaaaacctaggccaggcatggtggttcacgcctataatctcaaactcccgacctcaggtgatccacccacctcagcctcccaaagtggtgggattacaggcatgagccaccgtgccgagccttccttgaagtttttgtttggttttgatttgttttgtttcgttttgttttgtttgtttttggagatacgggtctcactctgnttacccatgctnggagtgcagtggcacaatcttggctcagagcaacctctgcctcccaggctcaagcaatcctcccacttcagtctaagtggctgggactacaggcacgtgccaccaggcccagctaattttcgtgtttgttagagatgaggtttgccatgttgcccaggctcgtcttgaacaccggggctcaaggaatctgcccatcttcgcctcccaaagttctgagatagcaggtgtgagtcatcatgcccagcctccttgaagtttactaacaatggggataactgagggaagagaagtgacaattccactcagtctattagaggtctggatataaaggtaggcacacaataactctaacttgacttctaaccattctatcttattgacttggaggctgtcttctggccagattttttgtggcttggagattgatattttcggaacccttcttttcactaacctttcttacactttaatgttgccaggcttgaaacagcgatttggaattcctgagctacttgttcggccttcctgtgcgtcacccaagtaatctggtccaacctttcggctccaatcaggtatttcccagtgacacagacatc

SEQ ID NO: 241981 - DNA, 449 bp, Homo sapiens
aaaccctgtctctactaaaaagtaaaaaaaattagccgggcatggtggcttgtgccttgtagtcccagccactggggaggctgaggcgggagaattgcttgaacctgggaggtggagattgcagtgagccgagatcgcgccactgcactccagcctgggtgacagagcgagactccgtctcaaaaaaaaaaaaaaagccttaatattaatgctaacgtggcagaaaactagcaggttacattttataggctattgtagttttatttaccaaatgatattctctaaatcacttcgaccaataaatgtattctcctccttaaagcagagttgtatcaactctgtgggagcatttatgagctgtcagtccccacacttctagccagaatcacaataaggtctggctgggtgtggggtgctgcataggaaagggtctctggagaagcaagaag

SEQ ID NO: 241982 - DNA, 450 bp, Homo sapiens
cacactcacaaaaatatacaaatgaatgaaaatggttatgacccacccatgactgcagtgggttcactgtcatctgatgtgatctataccacctgttcctatgtgactgagaggaccactggccatccatagcctgggaggttacatcatcactttgcacctcacactctagaaccagataaggaagaacagtgtcacatgagggaaaacttcctagcagttggagatgcccaacaatgagtgatcacattgttttaaaagtgagactcccattgctgatcaccctggagatttctgcatgggggcaccctgaacttgaaaatctctgaagtgcctcgcaagattcagggcactaaggtccaaaggagtgaagattggcaaactgataataactccccaaatctattacactgacatgtatcatcaaattaataaattccataaaaatac

SEQ ID NO: 241983 - DNA, 779 bp, Homo sapiens
aatgtgatattcacaaaatattttctaacttgtgctcctttttaattgttgaagaataggatgtctaatatgtattttctatatctagactttattcctttcttactatattcttacgtctgactttggccaattcactatctgttaatcctttcccatagtacaaaagggaaataaaagtagataggttatacctagtcatattaatagagacagaaagtagagtggtggttgtcaggggctagggggtatggggatttattgtttaacaagtagagagtttcagtcaagcaagatgaaaagagttctatggatggacagtagtgatagttgcatcgtaatgtgaatgtaagtaataccactgatatgtacatttaaaaatggttggccgggcactgtggctcacacctgtaatcccagcactttgggaggccaaggtgtggggatcacctgagatcaggagttggagaccagcctgaccaacatggagaaatcccgtctctactaaaaatacaaaaattagccaagcgtggtggtgcatgcctgtaatcccgaggctgaggcaggagaatcgcttgaacctgggagggggaggttgtgatgagccgagatcacgtcgttgcactctagcctgggcaacaagagtgaaactccatctcaaataaaaataaaaatagttaatgggataaatcttatgttatatgtattttaccacaatcttctttttaaaaactttttaaagcctgggcaaaaacttttgtgagatcctacctttacca

SEQ ID NO: 241984 - DNA, 414 bp, Homo sapiens
tcaaagccagaccatgaagatgtcatattttccctaaaactgaaagctccttgaatcaagggaacatggatatttgactcaactgctctagtcttgtagcagacaagacgctgcttccagctacagatcttgagaaggctgcctcgcacctatttaaaataacatgaaaatcagtagctcacattgcaaagccgaaagaaggaaatcctccaacttcagtcacttcagctgttcaaccaaatccttaatacatagggctcttttcatctctctgttcagctgtccactagaacagcagtccccaaccatttggcaccagggactggtttcatggaagataatttttccatagactggggcaggttggggggatgggttcaggatgattcaagtaaattacatttattgcgcact

SEQ ID NO: 241985 - DNA, 473 bp, Homo sapiens
attgaaaaaaaaaaaaaagggggaagcaggaaaaggtgatcatggtggaccacacaaagctttagaatgaattcttttgagtagcttgaaataaatttgttttagttgaaaggagaaagatcatggtaactgtagctaacttgggccccaaatcagggttttattatttctttaacatactcataattaatcaaaattcttattgttagaaatgaggtgttccaatagcacacaaatttcctttacaaagaagaagaaaagagatgaggtgaaggaaaaacggatgtgaaagccctatttataaaatgtaggtatttgacttcgcttagctgtgactgcatgcattaagaaattggagtgattcagtatgtatgtccaaatgatttgaaaagtaaagcattttttggttgaatttccacacatcttatatggagtttacagatttccattttatcattccagtccttgagctt

SEQ ID NO: 241986 - DNA, 350 bp, Homo sapiens
cacagccagtttttaactttaataaattctagcttaccagttaatgaaggacatcttggtttcttccatattttggcaaatatgagtaaagctgctataaatgtctgtgtgaatgtatttgtgtgcacataagttttcaactcctttgggtaaatagcaaggagtgcaattcctggatcatctgcaaagtcatcaccgtatccagggtcatccaggttttctctgatgttatcctctaggattttacagttttgcatgttacatttaggtctatgatctactctgagttaatttttgcaaagctcataaggtctttgtctagactcattttttcatgtggatgtcccatt

SEQ ID NO: 241987 - DNA, 2397 bp, Homo sapiens
  misc_feature (417)..(418): n is a, c, g, or t
  misc_feature (424)..(424): n is a, c, g, or t
  misc_feature (1187)..(1187): n is a, c, g, or t
  misc_feature (1417)..(1417): n is a, c, g, or t
  misc_feature (1483)..(1483): n is a, c, g, or t
  misc_feature (1553)..(1553): n is a, c, g, or t
tagaagatacttggtaaatatagtttattactctaaattaatataattccccacctgaaacaataaatgtagcatgcaatatattgttccctgtttgaggacagatactgctgcttattgatatttgcattgctcatactacccaataagtgatgatggttgaatgaatcaattaatgaatgagcatgagagaaaagccataagaactaacctcccattctaatccctaggccctccctgtttctcttactgaatgcctttccagattattgatgctttgcatgagcaataaggaaaaaggaagcaatccagatgggagcgtagctgtggtcagatgtctctgaaatgaacaaagtatttgcagatgtttcaacaagtggaggggttgggctgagtctaggtcacaggaaacaactnncacacnttggggctactacaataaaggtatcatcacttaccagcacaggattctgttggaaacttgaaaaggcactcagggttggaatgctacatgaatccagacttgtctcaggaatgccacaagtgatcagaactaagtatagaaattaatgtggtttgtaaaaatagcaataaggatcatgtttatctgggaatcaaatcctttaatcactttagacagaactaatgaaactagaataaaccatcattgattgtgagagtctccttctaaattagttggcctttggcttttagagagcaaagttcaaattccagttcctgtctgacaggaaagtaagtcagacacaaagtagatagtcttttagacttcaaactgaaacagcagggcataaaggagatctgagtcttgaagaacctttgctttcagagttgctgagttcagtattgctaatgcagtatttttcattgtgccttttgaggctgttcattttagatttatgatatttgcctttgttggtaaatatgttcaaatataaataaaaattttatatttcctaatgaaaaaattctaacttctactcttttgtgcatgccctgttctgaagcatgttaactttctagctgcatggtggataatagggcccatgtttatagatcccaactgtaaagataataagacacaaaggcatcttaaaaagtgatctgagcagcttctcgttctcgcctgcctgcccgctcgctcccttgcttgctcgcgctttccctcnccctctcctcgaggatggaggggactctgaccacagcctgtgactgggaagggagacagaggcagcggcggctcaggggaaacgagattgcagtggtggtagtaggaagatgtcgggcaaggatgagcagcaggagcaaactatcgctgaggacctggtcgtgaccaagtataagatggagggtgacatcgccaacaggggtacttcggtccttggtggaagcatctagntcaggtgtgtcggtactgagcctgtgtgagaaaggtgatgccgtgattatggaagaaacagggaanatcttcaagaaagaaaaggaaatgaagaaaggtattgcttttcccaccagcatttcagtaaataactgtntatgtcacttctcccctttgaagagcaaccaggattatattctcaaggaaggtgacttggtaaaaattgaacttggggtccatgtggatggcttcatcgctaatgtagctcatacttttgtggttgatgtagctcaggggaccaagtaacagggaggaaggcagatgttattaaggcagctcacctttgtgctgaagctgccctacgcctggtcaaacctggaaatcagaacacacaagtgacacaagcctggaacaaagttgcccactcatttaactgcacgccagtagaaggtatgctgtcacaccagttgaagcagcatgtcattgatggagaaaaaaccattatccagaatcccacagaccagcagaagaaggaccatgaaaaagctgaatttgacatacataaagtgtatgctgtggatgttcttgtcagctcaggagagggcaagcccaaggatgcaggacagagaaccactatttacaaacaagacccttctaaacagtatggactgaaaatgaaaacttcacgtgccttcttcagtgaggtggaaacgcgttttgatgccatgccgtttactttaagagcatttgaagatgagaagaaggctcagatgggtgtggtggagtgcgccaaacatgaactgctgcaaccatttaatgttctctatgagaaggagggtgaatttgttgcccagtttaaatttacagttctgctcatgcccagtggccccatgcggataaccagtggtcccttcgagcctgacctctgcaagtctgagatggaggtccaggatgcagagctaaaggccctcctccagagttctacaagtcgaaaaacccag

SEQ ID NO: 241988 - DNA, 223 bp, Homo sapiens
gaggtattatgtggataagtcacaaacatgatgcggaatggaagaaaagtaagttgcagaatgatacaaatagtttaatagtatttatgtcaggttttaaaactctcagcataacccagcattacctttgtctcagaatttattacagtcttgcccattcctcatatgcatactaaagacctaagaaatattcactctaaaaataatagaaaatcaaggttaa

SEQ ID NO: 241989 - DNA, 319 bp, Homo sapiens
acacgtggctccaatggttctgacttgtttttttcctagtatgaccctaatacagggggcaagttagaaaatcagagttgcccgggcatggtggctcacgcctgtaatcccagtactttgggagccaaggtgggtggatcacttgaggccaggagttcgagaccagcctcagcaacacagtgaaaccccgtctctactaaaaatacaaaaattagttcggcatggtggcaggcgcctgtaatcccagctaaaggaggctgaggttgcagtgagctgagatcaggcacttcagcctgggcgacagagcgagactgcttca

SEQ ID NO: 241990 - DNA, 291 bp, Homo sapiens
aaaggtcatttttggatatcaagtttattaatccctcctgctgcctccacaattatttcctctacaaaaatatcaaatcccaaagaaagacattcctacaatttataatttagtttatgaaatgtattaattacatatggattttatcattaatacatcattttgtattccttaatcctttctaaccaattagactatcaagtcctgtggccaggcagtaattacctatatatctttttccttccttagcaccagagtgaatataataaaataaatatgcacttgattcta

SEQ ID NO: 241991 - DNA, 292 bp, Homo sapiens
cagaggaaaagctaagttactctttattcatagagggagtacaaggaagtttaaagttaacatatgagaaattggaagtataagcgtattcttggagttatggaagtagctatcagaaaaagaagaggaaatgttcaacaatagctatctctgaggaattagactggaagaagaggattaaatgaaaaatgaaaacctctggttttcattttgtatctttctgttctctttgatattttatttctatgtgattatattatttttataattaaaaataaattgatctcttttg

SEQ ID NO: 241992 - DNA, 447 bp, Homo sapiens
caagagctggagatcgagactatcctggctaacatggtgaaaccccgtctctactaaaaatacaaaaaattagctgggcgtggtggcaggtgcctgtagtcctagctgcttgggaggctgaggaaggagaatggtgtgaacctgggaggcggagcttgcagtgagccgagatcgtgccactgcactccagcctgggcgacagagtgagactccgtttaaaaaaaaaaaaaggaaagaaagaaaaagaaaagaaagaaaagaaaagcaagagctaccagaggtgagagcacacaaaggaatgaccaagtgaagaggcagcaatagggcagccatctgcaagccaagaaagagtctcagaaggacctaaccctcctgaccccttgatcttggacttccagcctctagaactgtgaggaaataaatttctgctgcttaatctacccagtt

SEQ ID NO: 241993 - DNA, 626 bp, Homo sapiens
  misc_feature (575)..(575): n is a, c, g, or t
catctccaccgtgggctacggagacatgtacccagagacccacctgggcaggttttttgccttcctctgcattgcttttgggatcattctcaacgggatgcccatttccatcctctacaacaagttttctgattactacagcaagctgaaggcttatgagtataccaccatacgcagggagaggggagaggtgaacttcatgcagagagccagaaagaagatagctgagtgtttgcttggaagcaacccacagctcaccccaagacaagagaattagtattttataggacatgtggctggtagattccatgaacttcaaggcttcattgctctttttttaatcattatgattggcagcaaaaggaaatgtgaagcagacatacacaaaggccatttcgttcacaaagtactgcctctagaaatactcattttggcccaaactcagaatgtctcatagttgctctgtgttgtgtgaaacatctgaccttctcaatgacgttgatattgaaaacctgaggggagcaacagcttagatttttcttgtagcttctcgtggcatctagctcaataaatancgatcggccgaagatatctgaaaataaaatccaaacatttagtaaaaagaa

SEQ ID NO: 241994 - DNA, 417 bp, Homo sapiens
atatatcagtcagcatataatatgaaaatgacatgtatttgaatataagtaatcacaacaattattgagataaagcataaaggttaaaattttaacattcaaaatgaaaacaaaaggaaactggaccaggcacagtggctcatgcctataatcccagcactttgggaggccaaggcaggaggatcgcttgagcccaggagtttgaggccagcctggacaacacagcaagactctgtctctacaaggaataataataaaaaaaaaaacgagccagacatggtggcatgtgcctgtagtctcagctactcaggagctgaggccagaggatcacttgagactgggaggtcgaggatgcagtgagccattactatcccattgtacttcagcctgagttacagagcaaaaccctgtctcacc

SEQ ID NO: 241995 - DNA, 384 bp, Homo sapiens
gtagggaatgtagaacccaataggtagtttttcaaccctttccccctcctcccttccacttttggaatccccagtatcaattgttcccatctttgtgtctgtgtacccaagtttagctcccacttataagggagaacatgcagaaaatacccattttaaaactgaacattttacttttatttggatatttaacagcatgtatttatgtatttacatatgcccccctacttccccaaagggtttgagatggcaacatcataaagaaagccctaggttataatttgctctagaaaacctctagcgtaatgccttacaaaaacagtgtttgaaggggaggagtcatgagcttatgtaaacacagcaccattaatttaagtagtaaac

SEQ ID NO: 241996 - DNA, 554 bp, Homo sapiens
ctgtctcccatcatgccaacatgtgatcatctagttgcaggaaaacaagctcagggctcccattgattctacattatgcacttgctacaggggaagtgaactgctatgtcctgagataactgagaggttgtggagagtgactccatgagtctgtggagaggtcaatatgacaaagaactgaagcttgccaatagccatttgagtgagcttggaagtggacctttccccaggctgactcatgactgatgactccagggaaaaatcaagacacaggagaggaagggtattcccgttcatcccagtaatgctaatcgaggaaatggtcctcgaggaaatgacgctgcagcaacagcatcacctggggacttgttagcaacagaagttctcagactccgccatagaactactgaatcagaaattctggaataaggcccagcattccatgttctaacaaaccttccaggtgactgtaatgtacattcaagtttaagaaccactgtaatagacccatttcttggttgattaaatggatcttatattgtaaataagcagaa

SEQ ID NO: 241997 - DNA, 362 bp, Homo sapiens
  misc_feature (35)..(35): n is a, c, g, or t
tgtaatccttataatgcgggtaggaataaagtaanaaaatcagctgctcagtctgatgctccagggaaatatcaagaccaggagaggaagggtattcccgttcatcccagtaatgctaatcgaggaaatggtcctcgaggaaatgacgctgcagcaacagcatcacctggggacttgttagcaacagaagttctcagactccgccatagaactactgaatcagaaattctggaataaggcccagcattccatgttctaacaaaccttccaggtgactgtaatgtacattcaagtttaagaaccactgtaatagacccatttcttggttgattaaatggatcttatattgtaaataagcagaa

SEQ ID NO: 241998 - DNA, 358 bp, Homo sapiens
gactgccactccctcccagcctttcggttctttaaaatgaaagataaacctcaggacaaccaagacctggggaaaagacagtctttgggaatgtaatttggaagaatggatccagaaaaacaaccaggggctcttaactctagtttcggcaggagatcccgagttacagacctgagctcgtaaacaaacgctcaccactttacagtcgccgcctcatcctgaaactccggtcagaaatgctggaaggcctttgctaatgcgcagtgaaaattaggggcacagatgtggacggactgtgcttggtcagtaattgttctcctccaaatcaagtttatgagaaatttcatataaggaaaaa

SEQ ID NO: 241999 - DNA, 332 bp, Homo sapiens
tgtagtccctctggtcaacttttcagaatttccttttcaaaaactgggataaatatatgatttaccattttaacagtttctaagtgtatagttcagtgacattaaggacattcacattgttgtgcaaccatcaccaccatccacctccagaacatttcatcatcccatactgaaactctgtactcattcaacaacaataactcccagctgctacagtggctcatgcctataattccagtgctttgggaggctgaagaaggaagatcgcttgagcccaggagttcaagatcagcttgggcaacacagtgaggccctgtctctacaaaaaaaaa

SEQ ID NO: 242000 - DNA, 401 bp, Homo sapiens
ctacaaagctatagtaaccaaaacagcatggtactggctaaaaacagacacatagacacatggaccacaatagagggtccagatgcaaatccatgcattaatagccacttgattttcaacaaaggcaccaagaacatgtgttggggaaaggacagtttctaataaatggtgctggaaaaactggatattcacatgcaaaagaatgaagttggacccataccttacacgatacacacaaaaagctcaaaatggattaaagacttattatgaaactactagaagaaagcataggggaaacacttcaggctattggtctgggcaaagattttatggctgagatttcaaaagccctggcaacaaaagcatataaagaacttgaacaactcaacagcaaaaaatcc

SEQ ID NO: 242001 - DNA, 439 bp, Homo sapiens
ccagactgctgaatggggccttaatctccccatctggacagtggaggagtctgaaccgttcatctgaaatttccttccggctctgtggtttcaggtatctctgggagagtgggcatgttcaggagcagagatttgtcacgggggaagggagttggggagccggaagggacaggagaagctttcagtctgggtgccacagtctcaggttcaactcttgacattatcttcaaatgaggtaatttctcctgtctcagtgctgcccagttgggtaaaagaaacagttcatcctataatgttaaacttggtcctattaacagaccacaccatctgtagcatattatgaattaattaaaaataaacctgtaattatcttgttaacatagcaattatattacattgtaatttttttgttaaagcattaaattgttaatattcaaga

SEQ ID NO: 242002 - DNA, 272 bp, Homo sapiens
gagacggagtctcgctctgtcgcccaggtgggactgcggactgcagtggcgcaatctcggctcactgcaagctccgcttcccgggttcacgccattctcctgcctcagcctcccgagtagctgggactacaggcacctcatgtttcttaaaagaggagcctacacttcctgcccgacatcttaaactgtcacccatttctcaatccaacataatctgtcttttattaatattttaaaatgacagatatcttttcacccttcactattttttc

SEQ ID NO: 242003 - DNA, 448 bp, Homo sapiens
gggctgcttttcataaagacagagtcagtgttgctgagacacaggtggaaagtctttgtgcttgcttctttgatcagccccactcccttccaacagagcctatcaagtttgcttcctaatgagggcccccgagtgccggctgtgatgggtggaccaggctgagggagggccgggagccaggggagccactcccagctgccacccctgaggtctgggaggcaggagccccacccgtgatcccctttcccttcttttactctcccttccctgtttctcagtgcatgtcagggagaggtcccccactgaacaatttttaacttcaagatggtgcagaagcgatacacattcagtagaatctttactttgagttcctacacaatcactctatttttcactttcagggcagtgttcaataaactgcataagttatttaatactttattataaa

SEQ ID NO: 242004 - DNA, 597 bp, Homo sapiens
tcggcttactgcaagctccgcctcccgggttcatgccattctcctgcctcagcctccccagtagatgggactacaggcgcccaccaccacgcctggctaatttttttctttgtatttttagtagggacggggtttcaccgtgtcagccaggatggtctccatctcctgacctcgtgatctgcccacctcggcctcccaaagtgctgggattacaggagtgagccaccgcgcccggccgacaaatacttttatgatagtttgtctagcttgctagtgtctcctcctatgaaaaaaggtagatgtttggacattgatgtttttgagaaattaaccattttcaaaatctattcttcataaattcagcatttctcatgggaataatcttagatctagcccttgtaagctaggagccatatgattaaatattcaaaataggtcctatattaaatatatgatccaaggctcagaatattaatactatataagatgcatcttgtttataatcatttattacctgtggtaaagaatgttgaatttatagagtatcacagatgcattctccacccctccccctcagattatcttctgtctcaaaaa

SEQ ID NO: 242005 - DNA, 473 bp, Homo sapiens
aggggaggtggaatgactaagaatttacatagttggcagagaaaaccaactccctaagccaaagaaagtaacttttgaaccatatgctttggtttctatcacacataattttatttcacaactttggagcactaggctacataaagacttggatcccattctcaaaaatctgagagagaagacaagatgagtgcacacaaactgtattataaagtacaggacataatgtgaacgtttataaaggtgtaaggtgtgtgtgtgtgtgttcaagggagagatcacttgcagtcctaaattctatactatataggattttcacttctatgtgaaaaatactctttccttaacaagtcatggatgaacgttttgaaaagtatggtctatagaccacgcacctgcattttaacagcctcccaggtgtgatctctggcacaataaagattaagagccgctgacgtaaacaataaatgtta

SEQ ID NO: 242006 - DNA, 426 bp, Homo sapiens
atgaatttgggacttgtggagaatgagggaatggagagctagcaaaaacctaggatatatggatcagtatgaaaaccagaaataaaatgagctaagcagtgagctgtgtgcctggaacagagatgaagcaggaagcatggccccttccttgagttaaggaacccacaggaaggtatttgagcagaggcgagacagtcaaaagggcattgaaacagagacaagctgcccgatgaagcaacaccatccagtgcagctggactgtggacacctgtgtccttaggttttcatacattgtgagagcttcgtttacaaagtgcatgggataagaggaggggcaccccaaaagaaggaaagcaggaaaaggcagggaccccagaggctcagtctctgcagagggtattactgcctcacagatgttggccaaag

SEQ ID NO: 242007 - DNA, 838 bp, Homo sapiens
gactttgtaaactgatttcagagaagcgattaaggaattgtactgtctttaaacaatatttagaatgcttcagtaaaagcatttttaaaaaatttttctaatgatgtagtaaatgtacctaatataaagttaagtggttttatttaatacttttcacctgaccatgattatgttataaataagaggatttatagtttgcatgcctgatataatctatttaatttcctttacaaaatttttgtacatgaaagataaatgtcttcattttaccagctacctccttccagattgaatgcttcagtgcactttgattttcaaattggctattattttttaatgtaattaaccttcacaatttaaattgaaggatattctgatccttaggttataaatatgtgacttgatggtttatgtaacattcaagtagcatgttttctataacaatatgataaaagttttgatacataccttgtatgttgcttgacagatctgttttagaaaacattcctctgccttttgaaatgaagccatgtatttgaaattatttcccaaacaattatatcttaagcgtgtgctacatagtaatcatagtcattttaatttagattataaagctatattttaactttgaggtttgtgaattttcttagacatattaatgactttatagttaatggtgctctcagattttatttttaagttaaaaatttgccaggcgcggtggctcacgcctgtaatcttagcaccctgggaggccgaggcaggtggatcacgtgaggtcagcagtttgagaccagcccagccaacatagtgaaacccccatctctactaaaattaa

SEQ ID NO: 242008 - DNA, 828 bp, Homo sapiens
aaggcatagacttttagacacttgtaatctctgacttaagccgtgtcaatgcccaaaggccaccaataacacacccgtagttaaacaagttgggtttattactcattgcattgagagagcatactccatggggaaccctggggtgtttcattaggagggtgttagaactgattataggatttgggtgttggtgattaggggaggggagggttaaggaggttgggtttcacttcagataagatcctgtaagaaaatatgggagtttcgtggttgggtatctgaataaatcttacctgtagggcagggagactagtataagaacaaaactgtaattgctacaggagtagcagtcactcaatttggccagagggtgtttggtatttcgtgagtggcatagccactatgtatttgtctgtgcttataacaaaattgtgaaatggcctttgtctcattttatgaggatttcagagtaaccttgtctgaggttggtattctgtgagattgtttatgtcccataggagaataacatggcctggctgtgagtgctatgcctgcttctggagtgtcacgggttgccttttttttttctttctcaactgattgctctatgcagggcctgttgaaaccagtggttttacatgtgcagatttgttatttaaaaaaaaaaaaaagaaagaaaagcagccgggtgtggtgggggcgcctatagtcccagctaccaggaggctgaggcaggagaatggcgtgaacccgggaggtggagcttgcagtgagccgagactgcgccactgcactccagcctgggggacagagcgagactccgtctca

SEQ ID NO: 242009 - DNA, 331 bp, Homo sapiens
agtataaagtaatattaaaattgacattatattttgacatcttgacttttatgtttgtagttcagtatttcatccaaacatttctcaagaactttacaaagatgattatatatagaagaattgatgcaaattttacagaacttaacagaaatgattttatacagaagattgataaaacgtcagttctcatcagttgaaagtggaagagataacatttgtatgtgttacattttttcatgttagcaattattattaaacacttattttcctgtagtactgtaaaactggaaaacaatgagacatgtaataaagtatttattctctctctctc

SEQ ID NO: 242010 - DNA, 586 bp, Homo sapiens
catctcaaagagccttggtgtatgtgcaaaacggggccatctgcatgggcgttgggaagatcacagaacctggacccttaggatgacccaagggtcagttgcatactgtttgtttttgtggagtcaatgtcccatgacggttttcgcgatgctttgctagtaggagcagtggcgtgtgaggctcccggttaaataccatgagattctaagcggaattctgggtctcctggtatgcacaggtaaaattacagtagacctgtcccactctttgccagaacctcgtacttgtctgcagtttgactggaataaggggtgtttgtgttccacctccctccaacgtgtgttgagacatttatttatttatttatttatttacgttgctcttgttacccaggctggagtgcagtggtgcaatctcagctgctcaccgcaacctctgcctccctggttcaagtgattcttctgcctcagactcccgagtagctgggactacaggcacgcgccaccaggcctggctaattttgtatttttagtagagacggggtttctccgtgttggtcaggcgggcctggaactccgaacctca

SEQ ID NO: 242011 - DNA, 807 bp, Homo sapiens
cttggtaaaactctattttattttttccgtttttttcttacctaaatgaacacttaaatttttggttgatacgatgaaaggattttgacacagtagaaacaaaacagacgtgttgtgagttttattctacctcccctgacattgcacagcttcctcttctgcactcgggagataataacgtgcacctgccttgctcataaattcatttaaataaaatacccaaagtcaagcctgaaattgtaggcactcaggaaaggccggtcatgattttactcctgagttttaaaacattgataaaactgtcatgggaaaagagaagtcagtgtaaaaaacgagacacatcacaaaaatgaaagaaatgtaaatggagagcccttccttgggtttgcccagggagacaggcgggtaggaagaataaaggagcccaagatactgttactttttcctgccttggacagtgttcccggcagctgctgcaaccctccgtggctccggctctcactggatagccctgcacttccccccgccctaccccgctggagccctgaaactacctccttcccttattccttcaatcttgcttagaatcggaggactcctcaccatcatcacaagcttgaagtcttggatcttccagcacgtatgcaatccttcccccggaaaaaatttccaatatttaaatacttgcagtggtttctgtttttccactgggactcagaatggataatttatgaacatggttaaatattaaatcagtatgtgtaaggttaggtgaaggaagtatctgaagacatgaagcaaagagca

SEQ ID NO: 242012 - DNA, 621 bp, Homo sapiens
tgtggtgggtttaggggaggaagtatgtttttctgtgttgctccaagtttttctgtttaaagcatgtattttgtaatgtttgggggaaaccaaatccatcaaaataaagtgcaagttttgtaacctgaaccactcattgaggtacagaattgaaatgtatttagatgaaactcacaggtattttttcttggagaatgtggaatattttatctatagtgcagctgtgctgtcatttatgccattttttcctcctcattgtgattcttactgtttggggtgaaagatgagtagtattttaaagcccgtaatgtgtgtgagtacacacgtgacatcttagtaagattcattttgtgtgagaaataagggaatttaggcttttgggttacatttgttttcaaaacatgttaataggtgacaaaaatccagtttgtttagatttgtatgtagtctgcctggaatgaaacttttttatacttacatgatagccctgattaaataaaagtttggtgaaagccagcagggtggcatgtgccccatgatcccagctactcttgaggctgaggtaggaagatagcaagttcaagcccagcctgggcaaaatagcgagaccccatctcaaaa

SEQ ID NO: 242013 - DNA, 424 bp, Homo sapiens
cctaaacattcctggttgaaacactgagtagtcttgatccaaacagtaaagatattttttggctcatatttgaaatactcagaaccaaataaaaataataatgcttggaaacttggaagttttttaaatgcttaagaaatgcttaatttatcactcacattctgtattggttttccaagttcattctcttgtaattatttggctttttttttttttttcccagaaagcacctaaaaagtaatggatgggtacttagtactcttatgcttttttcttcttagtcacactcatggatattgataaactgatgtgttctcattggtattaataatgataatccttatccaaaatgtacttcataccaggtactgtgtaagtgctttaaacaaatcatctcaataaaataatatcattatgtaagaaa

SEQ ID NO: 242014 - DNA, 319 bp, Homo sapiens
gccaccaccccagaaagtaccctcataccctcttccagtgaatgcccgtctcccataattggccactgttccggtttctgtcactctagcttcatctccttttgaacttcacgtaagtggaatcgcacggcacgcagtgctttgtgtctggcggctttcgctccgtggaattgttttgagatccacccaagctgtgtgaagtgagtagctcatggcttcgtattgcttggcagccttccattgcatggagacgccgcaggttgcttatgccctggtccgctgccagttggggcgactgaataaagctgctatgaacgtt

SEQ ID NO: 242015 - DNA, 429 bp, Homo sapiens
gttctctccagaatctgtcagtttcacctaccgactgcagagaccctgcaaaacactcatgagacatatacattgggtgcatgaagcccttcctgtttctccctctactggggcagagagagagctgattccaagcctcgggggagctcaggaggcagagaaccttctccccgtttccacacctagatttcaaatcacacccttccctgcatactgcagaggccagcaaggcccccttccagaccccctggcctgggcctcggctcttgtaattgtaggacctgagtggcccaggatcctggcaccagctccgcctgtttggtctttggctctcctggcactgccagagaatggaaaagctggtctgtttacaggacatggggccagaagcgcattaaaaaataaggagcaaataaaatgtcataaaca

SEQ ID NO: 242016 - DNA, 680 bp, Homo sapiens
tagatcaattctgtattgaattccagtcttaatggcaccgagtctttgagacaattgaggcaaattggaaattctgttttcacattcttctgaaaggggatgcctttcagaagtgtcctgaagggcgctggggagggcaaatatgaggatgccagggtaagtctgctccctgtctggctgtgttgggccagagtggaagaaagcctaagactctgttacccagccctttctgaaaatgttttcaaatgctttcccaacaatcacgaccacaagagtcaacagtctgtttggatgactgaaaacacacaggtttacgatctgtaaagatagtaggtaagtgatttaatcttgttgtataggtaggccagagggcactcgcagccttctgattgatttaatagattgttgaagattaagagttgacttaacatctctcttagaaaactgagaaatagctcattactaaggtgtgttttattaccaccgtctgtaagaaaatacaacataggcatgggaatcaaactacttaaagcctcttccagctcactttatgaggccatcgttaccctgaggccaaaaccagacagagatattctaaaagaaaagtctacagaaaaatgttcctcatgaacatagatataaaacttctaaacagacgtttagcctatcaagtccaaaaa

SEQ ID NO: 242017 - DNA, 332 bp, Homo sapiens
cagtgagccaagatcgcacctttgcactccagcctgggtgacagaacaagacttcatctcaaaaaataataaagacctttgcaagttctgttgcttgctcactgttgcaagggttttggagctattggctcgcccgaggccccttctgagctcaaatgccttcaggggaggtttttggcatcaagaggagagctctttccttctccagagaaacctcagatgaaagtgacaatatcctagaccctgcattgtgaaatggggcttgaattttagttctgaatttttattttgaagattatggaataaaaagcaaacagactggtcaaaaatta

SEQ ID NO: 242018 - DNA, 371 bp, Homo sapiens
ctgagtttataacttagtcctattctagtttggtacagtgaaaaaaggacttaggtctggattcttattccatgctttctgtctttctatcttgatgccattgttattttggatttttcatcactctcagccaaaataatcttgatgcaaaagactgggcttaatatctaccagaatttaaaattcacatttttttaacccagcaataccacttataagattatatcctataaatatactggaatagcattaaaatatataataaaaatatcaaaagactgtgatatcaaaagaatggaaacaaactaaataaagatataataaaaatatcaaaatactgtgctatcaaaagaatggaaacaaactaaata

SEQ ID NO: 242019 - DNA, 342 bp, Homo sapiens
caactggttgactgattgattgaatgaatgagtgagtgaatgaatgactaaacagagtgaactggcatggggatcaaagggaagcagagagagaaattgcagtggtgagaggtaatggacaagtgggaaaaaatggggagacagaacatttttctctaaagattttttttcttgttgttttctgaataaaatggggagggagggccagattgttccagcgagtgttttcattcttcaataatcccttaaacaagccatcaacaaaaccaacaatccaatttatacgtaattatacttgtaaatttatttgacaaataaataacatttgtaaaataatttaaa

SEQ ID NO: 242020 - DNA, 196 bp, Homo sapiens
agttttagacataataatggcatgaatacttagcaaatggctattttgaaatttaccaaaaacaatggcccatggtagggataggaccatagaaagggagattatttggagaaactagtggaaataagatttagagttttatttatgttggagtgacaggtagcgtattcaatggccaccagagagaccggtaaga

SEQ ID NO: 242021 - DNA, 380 bp, Homo sapiens
taattttttttctccacgtgatgcattcccgtggcacactccgcgcacatcaaaccccttgcgcctttattgccggcgatgccccggcccgcgttatcagccccacacacgcagccctctctgcccgccatcaagaggtcacttctaatgactaatcgatctcattagctttcctaattaaaaactttactaccgcaatggaagacaaactacaaagaaactgctggcatcatatgtgaatgggatatgagcccatccatcagcagggtttgagctcttgcacacggcaccatgccctcaggccggggaccaggtgggacagccctcaggcacctcgagagccctgctgtgtaccaagcaccacatgcccaatgacgcat

SEQ ID NO: 242022 - DNA, 697 bp, Homo sapiens
ccatatcacccttctcttgccaagattctcttgtcattggatggaaacctggccaaacagcaggccttatcgcatattcttacagcattgcaaatcatgtatgccagagatgccgtagtgggggccctgatgccggccgccatgatcgccccggtggagtgcccctcgttctcctcggcggccccttcggacgcatctgcgatggctagtcccatgaatggagaagaatgcatgctggctgttgatatcgaagacagactgagtccaaatccatggcaagaaaagagagagattgtttcctctgaggacgcagtgaccccctctgcagtgactccgtcggccccctcagcctccgctcggccttttatcccagtgacggatgacctgggagccgcaagcatcattgcagaaaccatgaccaaaaccaaagaggatgttgaaagccaaaataaagcagcaggtccggagcctcaggccttggatgagttcaccagtctgctgattgcggatgacactcgtgtggtggtagacctgctcaagctgtcagtgtgcagccgggccggggacaggggcagggatgtgctctccgcggtgctttccggcatggggaccgcctacccacaggtggcagatatgctgttggagctctgtgtcaccgagttggaggatgtggccacagactcgcagagcggccgcc

SEQ ID NO: 242023 - DNA, 506 bp, Homo sapiens
ccatatcacccttctcttgccaagattctcttgtcattggatggaaacctggccaaacagcaggccttatcgcatattcttacagcattgcaaatcatgtatgccagagatgccgtagtgggggccctgatgccggccgccatgatcgccccggtggagtgcccctcgttctcctcggcggccccttcggacgcatctgcgatggctagtcccatgaatggagaagaatgcatgctggctgttgatatcgaagacagactgagtccaaatccatggcaagaaaagagagagattgtttcctctgaggacgcagtgaccccctctgcagtgactccgtcggccccctcagcctccgctcggccttttatcccagtgacggatgacctgggagccgcaagcatcattgcagaaaccatgaccaaaaccaaagagggtggcagatatgctgttggagctctgtgtcaccgagttggaggatgtggccacagactcgcagagcggccgcc

SEQ ID NO: 242024 - DNA, 1636 bp, Homo sapiens
gggagggctgactttgggaattagggaactgcagaaatacacatcccagggcagacaggatgtgcacagaggacaccaggaaggcagggagtaagaaagaagcatcaaaaatgaggtgaggatttcgaggaaaactgttcttttagcaaaggtggcatgaatgctttgcttgaatgctgcttgtctttaagatattgctaattctcaatcaactagaaaaagctgacatctctataaagagaataaattcataaaatgcaaaggacaggcacaacagagtatttagtaagtagtgcgtcatctttattagagaggtacatctaaactaattggaggcaaagttagtttgaatgaatgatagttcacatggcccaggcaactttggtttttagaataagtgttagtaaatgatgtttttttgctttcaagggcagagagtaactggaagtgggtttgtgattagcatatctaatgtccatttagggtgaaaccaccattctgaaatcatgccgcatgatttgtcctgcccctggtcatgttcctcctcctctgccattctcatgatatctgtgtttgcctgggtgccatgtgaccgcatctcatggccacttcacgctcagtgcgttccaggcctctgaggtcattcccagtctctgttacccacaggactctgtgtacccgcttctctgacctcatcttcatcattctctaccttctgaaccccattcactatcgtcttctgaaaatcccaatatcctcaatctttgctggtattgtttgccttcccttcttgttttaatggaaacttggctcttccccgatgctttaccatgaaaccctctcaaggggagctgttttctttcccaaatatcacatgccactatctatgaaggtgaggtaggtgtcctctttgattcccattcatgttcccagtctgtgtgttctctctagaaatgtccaggtttgattctcatatagtactcctctttcatgtatctactcccatcttcaatttattggtcctatgtccatttcacaatccttcacccagttcatgtgttcacttccttctttacccagtttaaattatatgttcaattattataatcactcccatgcatatagtcatctctcttgcactaccctcaccatatacctatttatccaactaccttggataaacctggctcttcccctgttctgtccctgcacagaggcagttaaggcagaaaatcacacaccaagttcataaccaactaacctcggtgggccctgagtgtttccaggcaatcatgctattttctgactttgtttactcactctgctagacaattatttcatcttttcctcctttttcttccatttttgctctataacaatgtatatacactctacaggccatcattctatacctcatttaagccattgttatcaagggtttacccttaaagatcattgttgagtaatcacctgggcctgtcgtggggtcggcggaggggggatggatagcgttaggagaaatacctaatgtaaatgacgagttaatgggtgcagcacaccaacatggcacatgtatacatacgtaacaaacctgcacgctgtgcacatgtaccctagaacttaaagtataataata

SEQ ID NO: 242025 - DNA, 421 bp, Homo sapiens
tgctccccaaggctttctgcttttatttttttgagatggaatcttactctgtgccactgcactccaacctaggcgacagagggagaatccatctcaaattttaaaaaataataataaggagggctgggtgtggtggcacacacctgtaatcccagctactcaagaagctgaggcagggccaggcacagtggcacacgcctgtgatcctagcactttgggcagccacgtttgaggccagcctggccaacatggtgaaattaaaattacaaaaattagccaggcatagtggcgggcgcctgtaatcccagctactcgggaggctgaggcaggataattgcttgaacccgggaggtagaggttgcagtgagctgagatcgtgccattgcactcagcctgggcaacagcaaaaactccgtctcaa

SEQ ID NO: 242026 - DNA, 294 bp, Homo sapiens
gctacctctgtgccggtggccactcaatgccatgtgctcccagatgctgaggggctccacagctggggttcaggtggcagaaagacggtgcgctgcctgttgctgtccatgccatcccatcgcatgagaggcacaggactgattcctcagaaaccccagcccaagaagcttcgggcacgggaagacccagctcacacagggctgggctgggcgtcacggagcacgggaggagccagttaccatctgtgctctgaggcctgggccctctgccgctgtcccctgctctgctgcaat

SEQ ID NO: 242027 - DNA, 378 bp, Homo sapiens
acaatggaacagagtagaaaacccagaaataagaccttccacctacaaccgtatgatctttgacaaacttgacaaaaacaagcaatggggaaaggattccctgtttagttagtggtgctggggtaagagttcaaaacagacacacacactctcacacacacacacacaaacagcaactcactagacaaatccgccccgcagatatgtttggtttggactatgcaatatttgtaatatgaattagttactaacatttaaaaattgattgcattaaatgagaacatctgagaacatttggctttgcttgaagaatctaaagatgtggctaaattgggcctgcattctatgtcaattttcatgcaaatattgaccagaact

SEQ ID NO: 242028 - DNA, 466 bp, Homo sapiens
tccttagttggcattgccagtttaatatccagcaaacattaatcactaacagtaaatgtatagaagacgtttcatatacatgtccaaggatgctttgtcagtgaaagtgtattgttacagagtcctccagggttgctaaataatcactagggaaaatcttagtttgacctcccccatacccaccataagattaaatgtagcttctcttctttggctggccatgaagaattttaaaaagaaatatttagtgtggctaatgtgattgactggaatatgtatttggattatcagtgcctacttcctctttctcttcagcgtccatcttttgcatatttaagagtacttcggctgggcgaagtggctcatgcctgtaatcccagtaccttgggaggccgaggtgggtggatcacttgaggtcaggagttcaagactagcctggccaatatggtgaaaccctgtctttact

SEQ ID NO: 242029 - DNA, 415 bp, Homo sapiens
tggtgtaacagtatcgcatgagccaagactgtcatgaaactatttggatactgtactctggttccttcatctcctccatctgcatcagcctaaattgtcctattgttacaggagcctctgccatgaacccggggataagtgaggaaagaaatttttcctccttcacagtatcaagtgccaggccagggcactttgtccaggcctcactgtgaagaaagagtaatgttcaaggatggcagcaggaaggaccctaatgaagaggtttatctgattggtttactggagtcctatgtgggatgaatagcttcagcctttgcgcttgcacctctttgctgtccactccaatcaagaacgggggccctcgcaactctctcagttctgaaacaaattaaatctcagtgacagactctatctg

SEQ ID NO: 242030 - DNA, 513 bp, Homo sapiens
aatatgggaagctcacagcttcacagtttgttccatggattggattacattggatttctgaacacagaaaaagatggacattgactgttgtgttgacatttctgatgatcacttttaatgatcacatctgtatacctggagcctcaacacctaaatggtcgtttttactctttgagaaaaaaaatcagggttcttcctacagagaggtgctgctggttacatgtgcccaaaatctaccataaatacagcggcacatgactttagcctcttaggcatcaacagcttgcaggctgctctcagaacccacacatcctttaaccacccaggaagacattcttcctttctcagcattctttaaggatgataaatttagatgcttagtaataaatagcatcccactcattgctgacaatgcagtggggatatttccattccaaataaggttctttttttatgtttttgttttcttttctgataaaagagggaagttctgctaacttctgatgtctatct

SEQ ID NO: 242031 - DNA, 507 bp, Homo sapiens
tgcatagtggttatagaactttacctgtgtgataaaattttgagaattgttgtgaatccttgtgttccatatgactttggaaagaatgtatagtttctgtatactcccttttaaatatgttatattcatttgtttttaaaagtgttggttttgtgctttaaaaatatctcttaaaagtattcctatctattgggtgcaaaattctcttatatcaggctttctaatttggttgttgaaaacttttcactccttactaatttctatatgcttgatccatcagtttctacaggggcccattaaaatctatttttcttcttgatgttattctgtaaggtattacttattttgagcaataataagtgatatttatttgttatcctttaatcaaatattgtgaaattcttcatttcccattgttgccttattcttgagtgccaagatctcacacattcgcctcagtatgaactgtatcaaataccaatttataaagataatatgaaagacgaa

SEQ ID NO: 242032 - DNA, 2481 bp, Homo sapiens
  misc_feature (863)..(863): n is a, c, g, or t
  misc_feature (2296)..(2296): n is a, c, g, or t
aaaaaaattgctctcatgactcccaagcagtatccttatcccttaaccattttgattagtacaagaaagaaggagtttgaattttattgctgtttttggaagaggattttgttggtcatccaatcctttgcaacaaatatgtcactgcctcttgtgagaggcacttcccagcccagaagggggttgagcctgttgtcttactaggttcatctcaccctccttattggacatttcaaatgagtttcagtcttttggctgctgagagagccaggattgatcttgtttttctcctccctactccttagctttctctatatttgactattaagaataaaggttaggatttctataagtggccttgccctgccttcctatttcctattctgtcatggtgcattacaagtgacatattaatccagactggctaaggcagtgtggtggggatgaagatcactgtgaagaacagtgatacccagaccacattcacacggcactttcagcatgcacagcatctccaccgtcctttcttcactgacagtcaggaaaggcagctagtgtgataggtgaggatgcgtagaggttgtgacatcctttaggtgagaactgatgtcaaagcaacctgcttctgactcagaattgctgtgacttgagaagtctttgaaggcataataatatcatgaagctgctagggcattttgaacattaacttcagcccaaaaaccacacctgcactttcttttcctctcttcagggtgccaccctgaccttccttaataagaataagaatagctaacattattgcacacttactgtgggtcaggcactgtgctaggtgcattatttgttccttttctctcctttantctccacaactctatgggataagtgcaattattatctctactttccagttgagaaaattgaggcttgagggaataactggcccagtgtcacagagttaactggtgaagctagggttctcactcaggcaccctagcactagatcctgtgctcctaagcaccaagccatggtgccctgttgagcatgtaacatttaaaaggccttgactaagagttaggagaaatgtgttctaatcgtggtcctgccattaaacacagtgactctgaccagtcacttcccttctctgggtctcagcttcctcaagtgcatgatgaagtagaatgagatagctcatctttaaggttcctttgctctgtgtggctcttgacggtctaggttcccttatgtggacagagatgagaggttgtgtattagtgtttcctagagggacagaacttacaggagatacatatatgggggtttgttaagtattaacttacatggtcacaaggtcccacaataggctgcctgcacgcttgaggagcaaggagagccagtccgagtctcaaaactgaagaacttggagtccgatgtttgagggcaggaagcatccagcacgggagaaggatgtaggctgggagaggttggttattgcaggaagtgatttccaagcccattttcctagtgttattggaaaatttcaatttgtcagtttctcagcttggaaaagtcacctgaatgactcccacacctctacccactcatctccctgtcttgtggggggtatctgacctctagtactggtgccaggaaaggtgatagaacagtggttctcaattttgatttaattcatatgaactgtggctcgggcatcagattaaggcacatcaggtgattatggtgtacagccagggttgagggtcactgtcttcaaggaaacttctacacctcttacacagtggtttcacctgcagaaggaggcacctgtcctagactgctctagtgttcacaaccaatgataaatctgctgtgggtggagaatgcttgttgagccaaaagcctgcatccttcttgcttctgtcttgactgatctcatattccttcttgggcatagctcttggcaagcagtaaatcttcactctcccactgccgtcagccaagtgttcattttgtccaccacaaagataggtgtttttgggatttgataggttgcatgaaggaagcaaatagaccgtaaatgcagaatctctgtgtttacttggaaacaggctagtcattgacaacacctttaaggatagattttctttgaagataagttgctgggttatgaacatgctttaaaaagtgagcaccaaggccaggcgcagtgtcttgagcctgtaatcccagcactttgggaggccaagacgggcagatcacaaggtcgggagttcaagaccagaccagcctgaccanggtggtgaaaccccgtctctactaaaaaatacaaaaattagccgagtgtggcggtgcacgcctgtggtcccagctactcaggaggccgaggcagaagaatcgcttgaacccgggaggcggaggttgcagtgagctgagatcgcgctgctgcactccagcctgggcgacagagcgaaactctgtct

SEQ ID NO: 242033 - DNA, 558 bp, Homo sapiens
aggtgaggggacagaagtgtgtgcaggcatgtaatttgtatgtggttacagtgctacttgttttttgttttacacattgtctctgacttcctccttttcaggtctctgacatcttctagagatggaggtggaagtcagagataatgtgtaaaactgaaaagaaacgaaggagtactctaagcttgttttttgccaatgtgtagatcagaggtgtccaatcttttttttttgagacgaagtttcactattgttgcctaggctggagtgcaatggcgtgatctcggctcaatgcaacctctgcctcccgggttcaaatgattctcttacctcaccctcctgagtagctggaattacaggtgcctgtcaccatgcccggctaactttttgtattctttttttagtggagacggagtttcaccatgttggccaggctggtctcgaactcctgacctcaagtgatccgccctccttggccttccaaagtgctgggattacaggcgtgagccactgcgcctgaccggggtgtccaatcttttggcttcccagggccaccctgga

SEQ ID NO: 242034 - DNA, 669 bp, Homo sapiens
  misc_feature (573)..(573): n is a, c, g, or t
  misc_feature (576)..(576): n is a, c, g, or t
  misc_feature (595)..(595): n is a, c, g, or t
  misc_feature (599)..(599): n is a, c, g, or t
  misc_feature (616)..(616): n is a, c, g, or t
  misc_feature (625)..(625): n is a, c, g, or t
  misc_feature (628)..(628): n is a, c, g, or t
  misc_feature (658)..(658): n is a, c, g, or t
gagctcccatggaagattttagagaatagtgtgtagtgtttttgttttgttttttgtttgagtgacacacaaacctagatggtacagcctactgtgcacccaggatctatgggctcctttgatcactggcccttgtggacattttctatcttatttcatatgttctgcacattagtatagtgacaaggtaacagtaagtacttttttaaagctttagacttaggagattattgtctcaggtgcagagaccaaggaaatcgtatgtatcagtgagataggcttcccgtattatgctcatgcgttatacctgcctagctacattgcctttttttaaattaaacattatgttgaagtaatcatactattacataggcgatgtatgtattttatgattgtatgttgatatagttatggggaatctattcctatacgatgtaatcatagattcacatatagttgtatattttgcccaatttctctcagtggtaatgtttcacacatataacaatcaggatgttgacatcaatacagcccgctgattttattcacatttcccccccaggcctttaaccnttncccccaaccgggaaaaacncccnccccaatgggaatgccnatggggggnggngggaaagaaaaataatgggggaccgccaancctggggggga

SEQ ID NO: 242035 - DNA, 214 bp, Homo sapiens
acagtcccaagcttttctcataacacttttaactaaaataaatgggcagcctaatttgatccacataatgaaaacttataaatagagtgaaaaaaggcctgacttcagtcaccctagtagaaaatcacagcctcatacaagccaggtacagatgtggaagacctacaaagatcaccttccagtcttccccaaacaatccgtagctatttactgc

SEQ ID NO: 242036 - DNA, 382 bp, Homo sapiens
aaaaattcaggatgagtttattgagagcattatttttgaaagtataagatttgtgattgtaatataaacttaaatcactttgggaatgaatttaaaaaatctatgtgacacaaattaatcatcattctcattgtaaatttggcaaagtatttgtaattaggaatatctgtcatactggcactgggcaaattattctgaatgttcccatgctgaagattctctcaaaaagggaaaaaacaagatcctttgtttgtataagtacaatcagtttgctgaataaaacctttatagctacaattataacaggattgtttctacattttagcttggagatcccatgactactctgttttgctaataataaaccaatacagtgctacag

SEQ ID NO: 242037 - DNA, 406 bp, Homo sapiens
tgatgttgattcattggctttcataatgagtcaatgcttctgctgctattcacaagcttgggggattgtgagatgctcctctttcttgagtatcccatgtaatttttattgttgtacttttcctattatttctaagataatctctctagcttttcttttaacccataaatacaatttctgccatgattaattagcttttaattgtcctgattatacttttgaaataaagcgttcttagtttttgttaaatttccaaataagtttgttgatctcacaatctttcaattgtctccatctacttagaattttaatcctttcttgaatttctttacaaaaattaaagttgtattacatgttatcatgtttgaaagcaactatttaataaaagaaatactagttctaacat

SEQ ID NO: 242038 - DNA, 513 bp, Homo sapiens
tgtggagagattctcatcccacataaataagtcttcaggcgccctggtcaggacttctcaggcaaagtctcttccagcctcaataggacacagctgcactgatgttagtctcaattgatggagtgaagaagcctcatctttattcagtgtaaagcagctgccaagagaaatggcctttgagaggggtaataagttcatgaatatcacctgtgtcgtgcaaaacaatatttgatttttttgaaagtttaaattgattggaaagaacatatgaattaagtgctatctcgtgagtgaaaagttttgctgcagggtgacagagtgcgccatcaaggtgatgcatttcaaacattaccttcctgtgacacaagggagtcatggaccaaatggaacagaggaaattatgacccgctggccaggatggatctgtaacataggaatgccacaccaatatcctgcattcctatttcagagaataagaccttgagcaaataaaacaaacactgaagtagagtt

SEQ ID NO: 242039 - DNA, 199 bp, Homo sapiens
tttcctactgatcgtgaattctttagtagcatggacactatttgggagctcttattgctaggaaagttaaaagaacttaaaaattattattgaataaaaatgaattcaaagacccagtatctcatactctggtgggctcttcaaagggttttctctcatgaaacatgagaatatattaaataaaaatatttcaaaatat

SEQ ID NO: 242040 - DNA, 445 bp, Homo sapiens
atatcggctcggtccctattgtgttcggggtgggagaaccgggaaggggggtgaggtgagcccccatggtgacctgggaggacagaggtgcatggagtgtgcaaaatgtcctaagcaatcagacagtgcttgggaacaaaaatgggatcacctgcttctccagacccctgatttgagggctgggctggggggccagcttctgtctggcacatcacaccccctgtgggctacagcaggatcaaagtctcaagacctctcacggggcagtttttaactaaacatccagtcctgacggaaataatttccctggggatgagccatctttcctacttggcaaagaactagacagaaccttccagggactccctgtctggaggagctctgagcctcctgacctctccccaccctttcctgaggtttagattcccaaagccccattcgtgca

SEQ ID NO: 242041 - DNA, 449 bp, Homo sapiens
taaattgtttagcaatcagagtttctatgactgtccatcatcactgcatctcttctatgacatgagacattggtgcgatgtgtcattatgttcaaatgtgtgggtcggccagggtgtatctgtatggactgaatgtgtccccataaaatttgtatgttgaagccctaacccccaatatgaggatatttggagctggggcctttgggaggtaattaagttagatgaggtcagatggacatggcccctgtggttgagattagccctaataccaagagatagcagagagctccaccctactgttggccacgtgcacacatagggagaagggggccgtctataagcaaggaagagagccctcatcagaaaccgatcgcgccagcatgctgatcttggatctgaggcctccagaactgagggaaaataaatgtctgctgttgaagtcaaaaaaa

SEQ ID NO: 242042 - DNA, 387 bp, Homo sapiens
atcttcatttcaatcatctgaaaggcaagaagttttaccgcaaatttacactagtatccaaagttcattagtaagtcgtcctaacatattctctaggacagtgttctgcaactatgaagccattgtggagacaaacgagattgcttagtaatctaatgtgtgttgagaacagggcagtaattaatcagtggctgtcgtgcttacaccactataaagtattacgagaacctccacgccgaccttcccctcccctattatcagaccattagtgaagctctgtacaagtaacaacagtggagccctgcttaagcatatgaccccaatagcttgtggataagctttgtgagcattttcacaacggtcacttgaattctcattatactttct

SEQ ID NO: 242043 - DNA, 287 bp, Homo sapiens
acatgcagaaaagtgcacgtatcaaaagtgtacacagtgatgttgcacaacagtgtgaacgtacttactgccgctcaactgtacacttaaaaatgattaaaatgataaattttatgttgcctatattttaccacaattttcaaaaagtatacagtttgctgaattttcacaagctgaacatgcctgtgtggccaccagccaggtcaagaagagtgttacctgccccccaggagtcctcctcctgtagccacaggaagtttttaaaaaataataaacagctaccattc

SEQ ID NO: 242044 - DNA, 566 bp, Homo sapiens
cccggaccctacagccatcaagatgttgatgcctaagaagaaccagattgccatttatgactcctttttaaggagggagtcatggtggccaaggacatccacatgcctaagcacctggagctgtcagacaagaatgtgtccaaccttcctgtcataaaggccatgcagtctctcaagtcccgaggctacgtgaaggcacagtttgcctggagacatttctactggtaccttcccaatgagggtatccagtatctccgtgattaccttcatctgcccccggagattgtgcctgccactctatgccgtagccgtccagggactggcaggcctcggcctaaaggtctgaagggtgagtgacctgcaagactcacaagagggaaagccgacagagatacctacagacggagtgctgtgccccctggtgccgacaagaaagccgaggctgggactgggtcagcaactgaattccagtttagaggcgaatttggtcatggacatggtcggccacctcaataaatttggagagggttattttgcattgtataaacatccagccaaaaaagctt

SEQ ID NO: 242045 - DNA, 395 bp, Homo sapiens
atgttgtttgtagtagggaataactggcaacaaatatacatgaataagtgaatgattaaatatattatggggctgggagcagtggctcatgcctgtaatcccagcactttgggaggctgaggccggcagattgtttgaagccaggagtttgagaccagcctgggcagcgtagcaaaaccctgtctctacaaaaaatacaaaagttagaggttgctgtgagctgtggtcatgtcactgcatttcaacctgggcaacagcagtatctgtctcaaaaaaatgtattatgagtcatctatgtaatgaatactatagtaggcattaaaacaataggttggctttaaatttcccgaggaaaaaaaatgtacttgcgacattaaaaaacaagatgcagaaca

SEQ ID NO: 242046 - DNA, 443 bp, Homo sapiens
atggaataaaacttgaaatcaataagaagaagaaatttggaaactgtacaaatatatggacattaaacatgctattgaataatcattgggtcaatgaagaaattaagatggacatcaaaaaaattttttaaacagaaaatggaaacacatcatgcaaaacctatgggatacagcaaaagcagtactaggaggaaagtttatagcaataaatgcctacaccaaaaaagtagaaagatttcaaataaacaacctaatgatgcacctcaaggaactcaaaaagcaagaacaaatcaaacacacaattagtagaaagaaaaaatataaataacatagcagaaccaaatgcaacagagacaaaaaaaatgcaaagaatcaacaagataaaagttggttttttgaaaagttaaacaaaattgataaaccactagtgaggctaaccaaaa

SEQ ID NO: 242047 - DNA, 607 bp, Homo sapiens
tgtatttttagtgttatatccctaacatctagcagagggtcagggctcagcacattgggggctcttaatttgtcttggttgattgaatgaatgagtcaatgaattgtctgtgaacagtctcagacgtcagaaagattttagttagaatcccagactactctttactactctctgaccttgagcacgttacttaacctctctggcctcagctgaggcctctctggcctcagcatttctctgaaatgctggtgttattaataatagtacctacctcataaggttgataagaggaacaaaggaggtaatgtacctcatctataggatggcaaaagtgaactgtcatgaacagtgcttgggtccagggcaggggtggtaggaggcaggtcatgggcatcattgtcagcaaagtgagagccactccagctgcttgccttctctgtgcctttgtgtccccaaccagccatggagaagaaggattggggatcataagagagtctccaaagcacctgactttgttcccagagcccttagcccctttccacattctgccatttgatggacgaccatgggcagatcttaccttttaaataacactctgcagcccagc

SEQ ID NO: 242048 - DNA, 343 bp, Homo sapiens
ttttgtagagaaaaggtctggctttgtcgcctaggctgatcttgaactcctgtgtttcagtgatcctcctgcctcagcctcccaaagtgttgggcttacaggcctgaaccaccacgcccggccaaaaattgggttcctaagcagaattctatacgggtggcctcaaccactttacttgctatgtgaccctgggcaagtcacatcacccctgtctcagtttctttttcttttctttcttttttttttgagacggagtttcgctcttgttgcccaggctgtagttcaatggcgcaatctcggctcactgcaacctccgtctcctgggttcaagcaattctcctgc

SEQ ID NO: 242049 - DNA, 538 bp, Homo sapiens
ttttcttcctcatcaacaaagctgatcgatgggggctgaagccccagggaagaagcatctgttgtaactcaaggatcccggcttgagctgaggatggaattaacaggcacagagtggttggcagcccaacgtttgtgcaagtctggcacatgcacacatcattagcaactatgctggagaagaatgatcaaggaggtgaggaggggaatggatctgactaaagggatgttcaagaaaggaaattccaagcacttgggtaaaagcttcatagctaaaatgaatgaactcgtgagcaaagcaaacagccaggtacatttgggagatgctgacagacaatctggataattttgcctctgaaactttcaaaacaaagtcatttcatgcagtgaattccccagagtggctgcctctttcacttagctccttcggctgtgtctccttcactaaaatgaagcccccatgaaggcaaaaattttgctgtcctgttcatggctccaatcttggctcctggttgataatattaaatattcatggaata

SEQ ID NO: 242050 - DNA, 652 bp, Homo sapiens
agcaaactaacaccagaacacaaaaccaaacactgcacgttctcactcataagtgggagtgggggtcaggggactggggtgggatagcattaggagaaatacctaatgtagatgacaagttgatgagtgcagcaaacactatggcacgtgtacacctatgtaacaaacctgcacgttctgcacatgtaccccagaacttaaagtataataataaacaaacaaaaaatcccccttagccctacttcctcctctagtattgttccatttccctcctatcttttacaacaaaattcctcaaagtactatctaaacttctatctccagtttctctcttctcacttgttcttgctttccctttaattaggccttatctcttatcagcctacctaatgcgctcttagcaaatcacagatgacattcacatagcaaactccaatgattgattctaatcctcatctgagtattagcagtttggtagccaaccacctgtacaaacacaaattttttaaccaccttacatttgacagctgttgatttttactacatataacatttccttgagattaaaaacttatgaaaaaactttgtgaatataacagaaattaacaaccttatatactctgtcagaaaataatttaattttaccaaggtt

SEQ ID NO: 242051 - DNA, 487 bp, Homo sapiens
cagtggtccgagtgtcctggctgttggtgctgaatcttagaaggaatgaactaggccaaagtggtagaaataaagaagagacaagccaagggcatctaggcaaaaaccatagcatgtgcaagggtcatgaggcttcaaaggttagtgtgtcaggaagatcagcttggccacaagtaggttgaagaggtaggtaaagtgatgagaaatgtaattggaagttaagcaaaggtgaaatatttattcaggtgataaatattgattgagtgcttaaaattttaattttaattaacattttaatgtgtcaggagtgttctaagtgtagaagtgaacaaaatagcacatgaacaaatgaacaaaatgtagctgaccatgtagaaatgaacaaaatagtcttggagcttacattttaggaagttattttatatgggtcttttatgccagtttttagttttaaggaagcatataataactaaggcggtctgtggct

SEQ ID NO: 242052 - DNA, 696 bp, Homo sapiens
ttttttaaaaaaaaagaaagaaaaaaatttttacatctgtttcatgagggctattggtttatagttctgttgtggtgtccttgtttggctttggtagcagggtaatataggccttgtaaatgagttgagaagtgttccctcctctgagtttgtatggaatgatatttcttcctaaaaagtttgataaattcagtgctgaggccatttaggcttggacttttctttgtggatttttaaaatcttttattttggaataattttagatttatagaaaaattgaaaaagtaatagagttcctatatatccctcatctagtacatatgtcaaaactaagaagcaaacactggtatattacttttatataaacttcaggctttattcagcttctggactttttctgttccatgatctaatccaggatatcacattaaatatatttccagtgtgatgtttattttcttccttttacttactgggtttgatttgttcttctttttctagcctctcaaagtggaagcttacaggattgattttagacctttcttcctttctaatataagctctaaagctatttatttccccgtaagcattgctttgctgcatctcataaatttttttccatacagtgtcactctcaggatatcatactttttttatgttgtgttttcagcttcattaaacttggcatcattttta

SEQ ID NO: 242053 - DNA, 402 bp, Homo sapiens
gcaaagtatatccaagcttaatttttgtgcattggctatatgaattttatgctaaaaactgtacaaccgttttaatgctattaaagacataaacccattgaaccacttcctatttctttgtatttgtactagaaaaataataaaatgctaccattttagtcagaaatgcagtggagagttaaataatacactcagcatctgtgcttttcctttgtatgttgctttgattgcagtacagatggcatacttgggcttgatttatggagaatctttgttcattaaccttgtctcattgtcctgatcaaaactggacgctttatgtttgtgttagaagttgttagttctcttagattattgtctttaggagctttgcattccttcttagaaagtattaaaaaaaaa

SEQ ID NO: 242054 - DNA, 641 bp, Homo sapiens
tttttgtatttttagtagagatggggtttcaccatgttggccaggctggtcttgaactcctgacttcaggtgaaccgcctaccttggtactcccagagtgctgggattgcaggtgtaagccactgcatctggcctcagagagcataatctgtattccctagcagctgtttttactattgtttttcttatagtcttcaaagatgtattgggctttgaaaaccttttggctcctaggaagaagctatttctgcttggtggagtcctagtctggaaagtgaattctctgtttacactgccccattcatatcctgtcccatgaactacagctacagatcctctttgtaacactgctcagaatagaaagtttaattactctacccctaaaattttgcagattgcaagaggctataagctactggtatagcctagagatcaagggatcttgtgtggtgttatgacaactacttctatttatatgtgatgttcactttaaatatacacagacatatctgtacgttagttgaagggggtctcaaaaatctcatctgacctttaattagactccaataagaagtggttaagacattgacgtatgggccaggcgtctcaaaaaaaaaatggaaaaaaatatttaaaaagaa

SEQ ID NO: 242055 - DNA, 445 bp, Homo sapiens
ctattctgtcgtagaatctttcaaataatgaatttaaaagtataaaggtgcaacagcttccactagtatgaaagaacaactgatagctattgagtaatattgaaaatgttaagcaaaattgttaaaaatgtttgcttaactgttggatggtattatttaaaagtattatcattgagaatacatcaataacattaatgcagattatgggggatttcctccacttgggtctctgcatctttgtgatagattcttcctggcaatgaagctaaggaaatcaaatattggaatgagacctcagtagtgtaaaatgtaaactaaggtcctaaaatgtaacgaagaatattcaataacataactctcactaagtagtattaattaataataattgttagagcaaaaagtgcttttttgattaaaacatacaataaaattatttttgaatagt

SEQ ID NO: 242056 - DNA, 583 bp, Homo sapiens
tagcgatatgctagggaaaagcatatagagacggactggatcaaggtgacctgcaaagttgaaagaaccagactgacaagacacttcacaaaagccatgctgaatatgaaagacaaaggaaacaatctttcaaatgtttaaaaaaatatttatgctactaaaagtagcattgatttcagaaggcagaaaaaaattttcagacagaggaaggcctctaaatagtgcaaaccacacattgaactacaaagaattgtagaatcattacaaatatctcaatcagaaaatggttaggggaggatggcaagaatttaaacattgaaaattaggtctgaaaatggagggatgatgtcaaaaaaataattggtaacaattctgaaccaaaattcaacgtatttacaacaggggaagtaacaaaaggcaagtgaaaggaagataaataatatcgtggtaaagttctcaatattttaggggatttaggagcagctgtacagcttattgattttaaatttactttggtaaagtttaatatctttggttaattactagaaaaatagaggctttgtaggtttgaagactgaggaga

SEQ ID NO: 242057 - DNA, 359 bp, Homo sapiens
tgattccattgcttaggttaatattcaaatggcatccttaccctttcattataaagaatgagaaaagaagtaaactaaaaatctataaacatgtgggtatttataaacctcatatacagtccttccagtatcaaatgcctaaaagagctgctgataaaaagtgtgagcccccaaagacaactaaaaatgtaagatgtttatgttcctgcaagatataagcacaggaacccaaatgattccaggacagtagaaagtgatgcttcacaacagaggaataacgttctgtggatattaggaggaagaagagaaaatttgcagttagtgaatcatgaaaggtttcctggaggagaagcatttga

SEQ ID NO: 242058 - DNA, 189 bp, Homo sapiens
tttaaaaatcagaagcctggcagtctctggaagaggaagaccatcttcggattaccctgaaattccctattccaggagaattgaaaccatttgtcctgtctaacagcaaccaagaaaagcatctttgtcaggccttatctttatttgacctcagagctcagttagtgagaaatgccctgtgttatttga

SEQ ID NO: 242059 - DNA, 320 bp, Homo sapiens
gatgtgcctgtggaaacagatctttaattctatttaattttaactaatttaatttaatgtttttattgtttcattatattttaatttttgtgggtacatagtaggtgtacatatttatggggtacatgagatgtttggatacaggcatgcaatgtgaaataagcacatcatggagaatggggtatccatcccctcaagcatttatcctttgagttacaaacaatccaattacgctcctggagttatcttaaaatgtacaattaagttattattgactatagtcaccctgttgtgctataaaataatagttattattcatt

SEQ ID NO: 242060 - DNA, 3645 bp, Homo sapiens
gggccgcggccgccgcagagcgccgggggcgggaggagcaaacgcaggaggccatggccgccgccgccgccgccgccgacgccggcgccggctgctaaggggctcggcccgcgagcgcctgctgccgcggacgatggtgaccgtacgggccgggccgctgccgctgccgctgcctccgcctccccagaagcaacatccgaggctcggcgcagaagagccgccgctgtgagccgtgccgtaccggcccccgccgccgcccgaggagaacgggagggcgggcgagagagccggggagttgcggagcccgcccgccggcagcgccgctccccagggagggagtccgcagcctgaggtcttctccaagaaaaaaaaaaagaaaaaaaaaaacaacatggctgcaaaggagaaactggaggcagtgttaaattgtggccctgagggtgccaagcatcatgctgttggatgtcctgtacagatgggatgtcagctcctttttccagcagatccaaagaagtagccttagtaataaccctcttttccagtataagtatttggctcttaatatgcattatgtaggttatatcttaagtgtggtgctgctaacattgcccaggcagcatctggttcagctttatctatattttttgactgctctgctcctctatgctggacatcaaatttccagggactatgttcggagtgaactggagtttgcctatgagggaccaatgtatttagaacctctctctatgaatcggtttaccacagccttaataggtcagttggtggtgtgtactttatgctcctgtgtcatgaaaacaaagcagatttggctgttttcagctcacatgcttcctctgctagcacgactctgccttgttcctttggagacaattgttatcatcaataaatttgctatgatttttactggattggaagttctctattttcttgggtctaatcttttggtaccttataaccttgctaaatctgcatacagagaattggttcaggtagtggaggtatatggccttctcgccttgggaatgtccctgtggaatcaactggtagtccctgttcttttcatggttttctggctcgtcttatttgctcttcagatttactcctatttcagtactcgagatcagcctgcatcacgtgagaggcttcttttcctttttctgacaagtattgcggaatgctgcagcactccttactctcttttgggtttggtcttcacggtttcttttgttgccttgggtgttctcacactctgcaagttttacttgcagggttatcgagctttcatgaatgatcctgccatgaatcggggcatgacagaaggagtaacgctgttaatcctggcagtgcagactgggctgatagaactgcaggttgttcatcgggcattcttgctcagtattatccttttcattgtcgtagcttctatcctacagtctatgttagaaattgcagatcctattgttttggcactgggagcatctagagacaagagcttgtggaaacacttccgtgctgtaagcctttgtttatttttattggtattccctgcttatatggcttatatgatttgccagtttttccacatggatttttggcttcttatcattatttccagcagcattcttacctctcttcaggttctgggaacactttttatttatgtcttatttatggttgaggaattcagaaaagagccagtggaaaacatggatgatgtcatctactatgtgaatggcacttaccgcctgctggagtttcttgtggccctctgtgtggtggcctatggcgtctcagagaccatctttggagaatggacagtgatgggctcaatgatcatcttcattcattcctactataacgtgtggcttcgggcccagctggggtggaagagctttcttctccgcagggatgctgtgaataagattaaatcgttacccattgctacgaaagagcagcttgagaaacacaatgatatttgtgccatctgttatcaggacatgaaatctgctgtgatcacgccttgcagtcattttttccatgcaggctgtcttaagaaatggctgtatgtccaggagacctgccctctgtgccactgccatctgaaaaactcctcccagcttccaggattaggaactgaagcagttctacagactcatgctggagctgagcaaaacgtcatgtttcaggaaggtactgaacccccaggccaggagcatactccagggaccaggatacaggaaggttccagggacaataatgagtacattgccagacgaccagataaccaggaaggggcttttgaccccaaagaatatcctcacagtgcgaaagatgaagcacatcctgttgaatcagcctagaggagaagcagcaggaatgatgctttgatactctggaggagaagttaactcaagatggaattcatgttctgatttgaggaatgaaaatgagatgatcaggcaggaaactgacattccaaggatctaatccaggaagtactctcagtggggaccacctgctttcatcccctgacattgtgggagaaattttgcaatgtatgctaatcaaaatgtatttatatgttctctgctgatgttttatagaggtttgtgaagaaaattcaacctcagcaacttcagaaactgcccctgatacgtgtgagagagaaataaaatcagattttgagtgttgaagggactgaggaagtgaggataaagagcatgaggacagcatggaaagaaggaggcagaagtggaactgaactttcactctccatgggacagatcaatctcattatcaagtctgaatagcaaccagccctctcctccaccccgtttctcctcagttaattggagctcagtcaggtgattattgagtcttgtacagcactgaaatgaaatcaaagatgaagaagcattgattgtattcaaagattgaagcacgctcatactttgtatgtgctttagggaaggggtgggtgggcacttgggccttgcgggtgcattcatgtaatctgagactcttgaactttatgacggagtcttcaatattttgatgtatatgaaacttttgttaaatatgttgtatacttcgctggctgtgtgaagtaaactaaaactctgatgaacactttggagtctgctttagtgaaggagaccaaagtgggaagggctttagggcactgatagaggccctgggtgtacttttcaatcctgtgtaatgtttaattcttgcaactgaatcaaaacagtgttaaattatggcaatatttgcactttgggaatgagtacataactgtatgatcacactctgcaaatgccacttttaaagctgttaatagactttgcaccttttctttgacaaggatgtgtcatatttaaatttttacattcatcatggctacaggtagaactggggaggggggaatgtaattttttatgggaattttgatatgaaaagaaactagtcatttatttatacaataggcttggctcaaaaagtgtttttcagacctcggtattcctaatgtgggatgtgactttattttatttttagtagcaaatttggatgtagactgacagacatagctgaatgtcttaataaatttaaatttgaagataa

SEQ ID NO: 242061 - DNA, 3630 bp, Homo sapiens
gggccgcggccgccgcagagcgccgggggcgggaggagcaaacgcaggaggccatggccgccgccgccggcgccggctgctaaggggctcggcccgcgagcgcctgctgccgcggacgatggtgaccgtacgggccgggccgctgccgctgccgctgcctccgcctccccagaagcaacatccgaggctcggcgcagaagagccgccgctgtgagccgtgccgtaccggcccccgccgccgcccgaggagaacgggagggcgggcgagagagccggggagttgcggagcccgcccgccggcagcgccgctccccagggagggagtccgcagcctgaggtcttctccaagaaaaaaaaaaagaaaaaaaaaaacaacatggctgcaaaggagaaactggaggcagtgttaaattgtggccctgagggtgccaagcatcatgctgttggatgtcctgtacagatgggatgtcagctcctttttccagcagatccaaagaagtagccttagtaataaccctcttttccagtataagtatttggctcttaatatgcattatgtaggttatatcttaagtgtggtgctgctaacattgcccaggcagcatctggttcagctttatctatattttttgactgctctgctcctctatgctggacatcaaatttccagggactatgttcggagtgaactggagtttgcctatgagggaccaatgtatttagaacctctctctatgaatcggtttaccacagccttaataggtcagttggtggtgtgtactttatgctcctgtgtcatgaaaacaaagcagatttggctgttttcagctcacatgcttcctctgctagcacgactctgccttgttcctttggagacaattgttatcatcaataaatttgctatgatttttactggattggaagttctctattttcttgggtctaatcttttggtaccttataaccttgctaaatctgcatacagagaattggttcaggtagtggaggtatatggccttctcgccttgggaatgtccctgtggaatcaactggtagtccctgttcttttcatggttttctggctcgtcttatttgctcttcagatttactcctatttcagtactcgagatcagcctgcatcacgtgagaggcttcttttcctttttctgacaagtattgcggaatgctgcagcactccttactctcttttgggtttggtcttcacggtttcttttgttgccttgggtgttctcacactctgcaagttttacttgcagggttatcgagctttcatgaatgatcctgccatgaatcggggcatgacagaaggagtaacgctgttaatcctggcagtgcagactgggctgatagaactgcaggttgttcatcgggcattcttgctcagtattatccttttcattgtcgtagcttctatcctacagtctatgttagaaattgcagatcctattgttttggcactgggagcatctagagacaagagcttgtggaaacacttccgtgctgtaagcctttgtttatttttattggtattccctgcttatatggcttatatgatttgccagtttttccacatggatttttggcttcttatcattatttccagcagcattcttacctctcttcaggttctgggaacactttttatttatgtcttatttatggttgaggaattcagaaaagagccagtggaaaacatggatgatgtcatctactatgtgaatggcacttaccgcctgctggagtttcttgtggccctctgtgtggtggcctatggcgtctcagagaccatctttggagaatggacagtgatgggctcaatgatcatcttcattcattcctactataacgtgtggcttcgggcccagctggggtggaagagctttcttctccgcagggatgctgtgaataagattaaatcgttacccattgctacgaaagagcagcttgagaaacacaatgatatttgtgccatctgttatcaggacatgaaatctgctgtgatcacgccttgcagtcattttttccatgcaggctgtcttaagaaatggctgtatgtccaggagacctgccctctgtgccactgccatctgaaaaactcctcccagcttccaggattaggaactgaagcagttctacagactcatgctggagctgagcaaaacgtcatgtttcaggaaggtactgaacccccaggccaggagcatactccagggaccaggatacaggaaggttccagggacaataatgagtacattgccagacgaccagataaccaggaaggggcttttgaccccaaagaatatcctcacagtgcgaaagatgaagcacatcctgttgaatcagcctagaggagaagcagcaggaatgatgctttgatactctggaggagaagttaactcaagatggaattcatgttctgatttgaggaatgaaaatgagatgatcaggcaggaaactgacattccaaggatctaatccaggaagtactctcagtggggaccacctgctttcatcccctgacattgtgggagaaattttgcaatgtatgctaatcaaaatgtatttatatgttctctgctgatgttttatagaggtttgtgaagaaaattcaacctcagcaacttcagaaactgcccctgatacgtgtgagagagaaataaaatcagattttgagtgttgaagggactgaggaagtgaggataaagagcatgaggacagcatggaaagaaggaggcagaagtggaactgaactttcactctccatgggacagatcaatctcattatcaagtctgaatagcaaccagccctctcctccaccccgtttctcctcagttaattggagctcagtcaggtgattattgagtcttgtacagcactgaaatgaaatcaaagatgaagaagcattgattgtattcaaagattgaagcacgctcatactttgtatgtgctttagggaaggggtgggtgggcacttgggccttgcgggtgcattcatgtaatctgagactcttgaactttatgacggagtcttcaatattttgatgtatatgaaacttttgttaaatatgttgtatacttcgctggctgtgtgaagtaaactaaaactctgatgaacactttggagtctgctttagtgaaggagaccaaagtgggaagggctttagggcactgatagaggccctgggtgtacttttcaatcctgtgtaatgtttaattcttgcaactgaatcaaaacagtgttaaattatggcaatatttgcactttgggaatgagtacataactgtatgatcacactctgcaaatgccacttttaaagctgttaatagactttgcaccttttctttgacaaggatgtgtcatatttaaatttttacattcatcatggctacaggtagaactggggaggggggaatgtaattttttatgggaattttgatatgaaaagaaactagtcatttatttatacaataggcttggctcaaaaagtgtttttcagacctcggtattcctaatgtgggatgtgactttattttatttttagtagcaaatttggatgtagactgacagacatagctgaatgtcttaataaatttaaatttgaagataa

SEQ ID NO: 242062 - DNA, 3671 bp, Homo sapiens
gggccgcggccgccgcagagcgccgggggcgggaggagcaaacgcaggaggccatggccgccgccgccgccgccgccgacgccggcgccggctgctaaggggctcggcccgcgagcgcctgctgccgcggacgatggtgaccgtacgggccgggccgctgccgctgccgctgcctccgcctccccagaagcaacatccgaggctcggcgcagaagagccgccgctgtgagccgtgccgtaccggcccccgccgccgcccgaggagaacgggagggcgggcgagagagccggggagttgcggagcccgcccgccggcagcgccgctccccagggagggagtccgcagcctgaggtcttctccaagaaaaaaaaaaagaaaaaaaaaaacaacatggctgcaaaggagaaactggaggcagtgttaaattgtggccctgagggtgccaagcatcatgctgttggatgtcctgtacagatgggatgtcagctcctttttccagcagatccaaagaagtagccttagtaataaccctcttttccagtataagtatttggctcttaatatgcattatgtaggttatatcttaagtgtggtgctgctaacattgcccaggcagcatctggttcagctttatctatattttttgactgctctgctcctctatgctggacatcaaatttccagggactatgttcggagtgaactggagtttgcctatgagggaccaatgtatttagaacctctctctatgaatcggtttaccacagccttaataggtcagttggtggtgtgtactttatgctcctgtgtcatgaaaacaaagcagatttggctgttttcagctcacatgcttcctctgctagcacgactctgccttgttcctttggagacaattgttatcatcaataaatttgctatgatttttactggattggaagttctctattttcttgggtctaatcttttggtaccttataaccttgctaaatctgcatacagagaattggttcaggtagtggaggtatatggccttctcgccttgggaatgtccctgtggaatcaactggtagtccctgttcttttcatggttttctggctcgtcttatttgctcttcagatttactcctatttcagtactcgagatcagcctgcatcacgtgagaggcttcttttcctttttctgacaagtattgcggaatgctgcagcactccttactctcttttgggtttggtcttcacggtttcttttgttgccttgggtgttctcacactctgcaagttttacttgcagggttatcgagctttcatgaatgatcctgccatgaatcggggcatgacagaaggagtaacgctgttaatcctggcagtgcagactgggctgatagaactgcaggttgttcatcgggcattcttgctcagtattatccttttcattgtcgtagcttctatcctacagtctatgttagaaattgcagatcctattgttttggcactgggagcatctagagacaagagcttgtggaaacacttccgtgctgtaagcctttgtttatttttattggtattccctgcttatatggcttatatgatttgccagtttttccacatggatttttggcttcttatcattatttccagcagcattcttacctctcttcaggttctgggaacactttttatttatgtcttatttatggttgaggaattcagaaaagagccagtggaaaacatggatgatgtcatctactatgtgaatggcacttaccgcctgctggagtttcttgtggccctctgtgtggtggcctatggcgtctcagagaccatctttggagaatggacagtgatgggctcaatgatcatcttcattcattcctactataacgtgtggcttcgggcccagctggggtggaagagctttcttctccgcagggatgctgtgaataagattaaatcgttacccattgctacgaaagagcagcttgagaaacacaatgatatttgtgccatctgttatcaggacatgaaatctgctgtgatcacgccttgcagtcattttttccatgcaggctgtcttaagaaatggctgtatgtccaggagacctgccctctgtgccactgccatctgaaaaactcctcccagcttccaggattaggaactgaagcagttctacagactcatgctggagctgagcaaaacgtcatgtttcaggaaggtactgaacccccaggccaggagcatactccagggaccaggatacaggaaggttccagggacaataatgagtacattgccagacgaccagataaccaggaaggggcttttgaccccaaagaatatcctcacagtgcgaaagatgaagcacatcctgttgaatcagcctagaggagaagcagcaggaatgatgctttgatactctggaggagaagttaactcaagatggaattcatgttctgatttgaggaatgaaaatgagatgatcaggcaggaaactgacattccaaggatctaatccaggaagtactctcagtggggaccacctgctttcatcccctgacattgtgggagaaattttgcaatgtatgctaatcaaaatgtatttatatgttctctgctgatgttttatagaggtttgtgaagaaaattcaacctcagcaacttcagaaactgcccctgatacgtgtgagagagaaataaaatcagattttgagtgttgaagggactgaggaagtgaggataaagagcatgaggacagcatggaaagaaggaggcagaagtggaactgaactttcactctccatgggacagatcaatctcattatcaagtctgaatagcaaccagccctctcctccaccccgtttctcctcagttaattggagctcagtcaggtgattattgagtcttgtacagcactgaaatgaaatcaaagatgaagaagcattgattgtattcaaagattgaagcacgctcatactttgtatgtgctttagggaaggggtgggtgggcacttgggccttgcgggtgcattcatgtaatctgagactcttgaactttatgacggagtcttcaatattttgatgtatatgaaacttttgttaaatatgttgtatacttcgctggctgtgtgaagtaaactaaaactctgatgaacactttggagtctgctttagtgaaggagaccaaagtgggaagggctttagggcactgatagaggccctgggtgtacttttcaatcctgtgtaatgtttaattcttgcaactgaatcaaaacagtgttaaattatggcaatatttgcactttgggaatgagtacataactgtatgatcacactctgcaaatgccacttttaaagctgttaatagactttgcaccttttctttgacaaggatgtgtcatatttaaatttttacattcatcatggctacaggtagaactggggaggggggaatgtaattttttatgggaattttgatatgaaaagaaactagtcatttatttatacaataggcttggctcaaaaagtgtttttcagacctcggtattcctaatgtgggatgtgactttattttatttttagtagcaaatttggatgtagactgacagacatagctgaatgtcttaataaatttaaatttgaagataaaaaaaaaaaaaaaaacacaaaaaaag

SEQ ID NO: 242063 - DNA, 1302 bp, Homo sapiens
  misc_feature (13)..(13): n is a, c, g, or t
ccccggcagtgcngactgggctgatagaactgcaggttgttcttcgggcattcttgctcagtattatccttttgagtgtcgtagcttctatgaatgatcctgccattaatcggggcatgacagaaggagtaacgctgttaatcctggcagtgcagactgggctgatagaactgcaggttgttcatcgggcattcttgctcagtattatccttttcattgtcgtaaaattttgcaatgtatgctaatcaaaatgtatttatatgttctctgctgatgttttatagaggtttgtgaagaaaattcaacctcagcaacttcagaaactgcccctgatacgtgtgagagagaaataaaatcagattttgagtgttgaagggactgaggaagtgaggataaagagcatgaggacagcatggaaagaaggaggcagaagtggaactgaactttcactctccatgggacagatcaatctcattatcaagtctgaatagcaaccagccctctcctccaccccgtttctcctcagttaattggagctcagtcaggtgattattgagtcttgtacagcactgaaatgaaatcaaagatgaagaagcattgattgtattcaaagattgaagcacgctcatactttgtatgtgctttagggaaggggtgggtgggcacttgggccttgcgggtgcattcatgtaatctgagactcttgaactttatgacggagtcttcaatattttgatgtatatgaaacttttgttaaatatgttgtatacttcgctggctgtgtgaagtaaactaaaactctgatgaacactttggagtctgctttagtgaaggagaccaaagtgggaagggctttagggcactgatagaggccctgggtgtacttttcaatcctgtgtaatgtttaattcttgcaactgaatcaaaacagtgttaaattatggcaatatttgcactttgggaatgagtacataactgtatgatcacactctgcaaatgccacttttaaagctgttaatagactttgcaccttttctttgacaaggatgtgtcatatttaaatttttacattcatcatggctacaggtagaactggggaggggggaatgtaattttttatgggaattttgatatgaaaagaaactagtcatttatttatacaataggcttggctcaaaaagtgtttttcagacctcggtattcctaatgtgggatgtgactttattttatttttagtagcaaatttggatgtagactgacagacatagctgaatgtcttaataaatttaaatttgaagataa

SEQ ID NO: 242064 - DNA, 2706 bp, Homo sapiens
gggccgcggccgccgcagagcgccgggggcgggaggagcaaacgcaggaggccatggccgccgccgccgccgccgccgacgccggcgccggctgctaaggggctcggcccgcgagcgcctgctgccgcggacgatggtgaccgtacgggccgggccgctgccgctgccgctgcctccgcctccccagaagcaacatccgaggctcggcgcagaagagccgccgctgtgagccgtgccgtaccggcccccgccgccgcccgaggagaacgggagggcgggcgagagagccggggagttgcggagcccgcccgccggcagcgccgctccccagggagggagtccgcagcctgaggtcttctccaagaaaaaaaaaaagaaaaaaaaaaacaacatggctgcaaaggagaaactggaggcagtgttaaattgtggccctgagggtgccaagcatcatgctgttggatgtcctgtacagatgggatgtcagctcctttttccagcagatccaaagaagtagccttagtaataaccctcttttccagtataagtatttggctcttaatatgcattatgtaggttatatcttaagtgtggtgctgctaacattgcccaggcagcatctggttcagctttatctatattttttgactgctctgctcctctatgctggacatcaaatttccagggactatgttcggagtgaactggagtttgcctatgagggaccaatgtatttagaacctctctctatgaatcggtttaccacagccttaataggtcagttggtggtgtgtactttatgctcctgtgtcatgaaaacaaagcagatttggctgttttcagctcacatgcttcctctgctagcacgactctgccttgttcctttggagacaattgttatcatcaataaatttgctatgatttttactggattggaagttctctattttcttgggtctaatcttttggtaccttataaccttgctaaatctgcatacagagaattggttcaggtagtggaggtatatggccttctcgccttgggaatgtccctgtggaatcaactggtagtccctgttcttttcatggttttctggctcgtcttatttgctcttcagatttactcctatttcagtactcgagatcagcctgcatcacgtgagaggcttcttttcctttttctgacaagtattgcggaatgctgcagcactccttactctcttttgggtttggtcttcacggtttcttttgttgccttgggtgttctcacactctgcaagttttacttgcagggttatcgagctttcatgaatgatcctgccatgaatcggggcatgacagaaggagtaacgctgttaatcctggcagtgcagactgggctgatagaactgcaggttgttcatcgggcattcttgctcagtattatccttttcattgtcgtagcttctatcctacagtctatgttagaaattgcagatcctattgttttggcactgggagcatctagagacaagagcttgtggaaacacttccgtgctgtaagcctttgtttatttttattggtattccctgcttatatggcttatatgatttgccagtttttccacatggatttttggcttcttatcattatttccagcagcattcttacctctcttcaggttctgggaacactttttatttatgtcttatttatggttgaggaattcagaaaagagccagtggaaaacatggatgatgtcatctactatgtgaatggcacttaccgcctgctggagtttcttgtggccctctgtgtggtggcctatggcgtctcagagaccatctttggagaatggacagtgatgggctcaatgatcatcttcattcattcctactataacgtgtggcttcgggcccagctggggtggaagagctttcttctccgcagggatgctgtgaataagattaaatcgttacccattgctacgaaagagcagcttgagaaacacaatgatatttgtgccatctgttatcaggacatgaaatctgctgtgatcacgccttgcagtcattttttccatgcaggctgtcttaagaaatggctgtatgtccaggagacctgccctctgtgccactgccatctgaaaaactcctcccagcttccaggattaggaactgaagcagttctacagactcatgctggagctgagcaaaacgtcatgtttcaggaaggtactgaacccccaggccaggagcatactccagggaccaggatacaggaaggttccagggacaataatgagtacattgccagacgaccagataaccaggaaggggcttttgaccccaaagaatatcctcacagtgcgaaagatgaagcacatcctgttgaatcagcctagaggagaagcagcaggaatgatgctttgatactctggaggagaagttaactcaagatggaattcatgttctgatttgaggaatgaaaatgagatgatcaggcaggaaactgacattccaaggatctaatccaggaagtactctcagtggggaccacctgctttcatcccctgacattgtgggagaaattttgcaatgtatgctaatcaaaatgtatttatatgttggcaactacccctctaggatcttcaagcggtactctgaggagctgcacagcagttcctgaattgtctttggctctgtgagcgatcagagaaaggtgat

SEQ ID NO: 242065 - DNA, 1363 bp, Homo sapiens
gggccgcggccgccgcagagcgccgggggcgggaggagcaaacgcaggaggccatggccgccgccgccgccgccgccgacgccggcgccggctgctaaggggctcggcccgcgagcgcctgctgccgcggacgatggtgaccgtacgggccgggccgctgccgctgccgctgcctccgcctccccagaagcaacatccgaggctcggcgcagaagagccgccgctgtgagccgtgccgtaccggcccccgccgccgcccgaggagaacgggagggcgggcgagagagccggggagttgcggagcccgcccgccggcagcgccgctccccagggagggagtccgcagcctgaggtcttctccaagaaaaaaaaaaagaaaaaaaaaaacaacatggctgcaaaggagaaactggaggcagtgttaaattgtggccctgagggtgccaagcatcatgctgttggatgtcctgtacagatgggatgtcagctcctttttccagcagatccaaagaagtagccttagtaataaccctcttttccagtataagtatttggctcttaatatgcattatgtaggttatatcttaagtgtggtgctgctaacattgcccaggcagcatctggttcagctttatctatattttttgactgctctgctcctctatgctggacatcaaatttccagggactatgttcggagtgaactggagtttgcctatgagggaccaatgtatttagaacctctctctatgaatcggtttaccacagccttaataggtcagttggtggtgtgtactttatgctcctgtgtcatgaaaacaaagcagatttggctgttttcagctcacatgcttcctctgctagcacgactctgccttgttcctttggagacaattgttatcatcaataaatttgctatgatttttactggattggaagttctctattttcttgggtctaatcttttggtaccttataaccttgctaaatctgcatacagagaattggttcaggtagtggaggtatatggccttctcgccttgggaatgtccctgtggaatcaactggtagtccctgttcttttcatggttttctggctcgtcttatttgctcttcagatttactcctatttcagtactcgagatcagcctgcatcacgtgagaggcttcttttcctttttctgacaaggtaattaataagagcctatgatactatatataaccttagaaagagaaaactttgatctaggaatagtaagttttgcagattacttttatcgttcatgttacacaacttcgtattttgttaagataggattttcattcactggatacctaggtttggcaatgcagggaatgctaa

SEQ ID NO: 242066 - DNA, 216 bp, Homo sapiens
caccagagatgttagctgctgatgtgagtggttgtgctactaggtggcaggcacttaaaaagaataattttgtctttctccaggagcttgtggaaacacttccgtgctgtaagcctttgtttatttttattggtattccctgcttatatggcttatatgatttgccagtttttccacatggatttttggcttcttatcattatttccagcagcatt

SEQ ID NO: 242067 - DNA, 438 bp, Homo sapiens
tatttaatattttacttctgatttgactcaagtgtttaaagtgtttattgatggtgatgcaagaagttttcctatcttacgtttttatttaggtagtggaggtatatggccttctcgccttgggaatgtccctgtggaatcaactggtagtccctgttcttttcatggttttctggctcgtcttatttgctcttcagatttactcctatttcagtactcgagatcagcctgcatcacgtgagaggcttcttttcctttttctgacaaggtaattaataagagcctatgatactatatataaccttagaaagagaaaactttgatctaggaatagtaagttttgcagattacttttatcgttcatgttacacaacttcgtattttgttaagataggattttcattcactggatacctaggtttggcaatgcagggaatg

SEQ ID NO: 242068 - DNA, 378 bp, Homo sapiens
actatgcatttatatttaactagtcaatttggaaaaattcatttataaaaaatagcgtaactcacattctctagacatgcacatgcaaacaaataaacatgtttagtgtctttctgttttttctaaaaacctgaaaactggcaaaagctgggacagagaacaagtttgaggcagggcagatttttattgctgtatccgggatgagaaaactgagacccagagaccttaagtgacttttcaggaatccctcagtgatgttgcaagtattttaaactagcgctaatagctgcttatctattatgcgtctcattatttaattgactctacttcacaatgaaatttgttgtttttccctgtccctgtttttttatattttgt

SEQ ID NO: 242069 - DNA, 912 bp, Homo sapiens
ttaggaaatgaaaaggataaattttgtgggtaaatctaaatggctattgaaaatacaaattaaacctgtcaagataaaatacagacagaattaaaacaatgcaataatgacaatgtgaataaaaatgagctcaacagagtatccaggagaggaggaaagtatcaaataatattagattttgatagtaaaagattcatgtttaagtaacttccaagttagaacagcagaacaaacataaaaaataagcatctaaaagaaggcaagaaaggacaggaaaaggtaaaaaacaggtttgataggcagaaagtacttattaacagattgaaactaaacgtcagttactttgtcaaatgccaatagacagatgctctaatcataagaaacacacaagattttttaaaattctagtatatactggctgggcacagtggctcaagctatcttagtttttaacaaaaagtttaaaaagtaaaaacaaaagtaataaatttttaaaatagaaaaggcttacaaaataacaggaagaaagtatttctatacatctgtacaatgtgtttgtgttttaagctaagtactataagagtcaagaaatttaaaaattatgaacttcataaagtaaaaaagctacacggtttctaatacagatgcaagaaaaaagtgtcttcgctgtctgactgtagcagccaagactggattgaagaattgggggttaggggagagtaagctaaggttaagttattattgaagaaaaatttttctataaatttagtgtagcctaactgtacagtgtttatacacagtctacaatagtgcacaataatgtcctaggccttcacattcactcaccactcactcacccagagcaacttccaatcctgcaagctccattcatggtaagtgccctaatacagg

SEQ ID NO: 242070 - DNA, 458 bp, Homo sapiens
ttaggaaatgaaaaggataaattttgtgggtaaatctaaatggctattgaaaatacaaattaaacctgtcaagataaaatacagacagaattaaaacaatgcaataatgacaatgtgaataaaaatgagctcaacagagtatccaggagaggaggaaagtatcaaataatattagattttgatagtaaaagattcatgtttaagtaacttccaagttagaacagcagaacaaacataaaaaataagcatctaaaagaaggcaagaaaggacaggaaaaggtaaaaaacaggtttgataggcagaaagtacttattaacagattgaaactaaacgtcagttactttgtcaaatgccaatagacagatgctctaatcataagaaacacacaagattttttaaaattctagtatatactggctgggcacagtggctcaagcctgtaatcccagcactttgg

SEQ ID NO: 242071 - DNA, 457 bp, Homo sapiens
agagaaaagtcaatgcaagttctataaaatctcttctgtatctgtgtttatcgtattatctttacatgtgtctcctccacagattccaagctcctgaaagcattgagcatgtcttctccatcgtttttctcctctagagtagccattacagatctttgcacaaagtatacacccaacaaatgctagatgggtggatttctgggtagataaatgggtgaaacaaaggaaggcaaagtttctgttttggggccagagcggaggagcaggaggaaaaacacgcatctggttccactgccttccggtgagttaacagcatgaaactacatcacctgcagacccaggagtcactgaattctgaaaatgacagtactttaagtttgttggggggttggggaacagggcaatgaagtttatggaagagaagcgcaaagttcttgataaagttcttgtcttaaag

SEQ ID NO: 242072 - DNA, 209 bp, Homo sapiens
caaagggttaatattttaacacatttgaaactcaaaaatcactgagaaaagcagtagacttccataaatattttatagagtagaaaaaataggccaagcacagtggctcatgcctgtaattccagcactttgggaggccgaggagggtggatcacgaggtcaggagttcaagaccagcccggccaagatggtgaaaccccatctctact

SEQ ID NO: 242073 - DNA, 384 bp, Homo sapiens
  misc_feature (7)..(7): n is a, c, g, or t
tgctgcnagaagacgacagaaggggtctccctgcagggtgggaggaacgctgttgtctctttttcttcctgcccctttgtttgacttcaccattctctgtttccttttcgctccgctgtagttacgtgactcacctttcattcagtacctcccttcaaggaaagccctgtctcctgtccttggactgggatcacacagagttcttgggatgaccctggctctcccgcgccagccgctctgctgccaagtgcaagcattcgctcccagatgcttcgcccagttctttgcaaatgtcatccaatcagtgtccaggtgttcacggctcatcactggcttactgctctggtctacatagcttgggacattgctgtttatgcaggtata

SEQ ID NO: 242074 - DNA, 482 bp, Homo sapiens
ggtagcgatctcaccgacacctccctgtgtcacgattccccttagtagtctgtgctgcagtcactaagcatgaccactagatggcgggagaggactgagttgaggttatggcggcggctcctttctccctgcagggtgggaggaacgctgttgtctctttttcttcctgcccctttgtttgacttcaccattctctgtttccttttcgctccgctgtagttacgtgactcacctttcattcagtacctcccttcaaggaaagccctgtctcctgtccttggactgggatcacacagagttcttgggatgaccctggctctcccgcgccagccgctctgctgccaagtgcaagcattcgctcccagatgcttcgcccagttctttgcaaatgtcatccaatcagtgtccaggtgttcacggctcatcactggcttactgctctggtctacatagcttgggacattgctgtttatgcaggtata

SEQ ID NO: 242075 - DNA, 442 bp, Homo sapiens
actttaaaaaatttttgagatagggtcttgctctgttgcccaggatggagaacaatcatagctcactgcagccacgacctcctgggctcaaatgatcctcccacctcagcctcccgagtagctgggaccacttgtgtttgctaggatgtctggctagtttttgtatttttagtaaagatggggtttcaccatgttgtccaggttggtctcaaactcccaacctcaggtgatctgcctgcctcggcctcccaaagtggtgagattacatgtgtgaaccatccacccaccctgattcaactgactcttaactttaaaaatcacattggtcttaccatacatagttcatcaattgtgggagagaaacttgggtgtcatgctttatttatttattttttttttgagatggagtctcactctgtcacccagggtggagtgcagtggc

SEQ ID NO: 242076 - DNA, 338 bp, Homo sapiens
tagaaaataacaatgagagcgatttacatttgctgagcttggcacgggatggtacccagtggccattcgggtgccagcggagcacgcagagcctggtgtctgtggctgcctccctggtccactaacacgagagaggtgggtcttcctgggtgtcccaggcacgagggtgcagcccaacccaaactgacttggccggtgctcaccacactggggcgcccgccacactggggcgcccgccacactggggtgctgagcaagatggcagcctgcgtcacttccctgtagattcccgacatggacaactcgaattaaacctggtcaagtagcaaaaaaaaaaa

SEQ ID NO: 242077 - DNA, 368 bp, Homo sapiens
gagtgactaacagtgtcaaaactctctgatgtagggatttcctccatcttttgaagcaattaacagaatttcaaaatctgtagattaactgaaagcatttccaacaaatccccagttagacactgctgatgtttggatcaaattttgaataagaaggaccttcaaatatgagttggagaaaaggaaagcctcatgctaagcaagagggcagtggcacattgagccagagtagataattaggcagacttgagcagggcaagagaggccctcctcccttaggaatgtcaggtaaccatcctggatgatcaggctgttggttgttagactctctctgtaaaataataatttgtcatagccagtgccagaaa

SEQ ID NO: 242078 - DNA, 400 bp, Homo sapiens
cttcagttttattccttttgattgcagaagccaaatcagcctcagcatcattagtgttttttggccctatttatagttgttctctctcgcttctgagctcctcatagacaggtacagaagagagtagtccagttttgtttaacagacatacaagctggtacctcctccgtaccaggccccacacttggagctggacaggtagtgatgagtcagcgatgaatccctatgtccccaccccaagttttccaaacttgggaaaacttggcctctaagaagttatacggccaggcgcagtggctcacgcctgtaatcccaacagtttgggaggctgaggcaggcggatcacttggtcgggagttcgagaccagcctgaccaacatggtgaaaccccatctctact

SEQ ID NO: 242079 - DNA, 474 bp, Homo sapiens
atgatttagtcattactccagctcatctcttttcactgcttgccttgaattttatgttgcagccatactgcctacctgaactctctcaactggctgtgccatgctgatcatacatttgtgcctttacatgtactattttctctgtccaagatctctgtctccagtgatctttaccacccatttatctgtctcatcggttacatgctagctgaggatgttacctcctcagggagccttacttttctttctacttcctctgttgcagtgcagaccattccagctcaatgtgccacccttccactttgtaaatacttccttcattgctttttatcacattgttgttactttttattgaatatatatatctcacttatttgtgaattgatggtgtttagaattcatgttttagtcatatttatgtatccaatttgtattatagtgtgtggtaatcaataaagacttattaaatgaagc

SEQ ID NO: 242080 - DNA, 754 bp, Homo sapiens
gcagagaggagaggagcgagcgactcctgcgcaagcgcagagtgaagggccgggaacagtggagggtgcgaggaagacaatgggggaggaccctgaggcggcctctgtgagccgacaggaacacgtggtcgatcagagagagactcgaggttcgtgaacggatggggaggaccctgaaaagcactgtggaatacaggtttctagtaacttcaaaatcacatcatttggactgggtaagaattgctgaaactttaatgaaaagactgactggcttataaaactgctaacccaaatagaataaaaattaattgaataccgaggaaatacttcaccaggtttgcatacttaatcagcctatactgaaattgtttagatatacaatttgaatgaactccatggtctaagtcaaattacctgtgataacccatcagttatccatgctatgtgcccaatttggagaaacaactggcacccaagaggacataagtccgatgttaagcatggactcatggagaaccaagatggctgccttgtccttcgtgagtccttaaagcttttgttattaaaagttatgcattccatgactcatcctggaaaagataaaatgatccaaattaaatatgttggtgtggtgacttacagattgttaaaatagtttataaacaatgtttagtttgtcaaacccatactcctgggaagtcaatcaaagcttcatgtacatttggctacctgatgaggcatttaaacatttata

SEQ ID NO: 242081 - DNA, 886 bp, Homo sapiens
gcagagaggagaggagcgagcgactcctgcgcaagcgcagagtgaagggccgggaacagtggagggtgcgaggaagacaatgggggaggaccctgaggcggcctctgtgagccgacaggaacacgtggtcgatcagagagagactcgaggttcgtgaacggatggggaggaccctgaaaagcactgtggaatacaggtttctagtaacttcaaaatcacatcatttggactgggtaaagagctttttatggttcactgaggacaatcaaccccttcacaatctagaacccaaagatgggatcttctgagaacatcagagaaaagctgcccttggcatcatcactgcaacaaaacatcaggatcttgaaccttggggtcataatctcacaactgagcagggtcactcttggaactctacatccattgaaacccttaaggtaaagctaatcagggaagtttctccccagaagaagatggcatccttgatgtgagcagctctttctgaagatcatggatcaagacttcttactatcatgagactcttatctttgaatgtttttccgttgcttccgcctctgtgaacaacagaagtgagaagggggtctgttttgtgcacttatggggtatacttttatttgtgaagggctttgcagccagctttatacatggataatcttataacttgatagataaagatgaaggcccagtgtatcataggtgagaaacttcaatgggtacatatggtgcctcataatcattcagaagcagaacattggttcactcctcttaacccacagcatgggttaaagagaccattgccaagaggccttccctcttctagaagggcatcatttgttaggtcctttttccatggtttggaattaaa

SEQ ID NO: 242082 - DNA, 780 bp, Homo sapiens
gcagagaggagaggagcgagcgactcctgcgcaagcgcagagtgaagggccgggaacagtggagggtgcgaggaagacaatgggggaggaccctgaggcggcctctgtgagccgacaggaacacgtggtcgatcagagagagactcgaggttcgtgaacggatggggaggaccctgaaaagcactgtggaatacaggtttctagtaacttcaaaatcacatcatttggactggaacccaaagatgggatcttctgagaacatcagagaaaagctgcccttggcatcatcactgcaacatcttggaactctacatccattgaaacccttaaggtaaagctaatcagggaagtttctccccagaagaagatggcatccttgatgtgagcagctctttctgaagatcatggatcaagacttcttactatcatgagactcttatctttgaatgtttttccgttgcttccgcctctgtgaacaacagaagtgagaagggggtctgttttgtgcacttatggggtatacttttatttgtgaagggctttgcagccagctttatacatggataatcttataacttgatagataaagatgaaggcccagtgtatcataggtgagaaacttcaatgggtacatatggtgcctcataatcattcagaagcagaacattggttcactcctcttaacccacagcatgggttaaagagaccattgccaagaggccttccctcttctagaagggcatcatttgttaggtcctttttccatggtttggaattaaa

SEQ ID NO: 242083 - DNA, 1052 bp, Homo sapiens
cagaggtaccaagaggcacttctgcaggggctaagagttagtagaaggaaagcaattaatataaggaagatttcagaagtgcttcagggagctgaagaaaggctaagtcagttttatgaaaaactctgtgaagcattctggtttacaccccatttaaccctgagactgctgaaaatcagcatatggtaaatacttcatttgtaaggcaagcccagggtgacatcaagcagaagctgcaggcatgaataccacccagtctataaaagtagctaccaaggtctgtcttaactgtgaccagggaacaaaacaagaaaaagcaaaagcaacaagtgcagcagctaggaacgccaagggttaaatccctctccccagcccggctgtatctgaataaaagggggctggagaccggtattaggagaagaacaaaggaaaaagaaaggaaaaaaataaaagtgtgagaaagaaaaaaaaaaggtaaacaaatcagaaagaaatgagagacagacagcagtgcaaaggggcaaggcccgtgctgttgccctgccctgccattgcccggccctgccggctggccgaaggagcaggagaactcaggaatgaaaaaggaaagtaaattaaaggcttaagaaaaaggccaatctgttggcaacggctcttatagaaagagagattagcaatgtcagaggatgtagacgcagatgtagatgtggaagaaatcaagttaggcagggattcaagagccagacaaggctagaaagaaattaatgtgtgagatgaaaaaaggacactggaaggataaatgttcagaagacaatgagggaaatggccaagtgctgccccaccttggaggaaccaaatactgatctgatcaggctggcaggagctaaaggatgtaaggactaggacagactggacaccttctcattaggctcccaggagcccatggtcacattagaagtcaaaggcagcaaaattctgccgtatctggattccaatttctcactgatagctaagccactagataaaattacaaagaaacaaagaaaaaaaaa

SEQ ID NO: 242084 - DNA, 752 bp, Homo sapiens
atccaacctcaaaacacagtttaatcagtctttccttcacccactcactaaacaatctatttcctaagggcctctttcatgggtggcttgttcaccgtttgtgttgacatattgttattgccaaagttcatctgtatcaagaagtctttcaaaaataagcatattccttgtcaggtcttctcattggttaacactaatacagaggaacccttggatctcaaacaaatgctttttaatgagtttgaaattcttctgaaaacagttatcttttccccttgaatgcaatgaatgaatcatccttgttatccatccagtcctgactatatttggagaaatacatgaaaattgtacaatttcctcagaaaactgggcattcataataaaaaggaatagtataacaggttgagtcattttatgagaatatgttattttgtgactcttaaatctttatttaaagaagtgcattgaatacaatatcaaatatagtcagttcataattacagtagaactacattttataatacatctttcacatggttctcaggaacacattcctctaccaaaactcaattgcactcacttttggacaagcctgtgctcaggaaaggagaaatggttgtttaccatcaactttatagaaactgtcaaactaactgaagaaaagttttgctccattaagaaaatgcacctccctcaggagatcgagaccatcctggctaccatggggaaccccatctctactaaaaatacca

SEQ ID NO: 242085 - DNA, 379 bp, Homo sapiens
caagataaggtattgagaggtgattagatcattagggtggagccctcattaaaggttttagggatcttataaaaagaggtttaagggagctagtttgccccttccaccactgaggacacagcaagaaggtgacatctatgaaccacaaagtgggtcctcaccagacaccgaatctgctggtgtcttgatcctggccttccagcctccagaactgtgagcgctacatttctgtagtctaagccacccaggttatggtattttgttacggcagtccaaattgactaagacagattttttttttcaatacactgttctgggtcaattggatatccatatgaaaaaaaggacccctacctcacaccacacacacaccacacac

SEQ ID NO: 242086 - DNA, 501 bp, Homo sapiens
ggaactaatgttcactgagaatgccacatgccaaacactctgcaggcacattacatgggttaactgaatatttatgaccacaggagagtagtgatataacttttcctaccaagaatggggaattccttaacccatgggtgttatgaatttgacagatccttgtccaagctggagctttctttagggatgactagaaggagctgagcagttaagtttaaagactttcctgtcttgaataattattggctcatctcattaatgtattttctcaattgttactttctgcacactttggccttgcatagctctggctcattaagtatttaaagactttttttttttttttttttttgagatggagtctcgctctgtcgcccaggctggagtgcagtggcgcaatcttggctcactgcaagctccgcctccccagttcacgccattctcctgcccaccttggcttcccaaagtgctgggattacagattttatccgagcggccgct

SEQ ID NO: 242087 - DNA, 371 bp, Homo sapiens
tatagccattacctccatctccttccagaacattctaatcaccctaaatggagaccttgtacctattaagccctcactcctccttttcccaacccatgcaaacccctaatctactttctatctctagggattcattccttctagacatttcacataaatggaataacccaaggtgtggcttatttatatctggcttcatttactgaacataatgttctcaaagtacactcacatagcagcgtgtgtcaggatttcattgtgtttgatggctgtttcatattccaccatatggatagacgccattttgtttctccattcacctatgggtgaacatttgggttgtatttacccgttggtgattgggaagaatg

SEQ ID NO: 242088 - DNA, 625 bp, Homo sapiens
gttggggaccttgagggtaatgatttgcaagcttctaagaaagtggactatcagaaccaaagcaattaaacaaaatctcagctggtgttttcattttctttaatttctatatccttctcattgacttttgtactattgttggctcctccttcccctttttccccttaactcatggttgccgttttttttcttctctttaggacttgtccgtatcattattttcctgtgaatgtcttaactcttcccagtttctatcggcttagtggcttacattaaccattacttctcttattctctgtgccaggattcaaatggggagttcctctctacttgccatttgctagagtctttaacactattacattaaaattcagcaggccactggattaggatgtatagggctggaaagtccaagaatacttcactccctgtctgcatcttaatgcttctccacatggcttctctttctaggagagaccaatcttcttcataggatagtggctggctttcctgagcaaaagcaaaagcttccagatctctataaagctagttttggaagtggcacagcatcacttctcctgcattctattgatcaaaacaagtcaaaaggctagccagaattcca

SEQ ID NO: 242089 - DNA, 174 bp, Homo sapiens
tccacacaaaatgaaaaggtatttccattttgtaggtaagagggttttgagattttaacttgtcccaaggtgtcacaggtatgaagcagctaaagtgggcttttttggcatttctcccctcccttattcctgtgcgtatctcaagcattaaaaaaaacaaaacaaaactatata

SEQ ID NO: 242090 - DNA, 483 bp, Homo sapiens
taaatgaaacaaaaacctggttctttgaaaacacaaatacaattgatagaccattagggagattaaccatgaaaagaagagagaagaaccaagtaagctcaagtagaaatgaaacaggagatattacaactgataccacagaaatacaaaagattattcaaggctactatgagcacctttatgcacataaactagaaagtctagaggagattgataaattccaggaaatatacaaccctcttaaattaaacaagggagatataaaatttctgaacagatcaaaaacaagcagcaagattgaaatagtaataaaaaaattgtcagcaaaaaagtccaggaccaggcaaattcatagatgaattctatcagaaattcaaaccattggtaccaatcctattgatactattccaaaagataaggagggaatcctccataaatcattctatgaaacaggtatcaccctaatatcaaaaccagggaatg

SEQ ID NO: 242091 - DNA, 526 bp, Homo sapiens
tttactggtggctactctgacttttcaggctcaagaaagccacacatcttaatctgaccattatatcaatgtgtagccactcggctacacgtaagactgagaagtcttatggggtcttttttgctcaaagccttcttaaaatccatcttttatttttgagagtttaaaaacagtcattttttccaattctgaatttctggttattattttctttcactcctgtaaaccaaacaatagtttcctaaactcatctcttccttgactacatttggcaaggtaatgcaattacaatgaacacacactactaacaacttcttttcttaaaccttcaatcttggtagaaacatgaaatggcctccaagttgccaaagatagtcatccaaaaccttggaacaactctgaaggtccctcatatggattccttgcttcccagctccctttacaactggatgtgaaaggtgctgtcttctgtactttctcttgagaggcagaaagaaataaacaatggctaattctgacctatacc

SEQ ID NO: 242092 - DNA, 443 bp, Homo sapiens
cggggctgatgggccgcctgaagccggctgtcaggagctcgtctggccacagccgccagcaggagagaccagctggcggtgcagggtccatcggcccgggcctggaatctgagctgccctcagaggcccagcttctctctgggcccccacaaactggcctttgttcctgggccggccaagacccagcagcttgggctttctgtctgcccgcggcacccgcgctgagctggcggggtaaatgggccagcctcccctctgtccatgcccaggacgtcgctttaggactaaatggagatgtaattttctatacaaatccatgacaatttagatggagtgattgtaattggcttttcaatgggggttttgtccagagctggtggctagaactgggtggcctgtttgaggcaggctccatttaaatgacaataaagcaataatattga

SEQ ID NO: 242093 - DNA, 449 bp, Homo sapiens
agtgtagagatcgcccttcctaacaagctagagcctacaaggaacttctctgaattagaattaattatgctggtacatctgtagagaggttttgatttgactcaaactgagactaccactcatttcttcttgattatttggtagtaataaggcccctgaactgaaccggatcccccatagtcctctattactttccaacaactgtgacttttattcttagcagtgacttccatcttcaagtggaagatgaacaatgtttctctttgggaggaaaatgcccaatttccactgatacagttaagaactgaggccgggggcggtggctcacgcctgtaatcccagcactttgggaggctgaggtgggcggatcacatggtgaggagatcgagaccatactggccaacatggtgaaaccccgtctctactaaaaatacaaaaattagctgggc

SEQ ID NO: 242094 - DNA, 314 bp, Homo sapiens
gcaccctgaaatttctgttatgcggattaaatatccactatccgtgtttttccgagtcttacagcagaaagggtaaatgcagccctcacagcagcctgttgttcgtcctgcaattgtgtttccatcacattacacaaagcctctttgtcttcgtggttctaccctactaataagttttttaaaaaattatgtaatgtgtgtatatacaaatacctatatgtttgtgtgtacacatacagctaatatctgctgagattatgtatgcatgaactatagaattaacttgtaattttaagaaaataaattattttgta

SEQ ID NO: 242095 - DNA, 381 bp, Homo sapiens
cagttcattagcgtaatttgctaggcattacacaagacattgggagatacaaactgtttagaggtgatatatgctgtggtaaacgtatggtgtgcatgcagagtggggagtactgaacttgtttccgtgttgaggagggcttacagaggctgtaacatgtcgtctgagttcctgtgaagagaaagtaggagtttaggatgaaggttgtctttgataaagagattagcatgtattgaaagacttatattttaggctggatgcagtggctcacgtctgtaaacccagcacttcgggaggtcgaggcaggaggatcccttgaggccaggagttcaagaccagcctgggcaacatagtgatgcctcccatctctacaaaaaaaaa

SEQ ID NO: 242096 - DNA, 254 bp, Homo sapiens
agccctaacagttcacaggaggaacatgagagtaagtagactgacaatctgactctactttgaattttaccaggaccttaagaaagagagaagcagggaagtgggcagttgagacaaaattcaaaaatatatttaaaaagttagacattcaggaaacatccaaaaggaaatataccaacatttgataatgtgtgaaaaaacaagcaaggatgtaatcaaacagagagggccaagataaagaaggaaaagtgaaa

SEQ ID NO: 242097 - DNA, 574 bp, Homo sapiens
ttttcgagtctttgaggaatcgcccactgccttccacatggaaaggacacaaatggttgaactgatttacactcccaccaactgtgtataagtgtgcctttttctccacaaccagctttgttaacagcgtgaagactagaagaaaaagaatggaagaaagaagtgaaagagaaacaaatagggaaggggatccctcggatgactgggaaggaaaggaaaaccagaaaaagcagtcaggatgaatgcctgacaaaaaactctgctgcagtgacactttgacatgaagcagattcaaactttctatgactgaacaggacattttccatttattgctcctttgatacccaagctcctcaatgggggtattcttcaatgagacacttttaccagtgaccatattcttgcttgttggtttcttttttttttaaagtatgttgctgctgtacttttaagaaagttgtgttttatcttagtactttgatattcataaatggtataaagcataattttaccacatagctttaatggaatactttttacaaacaaaataaaacttgaccttcttccaccctat

SEQ ID NO: 242098 - DNA, 539 bp, Homo sapiens
cccacagcacgtgggagaaacctcagtgaaactcaaagcgcagtggcttagaagtctggctcatcttcaacaatacatttgtggagaaatgacaggacaatggaaagcaattttaggtgtccgaaggcaagaaaccgtgggaagataaatatatgggaagaaactagtggaatacgtgtgtttgtacattcttctgctgacatccctgagctggtaagaatggtctccggtaaaagagaatttacatcctgtctttagatgaaaagaggggaggatctagagagctcttcctccattggctgcttcttaattgcctttacttcaaaatatttgtcaaaaaggcatatttgggggtgacatattctgattaccttcagaagcttgtctttatacacatttatttcttttagggtagattttactttcatttgtcactaatatgattgcttcagtacacagcattctgtggcatggcttcatgctttagcactgtggctctgaattaaagcctgaaacaatttataaaaatactggtaaaa

SEQ ID NO: 242099 - DNA, 536 bp, Homo sapiens
cagtggtaaatatctctgaccacattcttgcctcttggttttataaatgcaagagaaaagagatggtttctggtacatctgaatttactttttcatgaaaattctgaagttagaaaaaagactatatgatttccaataagttttggagggactgaccctagcaccccaattttcttttaatctcttcttaaatcaaatctttgtaaataatgctttcacattctattaaaaatgtatagagaaatattcacccaattatgtgaggatcgtaaaccagtcattacaatatgtgctagcatacccttgttttagtctgtgaagtgtaagttttgctaccctaaacctctgactaccctgctgtcgtcctgcctcacttccatgaggaatattttgtctgggtctatagattttcccagtccccggtgtgttaatgtgagaattgagtctccagtaagagctgttactcttccacatctgctcctttccttgtaggccgccaagtcttctgaactaaggaaagaaaaaaactctataaa

SEQ ID NO: 242100 - DNA, 513 bp, Homo sapiens
cttagaaggacataggagttccactatgatgtcaatgctgcctggtttgccacctcacctgccacctctctaccaccagacgtggggcactctacatcagctcctacttttatggttccaagtccagccatggtcttcctgactcgggacattcacacatactaattcttctgcttagaatgcccatctgtccccattccctctttattgctcagcaaagcccagtttccatcacacattctgcgacaccttccttgactctgcagaataagtgtccctcctgtgtgccttaaagcacagtatttgtttctgctacaacacacattaataatattctaattgtctatgttttcttctacccctctccacttccccagttagatgtaaattccttaaaggcagggacactctagtttattttatatctcttgcatccagtgtagtggctggtacaaaactagaataaataaaataaatgttattgaattattgttgaataaagttataacatga

SEQ ID NO: 242101 - DNA, 633 bp, Homo sapiens
tgctttctctgttcagggtagtcatggttattggcttgctgctgtttcttgtagacgtatgcctacagtttggtcttcctagagtatattttcttagatattattatttgtagttccctgtcaagactacttaatccgtgagtgctgcctgttttagatttgactcagctctcacaaacatttggagcattgcccatcccatataggggtcccaaagtcaatcctctggctgtgcaggaaggttggataggcatttgtgcaaagaactatgaactctgcctactacattatagtgctgctgaacagccactctgacttggcatctatgttgtctgacgtaaagaaaattttcaggctggagttgtgaatctcaactggcccaattgtctttcactgccatcatgggattttctttctacaagcacacacaatacttcccatgttttaagctattaacagcttttcaacaagagaagccaagatggtgaagaagctgtgtgccaaaatctcacatttatcccatgttgaactggtgaatgtcgataaaattttccacacatgatggcaggcacataggagtctcataaatacagaagaagccttttatcatctgctccaagtttttcacttctc

SEQ ID NO: 242102 - DNA, 579 bp, Homo sapiens
tgctttctctgttcagggtagtcatggttattggcttgctgctgtttcttgtagacgtatgcctacagtttggtcttcctagagtatattttcttagatattattatttgtagttccctgtcaagactacttaatccgtgagtgctgcctgttttagatttgactcagctctcacaaacatttggagcattgcccatcccatataggggtcccaaagtcaatcctctggctgtgcaggaaggttggataggcatttgtgcaaagaactatgaactctgcctactacattatagtgctcaggctggagttgtgaatctcaactggcccaattgtctttcactgccatcatgggattttctttctacaagcacacacaatacttcccatgttttaagctattaacagcttttcaacaagagaagccaagatggtgaagaagctgtgtgccaaaatctcacatttatcccatgttgaactggtgaatgtcgataaaattttccacacatgatggcaggcacataggagtctcataaatacagaagaagccttttatcatctgctccaagtttttcacttctc

SEQ ID NO: 242103 - DNA, 495 bp, Homo sapiens
ccagaggttatgtttctaactcttgggcatggcttctatttaaattgaggaatatattttatgtacaaggtatcatacaaaatactaaaaataatttttttaatatgtgtttttcaatcctgatcttagcatattattatataagatttgtcaataaatttagccagttagtttgtagtcgatagactcctttttgaagaccaattcttcaaatcccaaagtagtaattatttacattaaaggagaatatagtcatgaattaaacccatcaaaatactagatttttttgttctgagtaacagaataaaataaaagttgtaaaaagagaaagtgtttttcatttgtgtaaaacaatgtctttatacatgtgaagtagctgaaatttatatttacttaaaatttgttatatatactttaattttaaaatatctaaggaagccagagaaggaaagatgattgattcctttaagaaatagtaacagaataaaaaattta

SEQ ID NO: 242104 - DNA, 458 bp, Homo sapiens
actatcgtttaatacctatcagtgttcatatttcccccacttgtcaaaaatatcttgttattcagcagcaaagcagaagagaaaaagaaaaaataaggtcagatgtggtggctgatgcctgtagtcccagcactttgggaggccaaggtgggaggatcactggagctcaggagtttgagaccagcctgggtacaatagcgagactcagtctctacaaaaaaaaaatttgtttaaaaattagcaaggtgtgttgatgttcacctatagtcccagctattcagaaggctgaagtgagaaaattgcttgagccccagaagttgcggctgcagcgagctgtgaccataccactgcattccagtctgctgcaccgagtgagaccatgtctcaaaaaaaaaaaaagaatgctaatgagtctcctaccatggtgggtggatgggatgagtaacctagcgcctata

SEQ ID NO: 242105 - DNA, 841 bp, Homo sapiens
  misc_feature (630)..(630): n is a, c, g, or t
gagtcagagcgccccactcatctccctcctgctgagctgcgaaccagcaccctccgagacaagcgtgtttgcagtgccagctctgcccttgctggactccaagtctcctctctgggcagccaggacccacccatgggacagccctatttagcttctgctctgggaacagcaaaaatcaggatggtgggaggggccgagtcttgtcttgtcctttcatcatcatgactgttgagttcttggctgtgcccatcacgccacagcacgacgcctgccaaaatgcccccaacctactgcctgatgcaggtgccattgccattagcggtcatcgacagcttagggcagcactttccaacgggtgcccatgggacaccagcctgcgagatgcttttgtgggaaaggggttttgtggttcaataactttcggaagtgctgcacacttgtccccaagttggacattcacaaaggccgttattgccgtaaaggctctgacaagccctatagaaaagcttcttgctaaaccttctttaacccatgtttttaaacttatttgaccacagaacccttttcttggggaacagtattaacccccaaggaattattggttctcaagtgcgttttgggagctgctgnccagagagctaaagggcctggggtgtgagctgactctccgctggggaggccgggtgcacacgccacagcccgaggaaagtgctggccaccgcccgtgggcatcgatgaggctttggcccccaggggccggactccgtgtgacctaataggtcgtttccaagtcacccgttttggatgtgcatttcatgtgacaatacagatgacatgcaaa

SEQ ID NO: 242106 - DNA, 385 bp, Homo sapiens
ttaagggtaaaaaagatctactggttaataaaatccaaacccgggacactatactttgcactacaataccctctcttgttagattagcaaaggaaaggatccataaacattacaaaagcaaagaaaggcaggaagccctcaactggttgtcagttgaagtgggctgggtttgatagctatttcttttaacatctggaactttagctttaaaaagtgttaataaagttgtaaagtataaaaactcattatatttctgtacactacaaacagtcaagaaattttaaaattatgccatttacatcagcatcaaaaaatcaaatatccgagaagaaatctaatgaaagatgtacaagactttttttttttttttgagatggagtcttgc

SEQ ID NO: 242107 - DNA, 318 bp, Homo sapiens
ttctgtgtttgtgtgcctctctgagtatgtactccttacttttgggtatggagaaggattctaaaatagggatcttatgaactatggtcaaacgaagtaggtcaggtaatttttttatgactggtgttacacaaaaaaaaggaagaaggaaaagttagaataatattcttaggctttatgactgactttttaaaacgggttctgcattgtggaagacagtgtggcaattcctcaaagacctagaggcagaaatatcattcaaccagaaatcccattactgggtatataccctaaggaatataaatggttctattacaa

SEQ ID NO: 242108 - DNA, 455 bp, Homo sapiens
tggccacattccaggccatcatctttagtgttctcctgtaggactcatagataacgtatacaaaactcagtaatagctgtggtccaaatttcagaaggtttgtaaagtaatgttctttaacgtttaatttagtctggagtttggtgtcgtattaaatacccagtaacttcttgatttgattctctaatattaatcattttgccattgcacaaaatgatgcccgttttttttctcatgaaagtcttaggttgtaagatttctcttgtatgagctgatgtggggcaaccagtgttttgaggattgacttttattattctatcaatgtgtgaaaatgtctgattaatttcatgtcatctcaagtataacgtgtcaagagcacaattattttacaaacaagagacttattagaccaaggaatttttttctatgttgtttaagcttttatgattacaaaa

SEQ ID NO: 242109 - DNA, 468 bp, Homo sapiens
atattgctgcattctcccttctaccagatcctcccacaagactgaacagttctcaaactagcgaaacttggttttatcagtgtctattctctgctgctacataaagatctccagggatacagggcacttagacatgaggctttcttgatattcttccttccctccctatagaagaggaataggccccaaataaggggctacatgatcattaggcattttccaacccaaaataagcatactcatcctattgctaaggtaagataataatactggtatcaacaaccttgggccaaatgtgaagatgttaaattcattttgcacacctattcttcaggattaaaaaatattatcctgataaatacagtaaacccattgtaaacaaaacttttcatgatgcagtaaccttacccattactcccttacctcctatcttaaataatgtttgagtgtattcttccctttgccatt

SEQ ID NO: 242110 - DNA, 375 bp, Homo sapiens
atagagaacatttaccaaaacagatgttaccagaattattcttgattacagaaagtttagaagtaaattctttaatgcggaaacaaaacaaggatatcttctatcactgctactctttattatattggagattttagccaaagtaattagataagaaaaagaagggagaaagagacataaagattggaaaggaagaaaaatattaattataaatgaaatgattatctacaagagaatctacatactattagaactgtccgggcgcagtggctcacacctgtaatcccagcactttgggaggccaaggcaggtggatcatgtgaggctgggagtttgagaccagcctgaccaacatggagaaactccgtctctact

SEQ ID NO: 242111 - DNA, 706 bp, Homo sapiens
  misc_feature (611)..(611): n is a, c, g, or t
cagatattgtcagtacctactctatacttatttataccaagtacttatcacatatagaattaaagattggtcgtttaatggtgttatctgtcactaaaaagaaagttcttattgtcatggaacatgaccacattgttcacagttgtattcctatgtccagaaatggcactttgaacataatgtccactcaataaatgtttgcttggatgactaaaaaaggagattttttaaatggggctagaaggtatattgcttccaatcgtcagggactttggatttgtgtttgtgtgtttaggctactagggagccatgaagagtttttatcagtagattgacaaaaggaaagcaatactcttgtcaggttgtaatgtgtagagagctttaagtgtagcaaaactgcagggaaggacactatcagagtactgatggcagttcaccttgaagacagtatggtaacaataacatacgagatggtagcattgggaaaatattcatgatacattccaagggaagaatttatagcactttgcctttgattccatgtggaggaggagtatcctagataattttaaggttttactatggctcgaatgcctgcttcacacattcangtgttaccaatgtggttgattgagaggttgagcccttaaaccatgattatggcatgaaggcttcctctgggtgaatgagaataaggccttattaa

SEQ ID NO: 242112 - DNA, 687 bp, Homo sapiens
  misc_feature (490)..(490): n is a, c, g, or t
  misc_feature (494)..(494): n is a, c, g, or t
cagatattgtcagtacctactctatacttatttataccaagtacttatcacatatagaattaaagattggtcgtttaatggtgttatctgtcactaaaaagaaagttcttattgtcatggaacatgaccacattgttcacagttgtattcctatgtccagaaatggcactttgaacataatgtccactcaataaatgtttgcttggatgactaaaaaaggagattttttaaatggggctagaaggtatattgcttccaatcgtcagggactttggatttgtgtttgtgtgtttaggctactagggagccatgaagagtttttatcagtagattgacaaaaggaaagcaatactcttgtcaggttgtaatgtgtagagagctttaagtgtagcaaaactgcagggaaggacactatcagagtactgatggcagttcaccttgaagacagtatggtaacaataacatacgagatggtagcattgggtcatgntgangaggagtatcctagattaatttaagggtttcactatggcctcaaatgccctcctccacacattcagggtgtaccagatgtggtttattgaagagttgccccttttaaccatgattacgccatgaagggctcctctgtgagaatgagattaagcgccttatttaaagaggttaccctcagtgttaaacgaactt

SEQ ID NO: 242113 - DNA, 388 bp, Homo sapiens
ctcccctccctcctcccgtgagcgtccggccttgtgcatcctgaggccccgcgctgggcgggcctggagggtcgggcccgccaggaactctatttccaaactcctgttgggaggccgcgcgcggggcctcacgcctgtaatctcactgctcagggaggccttggcgggaggatcgcttgaggccaggagttcgagaccagcctggacaacacaccgagacccccatctctacaaaaaattttaaaaaattagccaggagtggtggttgtacctgtaggcccagctactcgagaggatcgcttgagctcggaatgtcgaggctgcagtgagccatgatcccaccactgcactccagcctgggcaacatagcgagaccccatcactgcaa

SEQ ID NO: 242114 - DNA, 373 bp, Homo sapiens
aggggcttgcagtaggttgaatggtggccgccccagaagatatgtccttggaacctgctaatgaaaccttacttgaaaaaggcatctttgggccgggcacagtggctcacacctgtaatcccagcactttgcgaggccaaggccagtggatcacctgaagtcaggagttcaagaccagcctggccaacatggcgaaatcccatctctactaaaaatacaaaaagtatctgggtgtggtggtgggtgcctgtaaccccatctactcgggagcctgaggaaggagaataacttgaacctgggaggcagaggttgcagtgagccgaggtcgcgccactgcaccccagcctgggcgacagagcgagactccgtctca

SEQ ID NO: 242115 - DNA, 182 bp, Homo sapiens
ctccatttgttctacttcctcccagttctactgaaccatgaatttaaatttgcaaagcaattaatagcagtgaaacatggagatgcttaaaattcacatacacaggcaataaagaatactaatacagagccttataattatcaagtgctgataacactcaagcatccctgaaggaaaaaaaa

SEQ ID NO: 242116 - DNA, 401 bp, Homo sapiens
tcttatggggtatccagagaagtaaaggcacatggcacaggctgctcagtgccgggacaaacatcagggaaggatcctctggacaggttggagctgagtgggagagtcagagaggcctccttgggaggggacactggagctgagtctggaggatgaccaagaattggcccagagaaggtagtggggagattttaagagcaggtaacagcacagccaaagaaccccaagccagggaaagcaaacacaatgggggtgggggcagcgggggcaagttgtgtggcttgtggtggtctcacctccccgccccccagttagctctagttcaggctcaggacaaagtctcaccgtgctctgttcagtgttcaatcagaaataaaaatagtaaaagcacatctgccatt

SEQ ID NO: 242117 - DNA, 657 bp, Homo sapiens
gattgtgttggccgttagagcaatttgggcagaatttacatcttagcaatattaagtcttctggtccatgaacactgtatatctctccatttatttagatcatctttgattttttctgttgttttcaacattcagattcttcatctatttattagacttatgcctaaatattttatgattttggtgctattataaatggtatatttttattggattgttagttcattgttaataagtagaaatgtaattgatttttgtatattatccttgtatcttatagccttgataaattcatacgttagtttgaagagttttttttctagaaaccttaagattttctacatgacaatcacattgcgtatgaatagaaaaggttttactttttcctttccagtctgtgctttttttttcccttactgtattatactgactaaaacttttggtatgatactgaatagtagtggttagaatggacagacttgtctgttttcagtgttaaggcgccatttatcagtttaaggaggttctatttctagtttgctccgagttttggtcatgaataagatattatattaacttttatcaagtgctttttcttcatcttttcttatttagtctgtgattatggagaattacattgactgatttttgaatact

SEQ ID NO: 242118 - DNA, 663 bp, Homo sapiens
acctctgatgcagtttggaccaagttttcttcagccagctaatttagagacaagaacctggatatttattgggcgtttgggggacttccttacagccctaggtctctgtgaaaagggccctggattatctctgcaaaagcccacctgctattggttagccaggactgtctccactttcagacaccagcttcatccaaacactctttgctgtatttataaccacggtgcatttcctcgggacgcacatcttacggcttcttggccccttcgcccagggtgcactgcctggaccatcgccctccggcagagacagtgtctttctttgtatgttctccttcctctggtcgagatgtggcttggtcacctggagtggggccgtcggcaagtcgcctgggcttcgtggaggctcgctgcccccatggcggaaagctcggccacacaccctgatgtctcgacacctttgagttgcccatgaatgggttttcagagcttcccgtgtttacttcgctgcacgcctctgtttgtgctctggggaaattcttggcagaggaaaagccaattggaaaacagccctgcttggtgtcagggcttgaggttgagggagaaagactgaaacggagatttgcatgagctggtttgagcatgtcacaagactttgtcttt

SEQ ID NO: 242119 - DNA, 340 bp, Homo sapiens
tggcatagatgcttttgtttttattagcaacagaaaatataaatatctaaatataaacttcacaagaatcatgtaaacttacatgaggaaaagtttaaaacactcctgaaacacaccaagagcggacatggagtcttcattctaacaatctgtgtattggtttgaataattcaatacccaatgtctttaattatctaaccatggttaaggcactcccttgccaaagattttagggatggatgtgtgacccgttgctggccattgagatgtgaggcaatatctgctggcatagggcaaaagtctctcacccttaaatggaaccccaaggaagatgcagact

SEQ ID NO: 242120 - DNA, 586 bp, Homo sapiens
atgtgtcaggtgtgtctattcctggaaccttactttgcctgctggagtttcccagtctgttccagatgcactctctcgaccctgaagggacctgaggggggatgttggtcgccagtgtgtgctcccctggactcgattggaattggtcccacaaagtgttatttatttatttatttatttatttatttatttatttatttatttggagggagtctccctctgtcacccaggctggagtgcagtgggacaatctcagctcactgcaacctctgattcccaggttcaagtgattctcctgtttcagcctccctagtagctgggactacaggtgtccgccaccacaccttgctaaattttttatttttagtagaggcagggtttcacaatgttgatcaggctggtgtcgaactcctgaccaggtgatcgacccaccttggcctctcaaagtgctgggattacaggcgggagccatcacaccccgccaatcccacaaatttaggcattatggtacattgctacttttgaatcacttatttttttagttgtgttttcccccctccttttattgattgattgacacagagtc

SEQ ID NO: 242121 - DNA, 99 bp, Homo sapiens
cttcccaaccccctacctgccaaattatctttaaaaattcctatccccaaatgcttggggagactgattcaagtaataaaaaaactccagtctcccaca

SEQ ID NO: 242122 - DNA, 647 bp, Homo sapiens
tccagaaataataattttaaattatgtgccattctgagtagcatgatgaaatcttgcaccatctctgtccctcttgcctaagacattaatcattcctttgtccagcatgtccatactgtctgtgcttcctgcccgttggtcacttcagagccatctcggttatcagatcgctggttgaggtactgcggtgcttgtgttcaggtagcccttattttaataatggcctcaggctggtcacgggggctcacgcctggaatcccagcactctgggaggccgaggcgggcggatcacgaggtcaggagatcgagaccatcctggctaacacggtgaaaccccgtctctactaaaaatacaaaaaattagctgggtgtggtggcaggtgcctgtagtcccagctactcaggaggctgaggcaggagaatggcgtgaaccctggaggcggagcttgcagtgagccgagattgtgccactgcactccagtgtgggggacagagcaagactccatcttaaaaaaaaaaaaaagaaaaaagaaaaaaatggcctcaaagcacaggaggagtgatactcataatgtggatatgccaaagagaagccgccgcaaagtgctttctttaagtgaaaaggcggaaagttctctacttcagga

SEQ ID NO: 242123 - DNA, 328 bp, Homo sapiens
atacaaattcatgatttaagctaattggtactaaaactaaattgttaaaatctgatgttcattgttgtggggaaaaacatgtgtgaaaatcaattatccaagcatttgaattaaagaattaaaagagaacaatgtgacacaaaaatgtaaaatggaataaagataggagtggtaattaatgacatagaaaacaaggcacaatagggaggatcattaaagacaatggttattgtttaaatagattattaaaatctacaagctctggagagagtatttatgattatatgagaataaaaagataaaaatgataaggaaaataaggcgataa

SEQ ID NO: 242124 - DNA, 482 bp, Homo sapiens
gcagtttaatagatattcaggtctgccttcccaacatatatctgtaacagatgccttcagcttctcctttttctttttttaggcatattgtatttggaaaacatttgcaagtttgcctctactgtggggaaaaagagagggaagagtatcattatatgcaatgtttaaataataaaaataaattttgaattgggtttcctaccccaaaatctggcagatacttttccttaagaaatcactccctgacttaaattttagatagtgccttgactatcttttaaaggaaggaatagtattacatatatcaaaattgtttcatttatttttaaataattgtaaaactcttagaaataccacaggaggctgggtacggtggctcatgcctgtgatcccagcactttgggaggccacggtgggcggatcacttgaggccaggagttggagaccagcttgaccaatatggtgaaaccccatctctacca

SEQ ID NO: 242125 - DNA, 489 bp, Homo sapiens
tgcctcagcttcctgagtagctgggattacaggcatgcaccaccaggcctggctaattttgtattgttagtagagaccctgaccatgatggtcgggatggtctggaactcccgacctcagatgatccacccacctcggcctcccaaagtgctgggattacaggcttgagccactgtgcccggccacatgtagcatttctaagtagaattttattgtgtatgatgtggaagagtcgtagaaatctgattattttcctatagagcaggggttctcaactgggggtgattttgcctctcaggggacatttgcctcactcagcctgcccaccaaattgcctggagacatttttggatatcacaagtgggaagtgctagtgacatctagtgggtagacgccagggatactgctaaacatcctacagtgcagaggacagcccctacatcaaagaattgtctggcccagaatgtcaatagaaatagtttctcaagg

SEQ ID NO: 242126 - DNA, 731 bp, Homo sapiens
atgcaacacattatcaacaggtaactaattgtcctataactctaggggtcagtcctcctgtgatgctaggtataaaaggaatgtgattctgatcagttcactaatcctactgtttctcactgctacctggaattgttggggtgaagcctggtccctgaacaacctaatggatggatgatgcttgctcacaactgtgatgatgctttaactggtccagatccttgcagaggcagcagtgattctttaagggaggatgaacccaatcccttaatgccacattctttcaaggatgctctaaattaggtctcctaggttctagatcttaacaatcagctccttcagtttatatatgcagccacatctcattgtgtaagccggtcccaagagtactttttgaggacattttgtagaatcttttcactaacaaacctcaaactttcttccctccccagggcttaagcgcctttctttagtcactcaaaatataaagagtcttgttaaacccttatctcaggacagtagggcctgttcatgctatacttatgtaactaaaggaaacccaacttaaatgatttttcacagtcaggaggatctgcttcagggttattttcctacctctacccaaatggcaaagcaattgcacacttctcttgctaaagaagaaaggaactacaaatttaatctttataaacatctctcttatagggcattttactatacttaatgtgttt

SEQ ID NO: 242127 - DNA, 2244 bp, Homo sapiens
  misc_feature (61)..(61): n is a, c, g, or t
  misc_feature (108)..(108): n is a, c, g, or t
  misc_feature (124)..(124): n is a, c, g, or t
  misc_feature (182)..(182): n is a, c, g, or t
  misc_feature (309)..(309): n is a, c, g, or t
  misc_feature (877)..(877): n is a, c, g, or t
  misc_feature (880)..(880): n is a, c, g, or t
  misc_feature (963)..(963): n is a, c, g, or t
  misc_feature (968)..(968): n is a, c, g, or t
  misc_feature (1063)..(1063): n is a, c, g, or t
  misc_feature (1212)..(1212): n is a, c, g, or t
  misc_feature (1227)..(1227): n is a, c, g, or t
  misc_feature (1233)..(1233): n is a, c, g, or t
  misc_feature (1918)..(1918): n is a, c, g, or t
  misc_feature (2073)..(2073): n is a, c, g, or t
  misc_feature (2182)..(2182): n is a, c, g, or t
aagcgggtaacagattctcggtcattctggggtcaagacgagctatcccggtccgaatcgnagtctggtctcatcagcttcctggtttgtagaggatgaaccctggcncagagaaggacagccncttaccccgggccgcacagccaagtagaaatgtcaggcggccaagagtcaagacgcanaggacagggagctggtggcgggggtggtgctctggaggctggccctgcccccagctgatgcctcaggctcagcatctcgagaaagtcctgccccctggcttggtgcttcctcgtggccctgagtccnggggaaagtccagggcagggagtatgggtacttgttcttcctctttagggctggccaggggccaggggagctgtgtttgctcagggtggaacctgacaccctttggaatggattgaggttagcggaagcctaggctggggggaggggtcgcccagggagcgaacgggcatttattgtgcacttactgtatgcgcgagtgtggggtcaccaggccttggagattcagcagtgagcaaggcaggccaagcttcctgctctcgtggggcgcatattttggtggggaaagacagacatgaaacaagagcgcagtaatggagccaatggctgcacagagggtaacatgcgtgagaggcgctttgtaactttattttactttttatatttttttgaaacggagtctcgctctgtcgcccaggctggagtgcggtggcgcgatctcggctcactgcaagctccgcctcccgggttcacgccatactcctgcctcagcctcccgagtagctgggactacaggcgcccgccaccacgcccagctaatttttgtatttttagtagagacagggtttcnccntattggtcaggctggtctcgaactcctgatctcaggtgattcgcacgcctgtaatcccagcactttgggaggccgagacgggnggatnacgaggtcaggagttcaagaccagcctggctaacatggtgaaaccctgtcctactaaaagtacaaaaaaaaaaaaaaaggtgctttatgtgtctncttaattcattaattaatatgggaaccggtaagactttatagcctatacagaggggaattaatttgtttcctttctttcttttttttaaaaattgaaaatagaaatggggttttgctgtgttggccggcctggtctcgagcttctgggntcaagtgatctgccngcctcngccactcaaagtgctgggatttcaagcgagagccaccgacccggcctcagcattcttgattgcctgtgtgtgtgtgttctttcagttctcctctggaccagacacggtggctcacgcctgtaatcccagcattttgggaggccaaggcaggtgggtcacttgagcccaggagtttgagaccagcctggcaaacgtggtgaaactctgtctctactaaaaatacaaaaattagccaggtgtgttggcgtgtgcctataattccagctacttgggaggctgaggcaggagaattgcttgaacctgggaggcagaggttgcagtgagccgggatcgcaccactgcactccagccccagagacagagcaagactccatctcaaaaatgtcattccgtgcccagaatgacagcaccttagcgtagatggtttccatggggcagggggccccctctagccctgggacactgtaattcacctttggctttcccactgggggcccgagtggagttagaagcatggagaggcagcccaggggatccttagtggcagatgcttaaacctttgagccttccctgaaatactgctcagggtcaaaaccgggatccccgttttacagatgaggaagctgaggcaggggctggaattcacatgggctctgcttttctctctctgctgtggaacttcctnctagagctcagccgtcctcccttttgggggaaatggcatctttggcatggcttggtggctcccgcctggaatcccaacattttgggaggccgaggtgggaggatcgcatgagcccagcagttcaagacaggtccgggcaacatagcgagataccntctctacaaaatatacaaaaatctgctgggcagggtggcgtgcacctgtggccccagctacacaggaggctggggtgggaggatcgcttgagcccaggaaagtggaggntgcagtgagctatgattgcaccactgcactccagcctaggtgacagagcaagactctgtctc

SEQ ID NO: 242128 - DNA, 479 bp, Homo sapiens
actacttcttaatgttccagtgagagagagcctgaaatctgcagtggtgttgagagcccatctgtcctgctgcaaaggcccaaggaggaagaagttcccaagagaggttccagatgtctcaaatgaatccaaaatccaatcagatgacctaggactgtcatccaactcaagcaataaagaaaccagtaatcacagatgactgcctgccaggtgcttcgtgcattttacacagtattttcaacatgggctttaaagtcagaaaattccagctatgatcatttttagttgtgactttggtaagagtttcaaacacagtatcttctactagtattattattgctactaccctccaactgttccttttactacggtgatgactgtctcattgaatgctacataattctccctaaaaccttatgaagtagatatatatatccactatatcaagaaaagaaaataaataaacaaaaagcaaaatt

SEQ ID NO: 242129 - DNA, 435 bp, Homo sapiens
agccaccctcatttttcccctggacaactgaaaaagcctctttagtggcctccctgcttcacaacagtccctcccaaatacattctccaccagaagtgagaatgaacacttcaaaaatgtaatttggggccaggtgcagcggctcatgcctgtcatcccggcactttgggaggccgaggcgggcagatcacttgaggtcgggaggattgcttgagcccaggagtttgagagcagcctgaataacatggcaaaagcccatatttaaggaataaaaaaatacaaaaaaaattagctgggcatggtggcatgcgcccatagtctcagctactctggaggctgagatgggacctaggggaggtcaaggctgcaatgagccaagatcatgccactgcactccagcctggctgacagagtgagaccctgtctcagacaaaa

SEQ ID NO: 242130 - DNA, 847 bp, Homo sapiens
ggggtggatggaattctagcacacaggtggtgggggtcccatactttttgtgagaaacttgaactgaagtattcaagaacaaaacctgtgtgttacagtagccacccaagatgatgtttatgattcaaaaaacaaaatccaggaacacatgaagcaagagaaagcgttctgcttttgatttatgtgcttctttttccaggagaacatgagcagcttcccaggacatggaaactggcaggcactctggctggagacatgctgacagcgcagtaagggctccgggccgctcccctcaaggcagtgcctggacagggggccctcgtgggcagccatgagccttccttgggaccagcagttccagagatggaattaattctccagagggcagtggaggaggaagccaatgaagtaattctatttgttcaaacccaacttgaaagagggaaaaatgagtcaactctttctttggagtggctgccagtttccagataaagtttgttcaatcaaggagctccccatctgaggtgggcatgccaggcacgggtgtggtggtgacgggtcaggtggcacatgcaggatggtgaagggcaggtgagggcaggccgggtcaacacggaggcagcgcccctgcagccactgggtgtgtcccactctgctgccatgtggcatgcatgctccatcatcctctgccaccacggtgaagaggccagtgctgattccgtggacatggaaaactgagtgggagtcagaaaactttctgtgcctcagttcctcatatgataaacaagaaggatgtacgacatgcatgacaggttttctcccataatcataaaaatatacaattaca

SEQ ID NO: 242131 - DNA, 365 bp, Homo sapiens
cttgcccagctcatagtgtgatgtcgtcctaacctcactggtccactccagcaccgaatcctgccaggctgtggtcaggagagagcagctccacttatctcttcaacagacttccgctaatttcagtctaaagatgctctaaaatatgtggaatggccacactgtgtgccaagggggtgcacaatttcaccagaggaagtcagtggtcctgctgaacctgttcccctgtttcctcatgggtgacgtattggggccagtacctaaccattcctccctcagtgttctcctgcagaaaccaggctgtgtagtgttatgagttaggcattgctgttagctatgcatccttctttgtactgtgtgtggga

SEQ ID NO: 242132 - DNA, 456 bp, Homo sapiens
aggcccagtgtgtggtgccccaaaacaattacagttgacccttggacatcacaggtttgaattgtgtgggtccacttatatgcaattttttttcagccaaacatggatggaaaatatagtattcacaggatgcaaaacctgcatatgtgtagggctgacattttgcatatatgggttctgcagggctgatttcagaacttgaatatgttcagattttggtatatgcaggggtcctgtaactaatcccccttgtattctgagggacaactgtacaatagttacatcaaaggtcattgatcacaaatcaccgtaacaggtataatagtaataaagtttaaattttgtgaaaattaccaaaacatgacacataggaagtaagcatatgctattggaaaaattgcactgatagacttgtacttgctccacttaagtttgtcagaaaccttccatttgtaa

SEQ ID NO: 242133 - DNA, 444 bp, Homo sapiens
gtttcctgaggcctccccagccatgcagagctttccttcccacgctcacactctctcctactgccttgtgaagaaggtgactgcttccccttctgccatgattgtaactttgctgaggcctccccagctatgcagaactgtgcctgaactctggcaatgacctgaagggccctcacacagattcttctccagtgcctccagaaaacaacgcagctctgcgacccctgatctcagcctcatggaatactgggcagagaatccagtcacagcttgcctacacttctgccctacaaactggaagctgataaatttgtttcattttaaactgttatgtttgtggttatctattacacagcaatatgggcttattccaaacaggctgtatgaattcaggtccctgaccaaatctggttgactgtaaaaatgaaaaaggacaacctgagt

SEQ ID NO: 242134 - DNA, 392 bp, Homo sapiens
ctcatgcctggaatcccagcactttgcgaggctgaggtgggtgaattgtttgagcccaggagctcgagaccagcctgggcaacatggagaaacccgatctctacaaaaaatacaaaaattacccaggtgtggtggcatgtggctgtagtcccagctactcagaggttgaagtgggaggattacttgagcccaggaggttgaggctacagtgagccatgattgcaccactgtgctccagcctggacaacagagtgagaccctatctaaacaaacaaacaaaaaaattatttccatatgtaaatgaatgggaacactgtgctagaagacattgtaaagaagcctgatgaggattccaactgataacagccacgttcggatttagaaaaatgtaa

SEQ ID NO: 242135 - DNA, 369 bp, Homo sapiens
ctctaccaaaaaaaaaaattagacgggtgtggttgtacatgcctgtagatccagctactcaggacgctgaggtgagaggataactggagcccagatgggaggtcaaggctgtagtgagctgtgttcgtgacactgcactccagcctggctgacagagtaagagcctgtctcaaaaaaaaaaaataataataataataatttcaacaaggtggtaatcttaacagataattactaaagcgttatcaaggaagacaatatgcatcactgatctatttcttaagaaaaaataataaataaaattaaaacctcatgattttataacctaatagaattttgtaagcacaggttttcaacaggtagctgtaattt

SEQ ID NO: 242136 - DNA, 1190 bp, Homo sapiens
agaagggagggaaagaaatggggcagaaaatatatctgaagatataatagcaaatctctttaaaactgataaaaataacctagagctccaagaatatcagcaaatcctaagcaagataaagacaaaaaaaaacaaacaacaacaaaaacaataaaactgcaacaaggcatatcatagtcaaactgctggaaaacaaagacaaggagaaaaatcctaaaggcagccagaggggaaaaatagtataaataactgactttttaatcagactacagaggccagaagataatggtactttttaaagtactcaaacagagggagaaaactgtcagtccaaggttaaataacgctattgaccaacttgagctgattgagatttatagaatactctacctaaaaaatttagcaaagcaataaagtataaggtcaatatgcaaaaatcaattatacttctacatcctagtagcaaccatttggaaaataaaatttaaaaaccatttataatagtatcagataatataaaatgcttatgagtaaacttcaggcataaaaactacaaaagcaggttttagagaaattgaaggtctaaataaaaggggagctagataggaagctatatcatgcccacaaattgtccgaatcaatatggttaaggaggtaattgtccctaaattgatctatagattttacttaatgtaaactgaaatcccaagaggattaaaaaaaaaaaaaaaaaagaaattgacatgatttaaaattttctgtggaggaaggttttccaataaaaaccagaaaacctgctagacaaattctaaaagagctgttaacacttgatttaaaatttatatagaattgcaagagatctagaatagccaaaacaatctcaaaaaagaagaaaaccttggaggacttatgctattacctggctgcaagacttagtataatattataacaataaagttagtgtggtatttattaacatagagatgtataacaggccaatgcaacaggaaaaaaggtcaagaaatagactcatgcttattagtcaattgattttcaacaaagattttaaggcaattccatagagtcagaaaagtgttttcaataaatgatgtcaaaaacctgaacagaaaaaaaaaagaaagaatcttgacccatacacctcacaccaaattaaaaaattaattcaagat

SEQ ID NO: 242137 - DNA, 597 bp, Homo sapiens
aatcaggaaggagtgggaggagcaaggggagaggcggggtgatcatggcaaacgcatgtcactcaccactttgtcaggcactaaatgcttgcactgaataatatgtgagtggactcatttgacctggcaagaaccctgagagggcatcagtacatctccattttatagacgaggaaacaggcacagagaagttgccttgtgcaaaatctcagtaaaaatggtgagactagattcaaacccaggcagcccagctcctgtcccctctaccactgtgatgagatgaaaaagactacctgtggttttgtggcacacccaacatctctggaaagggctcctgtctccaggtaggtggaccagagaacttgagcgaagctcaagccttctcaactcaaggggtgggcaggagatgtagagcctgagcgtgggcactgtggactggaaagaatgtgaaggaagaatggagccaggctcagccgggcatctgtctccatctgtctaaagggaggctttgtcaggcttcagctgtttggggactggccccttctatgaccatttcagggctcagcaccagaaaggatgatttctgagttcattgga

SEQ ID NO: 242138 - DNA, 397 bp, Homo sapiens
tccaaatggagacagtaataaaagtgctttagaaactgctattaaaaaacattttaatgaggacatccagtgctctgatgtctcccctggggcccctgattcaatcacccaggaattcaggtcaggcttgaatctgagtgcaccacctgcaccaccgcacagaccagtgtcctcctggttccgcattgcacggggcaggtgagaagtgagatggcaatgatcactcaactggttggccgacggcccccaagtggttgagcaagagcaactgctggatcttcgaggcaggttagagttgtttccagactggcagcctggatctcacttcctcttgggtgtttctgatggggcagggtcctgtgtgcagtgctgctgtgataactctttcctgtctcca

SEQ ID NO: 242139 - DNA, 143 bp, Homo sapiens
gctagacatagagtaattggtcagtgaaaccttgctgatttaaataattcaaagacccaaagtgaactttatagaggcaggttggataacaccccgaaatatttcttactctattattgactgttcttagtgatttattaatt

SEQ ID NO: 242140 - DNA, 372 bp, Homo sapiens
cgataaatagatctttggtcatcttacttaattatctggaatgtgttcatttttatcaatgcctgagattatatttttaagtcatgaaggaaggaagaaggaaagaaggagagagagagaaaggaagaaagaaaaccatgaagtgatattgggaagtggctcctaggtaaaacaatctgcttgttgttatagatattcctcttataggtgtaaatgtagctgctccctcacaccttcactttacagtcttggaactccatagcagaaggtgataataccgggattagaggaacctctaactgtgtaaaatgtcctgaacttatttattttaattttggtgaatacaaataaaagaagatttattttattctg

SEQ ID NO: 242141 - DNA, 1499 bp, Homo sapiens
taagaagcagagcacttcaaagagctgcaaatagtttgaaatggttagaacatgggttcttacaaggctgaagagtgaaataatgggtaaatcataaaagaaagataaaccaatgctgcttgaattgactgagtggtcatcacaatctaacactttgtaaattgttttactttgctacctattttctagaaggagagctttcaacagaaggaaatgaaatgaatgaaaacttctaatcaatgtccattatttatgtcctgtgttttcttgttagttttaaatagagtttgataaaggttcacattacattggcttgggtttttattttaactttttacaaaatatgatttagttttacaaaatacaatttagttttagtctactcactaaaaagaagcaatgtgatcatcacgtacacagttcagtttccatctgaaatgtctatattataggaaaagtgcctctttaatgagaaaatatgcaggaagcttgttgcatcagatgtctgtatcattttgtctttggaaatggatcaatttttgaaggtagtgatactgacgataattttctaaataactttatcttcctcatcgcactatttcccttttttcattgctactacaaacatacccacatgtacactcacaaaaccacaatccctgaaatatgaattgcaagtattagacctatagcacaggtaagaaaactaaggtagagagaggcaatgactagttactcttttccacagtgtgtcagaagcagagtctcttgagcggtgacttactactctttagagtaaatcctgctgcctactgcataaattcaagaattctgctcctttatttttaaaatttactgagcgtaaatacaataacttttaagaaaaagagtgtaacagaatggttttaaagcatggatttttgggatttcaaaagaactactttgaacttgtcttccccatttattgcatagcttaagaaagtttagttttttctcatctgtgaaaaaggtttaataatagctcttagctgttataagcagtaagttagataaggcatgtgaaccctataaaaagttcttagactatagtaataactcaatcaaattaactcatcattgagaaaatgaagaccaccaagtagcagtaaggcttcagagttgccttcaataagaatcacattagaaattgggctcaattaaaatatggctataattaattagaaacacatttaggtataatatttcctgtcccaccataataaccatcacaatgacatatatgcatattcacatgttagctccatggaacctggagttctagttgttttgttcacctttatatcatcagcacaaagaacaatgctaagtacacagtaggtactcaagagatgctttaaatgaatgcattaagcgaatctcacatttcttttttattcactcagcttcttttcagattatttgtttatcttaatgctggttaaattattttgagagaaaga

SEQ ID NO: 242142 - DNA, 517 bp, Homo sapiens
ttgtaagagcatattacatgtttcagttgattacctttcagcttagaaggcactttccagaaaccatccacacttctcgatcgttgtatgaatcaaaccaagtgcaaaccaagtgtttgcagtcatgcctgtttccataaaacatcccaaatagtctgcatcctgcatttgccagtggcccatgtatttttttttttttctatttcactttcatgttattagaaagatgaatagtgcactgctcaggacacttttctaaagcgagtaatcaaaaagttttttggtgatagttataatgtcataatataaccagacatcaaaaatggaccacagtagctacagaggttaagtcacagcactctaatggttatatgtattaatttgtcattgtcaggtttcatttttaaggtgttaaaattttcctacactgagatggtaatatacaagggagttgagaaaattcagtttgtttcatttggaagaattatttgtgacagttttcaaaacattttgtaaa

SEQ ID NO: 242143 - DNA, 507 bp, Homo sapiens
ggctcttccagcacagaactaactctcagacccaggagtctgtcccctctgtgcctagtatctcacttgtgaagtggggatgtggatagtacttgtattagtatttcattgtattacttattcttagctgtataatagattaccaccaaataatggctgcatactgcaaacatttattatctaacgcagtttctgtgagtcaaggacacaagagtggcttggctggatggttgggctgagggtctcacaaggcaatagtcaggaggtcggcaggattgcagccatccaggggtttgactggtggtggggaatccgttcccaaggtggcgagtctgtggctgttggccacaagacctctccacagggctggttgactgtctaacatggcaactggcattcctcagattgagggacccaatagagagagcaaagaggaagccccaggcctctcttgtttttgaggaagggtctcactccagcctgggcaacaagagtgaaattctgtct

SEQ ID NO: 242144 - DNA, 347 bp, Homo sapiens
tttctccttaaaatccaattttgaaaagcaagttgaggagttcagccactgaaagatcttcattgatttatttttcccttccttatttattaatgggaccactttctccttgatatttcttttttctctctgatgtatttgtaaaagctctgctcccgcctcttaacctgatgcattagattagcccagcctttgggtttccttctctcatcttttcctttccatccattctgactctagttgagacacttttatgtcttcttccctaaatccctatgtccagaaaaattttcagctcatctgtaactgtcatgtggatcctggaagtaatcaaactgctgacttcc

SEQ ID NO: 242145 - DNA, 259 bp, Homo sapiens
cggccctgaggtaaaactttctaattcaatcataataactaggatccagagtcatactttatatttttagacaaagtgatttcttagttgcttcaaggggttcatgaacatgctaaagggtgatttgacctcacagaggggattcaaggataatgacttgggaggtcaaggccactccaatcttcccaactgtatttgatgggtttttttgcctagacccctgtaaaacagcattaaaacttttcttttatagcaatga

SEQ ID NO: 242146 - DNA, 325 bp, Homo sapiens
ggtggcttatagacaacagtagtgtatgtctcagaattctggaggcagggaagtccaaacgaaggtgtgaagatgtgggcagatggcaccttcttgcggcagtgtcctcacatggtgaaggggcctatgagctcctttggccctctttaataaggacacttagtccatttatgagagctctagcctcatgatctgatcatctccaaaggcttcacctcttgatgctgtcacgtcgggaattaggtttcaacatatgaattttgagggaacacagacattcagaagttagcaccttgattatgctttcatatggagctatcttgta

SEQ ID NO: 242147 - DNA, 462 bp, Homo sapiens
tgtgtaaggaccacatacagtcatatagttgctgtatgataaacgtacttgatagcaataacttaagcataccctgagaatgaccctgaatatgtacggcaaatacacctgaatatgtgttccaagccagggaatcctggagtggccaacccggagattcatttcttgtctgtgaagaacatttgagcccttctgcctgtccagtggaacacaggccatataggggattgaggccctgagttttgggttggatgaaggttgccagatggaggacattaaggggaggatgttaagtgaaaatgttgtatagactgcatgttgtttgcaagtgatgatggttttccttcccagcctgctgccactggaccgtacgtaaggtggttctcctatgcagcccactgccactggactctctgccctatgtgttagcccctgataaaactccatgtctcatttgttggc

SEQ ID NO: 242148 - DNA, 980 bp, Homo sapiens
cattatctgtaactgtttaatgttagcaacagaaatgtatgatttaatgaccttattaagggaaaggctgccatgggaaatcagccgtaagatacaacactacattattaatatctgtaaaacagtaacataccatctgagtcactgctgaaccaagcaaaccagatttagctccttctttacattcctccccaaaatttcataaccagaaagggatgatctgtggcagtgccttgtgaaaaagggcagtagctcaaggcagtagtatcacagaattatttaatcattcatggaaatcttgcctctactctccgtatgtccttgagaaactaaacttggcttggcttttaattaacacccaagaaaagaaaaaaagtaaatccttattcatagatttaaaaagctacgcagagaaatgttcaaccttgtatccaaatgataattcaaaaaaagaaacaaagaaaaaaactggggttaaaaaaagctcagaaaaagcaaaagttcttctagatatctggcacttagctagtaagtttttataacgtatccaggaaataacactgagacctaaatatgaaaaaaaaaaagaaagaaaagaaaagagaaatcagggggctagtgggggaacacttagtggatggttctactttatgtaggtatgctatccatctctatccatctcttagaaaacaaaaccggaaatctgggcggggtggctcacgcccgtaatcctagcactttgggaggcagaggtgggcgatcacctgaggtcgggagttcgagaccagcctgaccaacatggagaaaccccatctctactaaaaacacaaaaattagccgggcgtgtgcatgcctgtaatcccacctactcaggaggctgagggaggagaatcgcttgaaaccgggagccggaggttgcagtgagccgagatcgtgccattgcactccagcctgggcaacaagagcaaaaactccatctc

SEQ ID NO: 242149 - DNA, 379 bp, Homo sapiens
ttttctgagacggaggcttgctctgttgcccaggctggagtgagactccatctcaaaaaaaaaataagctaaaataaaagaaaatgcattatagccgggcatggtggtatgctggagtgtgtctgtaatcccagcttcttggaaggcagaggtgggcgatcacctgaggtcgggagttcgagaccagcctgaccaacatggagaaaccccatctctactaaaaacacaaaaattagccgggcgtgtgcatgcctgtaatcccacctactcaggaggctgagggaggagaatcgcttgaaaccgggagccggaggttgcagtgagccgagatcgtgccattgcactccagcctgggcaacaagagcaaaaactccatctc

SEQ ID NO: 242150 - DNA, 434 bp, Homo sapiens
ctctcccgctgctacaatccattaaccctggctgcctctgtatcccttaaacacctcaatttctgcccacttcagccctctctacttgttcttcacactttctggtttgctctctccccagatctttgtgggctggcacctccttctcatttaggtctcagcttaaatgttacctccctagaagagtccttcttgatcaccctacctaaagaaacctaccctagactcccttaccccattccctgtttttttcttcagacaccactatctgaaatgatatcatttctttgtcaattatcagacttcccattagcacgtaagctgcatgagagccaggaccactttattcacactgtatccccagcatatagagcagtgcttggcacatgattaatatgtattttgaataaatgaatgttttctgttcaggcata

SEQ ID NO: 242151 - DNA, 2550 bp, Homo sapiens
caggctggtactggccctgggatgtttagcatcttgtgggaactgtcagaccagctccaggcgctggggctttctcatgtggccttgtcagctcacagcaggcgttaacagcctctaattgaggaaactgtggctggacaggttgcaaggcagttctgctccccatcgtcctcttgctgactggggactgctgagcccgtgcacggcagagagtctggtggggtggaggggctggcctggcccctctgtcctgtggaaatgctggggcaagtggtcaccctcatactcctcctgctcctcaaggtgtatcagggcaaaggatgccagggatcagctgaccatgtggttagcatctcgggagtgcctcttcagttacaaccaaacagcatacagacgaaggttgacagcattgcatggaagaagttgctgccctcacaaaatggatttcatcacatattgaagtgggagaatggctctttgccttccaatacttccaatgatagattcagttttatagtcaagaacttgagtcttctcatcaaggcagctcagcagcaggacagtggcctctactgcctggaggtcaccagtatatctggaaaagttcagacagccacgttccaggtttttgtatttgataaagttgagaaaccccgcctacaggggcaggggaagatcctggacagagggagatgccaagtggctctgtcttgcttggtctccagggatggcaatgtgtcctatgcttggtacagagggagcaagctgatccagacagcagggaacctcacctacctggacgaggaggttgacattaatggcactcacacatatacctgcaatgtcagcaatcctgttagctgggaaagccacaccctgaatctcactcaggactgtcagaatgcccatcaggaattcagattttggccgtttttggtgatcatcgtgattctaagcgcactgttccttggcacccttgcctgcttctgtgtgtggaggagaaagaggaaggagaagcagtcagagaccagtcccaaggaatttttgacaatttacgaagatgtcaaggatctgaaaaccaggagaaatcacgagcaggagcagacttttcctggaggggggagcaccatctactctatgatccagtcccagtcttctgctcccacgtcacaagaacctgcatatacattatattcattaattcagccttccaggaagtctggatccaggaagaggaaccacagcccttccttcaatagcactatctatgaagtgattggaaagagtcaacctaaagcccagaaccctgctcgattgagccgcaaagagctggagaactttgatgtttattcctagttgctgcagcaattctcacctttcttgcacatcagcatctgctttgggaattggcacagtggatgacggcacaggagtctctatagaacagttcctagtctggagaggatatggaaatttgttcttgttctatattttgttttgaaaatgatgtctaacaaccatgataagagcaaggctgttaaataatatcttccaatttacagatcagacatgaatgggtggaggggttaggttgttcacaaaaggccacattccaagtatttgtaatctagaaagtgttatgtaagtgatgttattagcatcgagattccctccacctgattttcaagctgtcacttgtttccttttctcccctctctgggttgactgcatttctagactctcgccggcccaggcccatcttccaaagcaagaggaaggaatgataatggtgactcaggggaagaagaaacagccctcctctgaaagcctggactgtccggctgtgaactggctggcaggttctgcacgtgggtgggggccagggcctgggctttactcaattgcagagaaaaaactttctccctgcatctcatacctttacctctggccagttggccaccagggggagtgggctgaagggagagtagatggtgcaaagcaagcccatctctgagtagaaaaatcacccagagcacatgctgacctgataactggggtgttgagaccagctttgtccatggtatgatgtttgatttatgaagacgcattgttagaaatccatttggcttcttcatagaagtggcttcccagaggaagaggcctctcagaaaccatgttctatttaagttctgagtcctgatgagtgttccccaggatgcacattgaagggagggctcaggcagctgagggctgagaatgaggcagttggaatctagacactatgctgggttccctgagtcgtcaggccagacatttcaacaaggctgtggggagcagggctgtgactctggctgagcccaggaaagcgacaagggtgaactgggagaggacttactcagagaccccaacaggtgatactgcacaaagcctggttcttcaattttcctaccctgtatctaacataggagtttcatataaaacggtgatatcatgcagatgcagtctgaattccttgcctgaattaaatttatgtatcctctccaaaccctg

SEQ ID NO: 242152 - DNA, 2694 bp, Homo sapiens
caggctggtactggccctgggatgtttagcatcttgtgggaactgtcagaccagctccaggcgctggggctttctcatgtggccttgtcagctcacagcaggcgttaacagcctctaattgaggaaactgtggctggacaggttgcaaggcagttctgctccccatcgtcctcttgctgactggggactgctgagcccgtgcacggcagagagtctggtggggtggaggggctggcctggcccctctgtcctgtggaaatgctggggcaagtggtcaccctcatactcctcctgctcctcaaggtgtatcagggcaaaggatgccagggatcagctgaccatgtggttagcatctcgggagtgcctcttcagttacaaccaaacagcatacagacgaaggttgacagcattgcatggaagaagttgctgccctcacaaaatggatttcatcacatattgaagtgggagaatggctctttgccttccaatacttccaatgatagattcagttttatagtcaagaacttgagtcttctcatcaaggcagctcagcagcaggacagtggcctctactgcctggaggtcaccagtatatctggaaaagttcagacagccacgttccaggtttttgtatttgataaagttgagaaaccccgcctacaggggcaggggaagatcctggacagagggagatgccaagtggctctgtcttgcttggtctccagggatggcaatgtgtcctatgcttggtacagagggagcaagctgatccagacagcagggaacctcacctacctggacgaggaggttgacattaatggcactcacacatatacctgcaatgtcagcaatcctgttagctgggaaagccacaccctgaatctcactcaggactgtcagaatgcccatcaggaattcagattttggccgtttttggtgatcatcgtgattctaagcgcactgttccttggcacccttgcctgcttctgtgtgtggaggagaaagaggaaggagaagcagtcagagaccagtcccaaggaatttttgacaatttacgaagatgtcaaggatctgaaaaccaggagaaatcacgagcaggagcagacttttcctggaggggggagcaccatctactctatgatccagtcccagtcttctgctcccacgtcacaagaacctgcatatacattatattcattaattcagccttccaggaagggtgacagattctattcattttctggctgagagtgcctcagaatttttctgggccctgagtctcttttgggacctctcacatcacttaggagtgggagagcacttatctcgaagttaagtattctttaccttctgaatttctagtctggatccaggaagaggaaccacagcccttccttcaatagcactatctatgaagtgattggaaagagtcaacctaaagcccagaaccctgctcgattgagccgcaaagagctggagaactttgatgtttattcctagttgctgcagcaattctcacctttcttgcacatcagcatctgctttgggaattggcacagtggatgacggcacaggagtctctatagaacagttcctagtctggagaggatatggaaatttgttcttgttctatattttgttttgaaaatgatgtctaacaaccatgataagagcaaggctgttaaataatatcttccaatttacagatcagacatgaatgggtggaggggttaggttgttcacaaaaggccacattccaagtatttgtaatctagaaagtgttatgtaagtgatgttattagcatcgagattccctccacctgattttcaagctgtcacttgtttccttttctcccctctctgggttgactgcatttctagactctcgccggcccaggcccatcttccaaagcaagaggaaggaatgataatggtgactcaggggaagaagaaacagccctcctctgaaagcctggactgtccggctgtgaactggctggcaggttctgcacgtgggtgggggccagggcctgggctttactcaattgcagagaaaaaactttctccctgcatctcatacctttacctctggccagttggccaccagggggagtgggctgaagggagagtagatggtgcaaagcaagcccatctctgagtagaaaaatcacccagagcacatgctgacctgataactggggtgttgagaccagctttgtccatggtatgatgtttgatttatgaagacgcattgttagaaatccatttggcttcttcatagaagtggcttcccagaggaagaggcctctcagaaaccatgttctatttaagttctgagtcctgatgagtgttccccaggatgcacattgaagggagggctcaggcagctgagggctgagaatgaggcagttggaatctagacactatgctgggttccctgagtcgtcaggccagacatttcaacaaggctgtggggagcagggctgtgactctggctgagcccaggaaagcgacaagggtgaactgggagaggacttactcagagaccccaacaggtgatactgcacaaagcctggttcttcaattttcctaccctgtatctaacataggagtttcatataaaacggtgatatcatgcagatgcagtctgaattccttgcctgaattaaatttatgtatcctctccaaaccctg

SEQ ID NO: 242153 - DNA, 2274 bp, Homo sapiens
caggctggtactggccctgggatgtttagcatcttgtgggaactgtcagaccagctccaggcgctggggctttctcatgtggccttgtcagctcacagcaggcgttaacagcctctaattgaggaaactgtggctggacaggttgcaaggcagttctgctccccatcgtcctcttgctgactggggactgctgagcccgtgcacggcagagagtctggtggggtggaggggctggcctggcccctctgtcctgtggaaatgctggggcaagtggtcaccctcatactcctcctgctcctcaaggtgtatcagggcaaaggatgccagggatcagctgaccatgtggttagcatctcgggagtgcctcttcagttacaaccaaacagcatacagacgaaggttgacagcattgcatggaagaagttgctgccctcacaaaatggatttcatcacatattgaagtgggagaatggctctttgccttccaatacttccaatgatagattcagttttatagtcaagaacttgagtcttctcatcaaggcagctcagcagcaggacagtggcctctactgcctggaggtcaccagtatatctggaaaagttcagacagccacgttccaggtttttgtatttgaattcagattttggccgtttttggtgatcatcgtgattctaagcgcactgttccttggcacccttgcctgcttctgtgtgtggaggagaaagaggaaggagaagcagtcagagaccagtcccaaggaatttttgacaatttacgaagatgtcaaggatctgaaaaccaggagaaatcacgagcaggagcagacttttcctggaggggggagcaccatctactctatgatccagtcccagtcttctgctcccacgtcacaagaacctgcatatacattatattcattaattcagccttccaggaagtctggatccaggaagaggaaccacagcccttccttcaatagcactatctatgaagtgattggaaagagtcaacctaaagcccagaaccctgctcgattgagccgcaaagagctggagaactttgatgtttattcctagttgctgcagcaattctcacctttcttgcacatcagcatctgctttgggaattggcacagtggatgacggcacaggagtctctatagaacagttcctagtctggagaggatatggaaatttgttcttgttctatattttgttttgaaaatgatgtctaacaaccatgataagagcaaggctgttaaataatatcttccaatttacagatcagacatgaatgggtggaggggttaggttgttcacaaaaggccacattccaagtatttgtaatctagaaagtgttatgtaagtgatgttattagcatcgagattccctccacctgattttcaagctgtcacttgtttccttttctcccctctctgggttgactgcatttctagactctcgccggcccaggcccatcttccaaagcaagaggaaggaatgataatggtgactcaggggaagaagaaacagccctcctctgaaagcctggactgtccggctgtgaactggctggcaggttctgcacgtgggtgggggccagggcctgggctttactcaattgcagagaaaaaactttctccctgcatctcatacctttacctctggccagttggccaccagggggagtgggctgaagggagagtagatggtgcaaagcaagcccatctctgagtagaaaaatcacccagagcacatgctgacctgataactggggtgttgagaccagctttgtccatggtatgatgtttgatttatgaagacgcattgttagaaatccatttggcttcttcatagaagtggcttcccagaggaagaggcctctcagaaaccatgttctatttaagttctgagtcctgatgagtgttccccaggatgcacattgaagggagggctcaggcagctgagggctgagaatgaggcagttggaatctagacactatgctgggttccctgagtcgtcaggccagacatttcaacaaggctgtggggagcagggctgtgactctggctgagcccaggaaagcgacaagggtgaactgggagaggacttactcagagaccccaacaggtgatactgcacaaagcctggttcttcaattttcctaccctgtatctaacataggagtttcatataaaacggtgatatcatgcagatgcagtctgaattccttgcctgaattaaatttatgtatcctctccaaaccctg

SEQ ID NO: 242154 - DNA, 1689 bp, Homo sapiens
caggctggtactggccctgggatgtttagcatcttgtgggaactgtcagaccagctccaggcgctggggctttctcatgtggccttgtcagctcacagcaggcgttaacagcctctaattgaggaaactgtggctggacaggttgcaaggcagttctgctccccatcgtcctcttgctgactggggactgctgagcccgtgcacggcagagagtctggtggggtggaggggctggcctggcccctctgtcctgtggaaatgctggggcaagtggtcaccctcatactcctcctgctcctcaaggtgtatcagggcaaaggatgccagggatcagctgaccatgtggttagcatctcgggagtgcctcttcagttacaaccaaacagcatacagacgaaggttgacagcattgcatggaagaagttgctgccctcacaaaatggatttcatcacatattgaagtgggagaatggctctttgccttccaatacttccaatgatagattcagttttatagtcaagaacttgagtcttctcatcaaggcagctcagcagcaggacagtggcctctactgcctggaggtcaccagtatatctggaaaagttcagacagccacgttccaggtttttgtatttgggatggcaatgtgtcctatgcttggtacagagggagcaagctgatccagacagcagggaacctcacctacctggacgaggaggttgacattaatggcactcacacatatacctgcaatgtcagcaatcctgttagctgggaaagccacaccctgaatctcactcaggactgtcagaatgcccatcaggaattcagattttggccgtttttggtgatcatcgtgattctaagcgcactgttccttggcacccttgcctgcttctgtgtgtggaggagaaagaggaaggagaagcagtcagagaccagtcccaaggaatttttgacaatttacgaagatgtcaaggatctgaaaaccaggagaaatcacgagcaggagcagacttttcctggaggggggagcaccatctactctatgatccagtcccagtcttctgctcccacgtcacaagaacctgcatatacattatattcattaattcagccttccaggaagtctggatccaggaagaggaaccacagcccttccttcaataagcacatgctgacctgataactggggtgttgagaccagctttgtccatggtatgatgtttgatttatgaagacgcattgttagaaatccatttggcttcttcatagaagtggcttcccagaggaagaggcctctcagaaaccatgttctatttaagttctgagtcctgatgagtgttccccaggatgcacattgaagggagggctcaggcagctgagggctgagaatgaggcagttggaatctagacactatgctgggttccctgagtcgtcaggccagacatttcaacaaggctgtggggagcagggctgtgactctggctgagcccaggaaagcgacaagggtgaactgggagaggacttactcagagaccccaacaggtgatactgcacaaagcctggttcttcaattttcctaccctgtatctaacataggagtttcatataaaacggtgatatcatgcagatgcagtctgaattccttgcctgaattaaatttatgtatcctctccaaaccctg

SEQ ID NO: 242155 - DNA, 397 bp, Homo sapiens
gaaactccatctctactaaaaatacaaaattagccaggctggtggcgcatgcctgtaatcccagctactcgggaggctgaggcaggagaatcgcttgaacctgggaggcggaggttgcgttgagctgagatcacgccattgcactccagcctgagcaacaagaatgaaactccgtctcaaaaaaataaaatataaatgaacagagccttggtggtctgcaggacaaaataaataggactagcatgcatggaataggaatctcatacataaggaagagagagaatggggcagaaaaaaactgaagaaaatttccacatttggtgtgaaaagaagttcaaagaccaagatagacaagggaaaaattacaccttagcaaattgtagcaaaaagttaaaaa

SEQ ID NO: 242156 - DNA, 414 bp, Homo sapiens
tatccattttctatttccccaaagtaacttgtgagaaatgtcttaggctagaatttgcttatatattttccatcttgcacatggttaaaacgtgcagtttcctaaaccagtggttctcgaacatcagtgtgcattagaatcacctggagggctggttaaaacacagattgccaggccgttctcagggtttttgatttagtaagtttggcggttggacccgagaatctgcatttctaaccagtgattcccaagtgatgctgatgctgcaggtctggggaccaatgtcttgaactaacagctctgaataaaaatctaattggattctgaatgccacagatggagtttggagattgtttttcaaagcagaatatccatttgtggaataaaaaagtttatcattgttattacctgaag

SEQ ID NO: 242157 - DNA, 354 bp, Homo sapiens
cggtggcccgtgggtgtccgggccggagaactccagatccgagtgcgtcctcttggtccacgagcctcctccctctcccttacccaaggacagtgagctggagcgcgggcggctggacgcgtagcgcagccttcgcaacgggtcttttttcgtcccactttttatgggaccttgggcttccaaaccgacgttggatggtttgtcagcggatactttcaccgcccacagcaaacttgcagagccaagcgggctgttctccggaggctctcggaggacgccccctgccagctgccggcatctgggggagagggacagcatttggggtgggaaatgaagttctggttttgcacattt

SEQ ID NO: 242158 - DNA, 769 bp, Homo sapiens
  misc_feature (538)..(539): n is a, c, g, or t
  misc_feature (603)..(603): n is a, c, g, or t
  misc_feature (637)..(637): n is a, c, g, or t
  misc_feature (649)..(650): n is a, c, g, or t
  misc_feature (684)..(684): n is a, c, g, or t
  misc_feature (769)..(769): n is a, c, g, or t
tcccagcctccagaactgtgaagtccaagcaagggactggcagattcagtgtctggtgagcattcaccttctggttcacacatggagccctctagctttgtcctcacatagcgaaaggggcatgcgagttctctcgtgccgaattcggcacgaggaggctgcggtcatggagggagcaggagctggatccggcttccggaaggagctggtgagcaggctgctgcacctgcacttcaaggatgacaagaccaaagaagcagcagtccgcggcgtgcggcaggcccaggcagaagacgcgctccgtgtggacgtggaccagctggagaaggtgcttccgcagctgctcctggacttctagggatctcagccgtggctgaggccacccccagaggagcccctggtccacagaagcaggccttgtgtttccagcggcctctgataagaggcagggaaggacctgaaggatttggagttgattcaaacaagatctctgggagtctccagcctgtgcagaaggggcaggactgcagtgcactgnnggccttggagtgtccagtggggacactggtgtgggaagggcagcacctggggagtccctgcctntcctcctgggacaatagtgtgcatgccacccggngtcctacaggcnnagtgctggtgcttcttgccacatttcctgcaccngacattaaagctggcgtgtgacctttcaggcatgcgatattccccttggagatgcttcccagctattaacttgtcttacaaagan

SEQ ID NO: 242159 - DNA, 450 bp, Homo sapiens
atgtttttagaaattaaatttctaggtgaaataaaataaacatattaaaataattaaaaccaggtaatagaattaagttatattatagttttcagtctgactgccaaaagtgtctagaagcaataatacccattgacaatgaacactataatctttaagaaccattaaatcccactctttattgagaataaccagagcttcttggagatttggcacactctagttctggatagggagtatatgaaaaaggcctggaatacctcactgtgagaaaagcaaaaagccagcaaacataaatgtgagggtgcgaaaaaacacaaaagccagcttgaacccctctttattggccaattgtagaattacttgagcatcaaagagaggactcctgtagttccttggaacacaataaatatatacaaattcaggagtttataataatattaaaaaaga

SEQ ID NO: 242160 - DNA, 368 bp, Homo sapiens
aatttattcactttaatcatcttggaatttctgggctgtggcctaatttcatatagtacacaattgttagaccctaaatctaaaaaatctgcttggtcataatatattcaaaaccttggtcatactatatttcaaaaaggtgaaattaggtggtacgattgagaaactgttattttaaactttgtcctgtaaatctgacccaattcttagtagcctgcagtgaccccctgagccagactgttaaaacaaggaggcaattaacgttcctacacaattggaaatgttattgtagacaatatattgcattagaaaggttctatgtagtacccaatatattaaaaaaagaaaacaaatagaaagctgaaatt

SEQ ID NO: 242161 - DNA, 313 bp, Homo sapiens
tcaaggattgtgagaacgaagcaaaaggcatcaagcactctgaattgttcaaataatgaagatgatgcccacaaagacagatagaacatgcctcaaagcttctcagttttcctacgactaagataaccagtcaccatgtggcatgactccgaggaccacgtacaggctttgcatcttctgtgaaggcttcagttgcccttggggatacatcgccgttctgtccaccaacactctctcatgttctcaggacataattacctatttctgttctatcctcaccccctaaaagattagtctagaacctgttcttatt

SEQ ID NO: 242162 - DNA, 505 bp, Homo sapiens
  misc_feature (336)..(336): n is a, c, g, or t
gcgttcctcctggggaccccccagagacatggacgcgcacacggacacacacacaccccttgggctcgtacagacacagatacagaggcacaggtacgctcggttaactggcagtcactcaggcactcggggctaaggaggcagatgagcacagacaggcacagaccctccagggcaatcggagaccgacataaaagcacagcaggccggccgagggacccactgaggggcacacccaggcgcgggcagaacgtcctcaaggacacactcctccctcgggcctcactctggagcacctggggacacgcccatgggcggctgcacgggcggcaggangccccagcgcacctggcgcccccgcgttcccctaggcgcccgagccgagtgtgcgtgcgtgcccgtgcgcgccgccacctgtgggaggagaggtgcgcgctgcgcccggggctgcccgcctagcgctgcgcggggggagctgttgccatggcgcgcagagcgcggccgc

SEQ ID NO: 242163 - DNA, 967 bp, Homo sapiens
ccagtctttgctgctgagatctgactgtatatactattttgtatcctttcatgtatttctttcatgtatttcaatgcagccctcaacatcatcatcataaatctctccagcagaatgctggaggcctccctcttctgaacctctacatgctgctggctggcatcaagcagaggtcatcactgggtgctgaacaggtcagctccctagggcaatgtgagcaaagtgttgtggctcatcctcgatcctttatgcccttttggcaagattcctttctcttctcagtcacagcagatggacacataatcttgttctcccaggggctgcattctcagtagtcttttccctgctccttgggcgcctggtcagggaggtttgtacaagcctgcgcacacacagcagtctgtcacgaggctgggccaaccttttttttttttttaaacagactcttgctctgtcattcaggctggagtgcagtggtgcaatctcagctcactgcaacctctgcttcccgggttcacaagcaattctcatgcctcagcctcccaagtggctaagacttaacaaacaggcacacaccatcactcgcagctaagtttttgtatttttagtagagaccacgtttcgccatgttgtccagactggtctcaaactcctggcctcgagtcatccacgcacctcagcctcccaaagtgctgggattacaggcgtgagccatggcgcccagcctgggccaaccttttctgagccatagtccagctgtactacagctgtatccaaaaggtaccatgtatctcccaggtaacctgaagacctaactgggcatactaactgtcctcagatttcagttctttaaggcccatctcttctagatcagtgtaaatatctgaactcacttggtgcttcaacccaattggtcttgggattcatcctttacctacccagctctcattctcttctaggttgttct

SEQ ID NO: 242164 - DNA, 438 bp, Homo sapiens
gagatatttgccaggcggcttccctttcttagcttggggacctcttgcatgctcactggttgttggcagaattgacccggttgtggttatgagacaaagactgccattctcttgctagccatcagccaggacttttcagctcctgggcaacagagcaagactctgcctcaaaaaaaaaaaaaaaaaaaaaaaaaggcaagagagttaaatgagaagagaaacagaagctgctaagagctttttattcccggcatctttagcttcagggagaattatggatggaactgtgtcccctaaaaagatatgtcaaagccctgatgcctggaacctgggaatctgaccttatttggaaatagagtctttttggatgtcatcaagttaagatgaggtcatactccattagaataggccttcgtttaatagactgggttcttataa

SEQ ID NO: 242165 - DNA, 619 bp, Homo sapiens
gacctgcctccatgattcagttacctcccacctggtccctcctgcaacatgtgggaattcaagaagagatttgggtgggtacacagccaaaccatatcaaaaaccatttataaaactctaagcagccttaaaggaaaccaccaagggaccaaggcctgatgaagcaagagtaggagggaacagatgcttggatagggcaggtgagtcacaggctgatgggagctgccaccgtcagtagaggtcctgatgacctgggagggtgggagccagacagatgggagtatcctagcctcagttcctttccatcctcagaactcctcccagtgcctctcaatggctaaaccaaccaaaggttggagctcaaggaagctcctgaggctatctttacaggtcagccagttgggaacagagttgacggagaggggacaggaggtgactagatttggaaggaaaattagaaaacttttggccgggcatggtggctcatgcctgtaatcccagcactttcgggtcagttgagtctaacataggggtgtccaaacttttggcttccctgggccacattggaagaaaaagaattgtctttggctgcacataatatacaattgttgatgagcta

SEQ ID NO: 242166 - DNA, 398 bp, Homo sapiens
aaaaaaaaaaaaaaaaaaaaaagaaccatggccactgactcctgcagccccctcccccagcaaatgcactttccaaaaaacagagagaagtgcaatccttttgggtttctctcttctctctccattgccctgggcaatcatgttaaaactcacatggctggtgcttattcagataaacctaacaatgcacaccgctggttaccatgtgaatcttcacaaaccacacaagaatgtgctggttcaaatcccccccgaccccctccaaagcaaaatttattcaagacagcaaactgctcagcagctttatgaaagcaaatggtgctagagggaattctatcttgtatttacaaattaaaaattagatgcatcatcatgcaataaaggttagaaaagcagca

SEQ ID NO: 242167 - DNA, 507 bp, Homo sapiens
gtgtgaccactgcgaaaggatccctggccactaagaagtgacaagtgatatcttgttccactttctgtgcccattccaagtggctttgccgaaaggacagggggccaccaccttgggtggcagctccttttatttcctccccttggactctggcccagctaccacccaacagtgaccccaggggaaaacgccaagaggcctctttaagggaggggctgggaaaggccccacagaggaccagaggggtgctccaacggtggccgggagaagaaggggtgggtggctgagaggtggcgggtggggcgggggctgcctgaaccttgacctaactctaggcgccctgctggggggtgctacaggctaaaacaccctgcagaatgctgagctgagtgtcccactggagaacaggagggaaggaggtcaggagcctgccagacgaaaagaggggtgggtgagaagaaggggcgacctggagggacacggactctggcaggagagtgcggccgc

SEQ ID NO: 242168 - DNA, 435 bp, Homo sapiens
caaagcaacacaatcagtaaacaaacattagaaccagggctgaaactttaggtttttggttccttgaagtgctattttcacttaaccaggaaaaaaatgcctgaccctatcgacttgttcagccaataatggctgtgtttgtaaagtcactgaaatatatgacttgaagatacagttcggtgatttcttagagagctctacctgtcatttctataggggtagaggattattttccccaacccatctttaaccttgctaataaatgattcattcagcaaatattgaatgtgttacacctgtgtgtactgggcagataacagcgaacatgaggaataaacttctgtcctcaagggacttatcttctatttggggagataatagacaaacaatagtaatagctaataaaatattagatagaagtaagtactatgaaga

SEQ ID NO: 242169 - DNA, 404 bp, Homo sapiens
tagatttgtgctgttttcccactaatcccgaatttatcttaaatatctctcattctacttaatttatagtttaagagactatttcttgatatgtttgttcatttttcctccacattccaactacacggatgtctattgctgtcatcattagtctgaacattgtttaagaggtaggcaccttcaacagccattgagtatacatttaaataatattaatcgttcaaatcttatccatgccggactttacaatggagaaaggaagctaaagtgagattggtcaaccttgtaaaacattatttccaacaatttctcttgtcaaaaccaaagtatctttgtttatttaatttattgggttttattccaatgtatatggttctatttctcaatattatgtctactgtaac

SEQ ID NO: 242170 - DNA, 305 bp, Homo sapiens
cagtgagaactataactcagtacctaagaatgagctaaaataaaatatatcaagaaaatgacctggaatatgaataatataaaccgaaaccagaaagactcagaaatcaggtattaaaactcaggaaaaaaaatctaagataatttcagaaaagatgagtcatgtggaaagatcatttccagtgaataaaccacaataatgccttcagagaaagagaagagaaaaaggggacaaatgtttaaacatcagtaagaaatagaggaaaaaaccccagcaaaacacaaagatggaaaatgagtccctca

SEQ ID NO: 242171 - DNA, 1015 bp, Homo sapiens
gctctgttacccaggctggagtgcagtggcacgatctcagctcaccgcaacctccgtctctcgggttcaagccattctcctcccaagtagctgggatcataggcatgagcaaccacagccagctaatttttgtatttttagtagagacggggtttcaccacggtggccatgctggtctcgaactcctgacctcaagttatctgcctgcctcggcctcccaaagtgctgggattacaggcatgagccaccacgccgggccaaactcttattttttgcttacaagcaaatggtacatagcaagaatgatcaatgatgaaggattataaaacctcctcccatgaaactttaaaagggaatcaatccattaaatttctttaaattatttatgccataagcaatcaatctgaacatacgcttaagggctcctctttggtccattcaggatttgacttggggaaacacgggtggtcagcctttctcttaaaggtacagtttagaaaataagcaagccaaggaactatttcttctaaattattctcctgttggtcatttttattactgaagttctcaataatcaatagaggaaaaaaaattactatttctctttccttagaattctaatgaccaatcatagagtacatgatgctgttgaggaggtggtagatggtgcgatgaatgatttatgttttctaagtaaaatgtagggtcagcaatgcaaggctctgtcagttttggcaaaacaggtcctgaactgttttgttttgtttttagagacactgtcttgctgtcacccaagctgaagtgcagtgacgccatcatagttcactgcaggctccaactcctgggctcaaggggtcctcctggctcagtctcccaagtagctaggactacaggcacaaaccaccatgcttggttaatttaaaaaaatttttttgtagagacgaggtcttgctatgttgcccaggctggtcttaaaatcctggcctcaaggtgaaatcctcctgactcagtctcc

SEQ ID NO: 242172 - DNA, 418 bp, Homo sapiens
agtgtaatgtctaaaaatgttcattttaggtagttcttatttttctgttaaacaatgcaaagtctagatttaaaataatctttatttgaaccaaaaagctctttcttaaaaaaaaaaattaaactttgtttatttttaatttcatagcaggtgactattatagttttcaaagtattatgtaaacatattactgcaataatctttgaaacttttctctgaactaggcatccttgtttttggcaacagaatgtgaacattacatatccagtttgaatctaattttaaagaattaaccacccatggtggtatctgcctgtaatcccagttactcaggaggctgaggaaggaggatcgtttgagcctaggactttgagactagcctgggcagtatgatgagactatctcaaaatgcataaat

SEQ ID NO: 242173 - DNA, 764 bp, Homo sapiens
aaaacacgaactaagaaatggtagtttattttctttttgccatgcagcaaaggagggtcgaatgtaaagctgatacagttgctggctgagcttttcccgcggcagccagtgcgtgcttcctccacttcttcgagacttctccgtgctcctgccccacctcccaggctgaagattcatgcaggccctgcgcttagcccagactctggccaggcccggcccagcccgaaggtgggcggctcccggcgcagggcggcccagccccaaccactgagaggaggaccctccggcgtcctagagtggccgcaggccgcggcgtcgggttggaaaaccaggagagcatggagctttttcgctggtccggcgcggtctcttgcgttcctgtggcgggcacctgactccccatgcccgagtactgtcctcaggcggaacggcgtctgcagcgaggagcggggttccagcaggctcggctgacgcggtccctggcatttcccgtgctggccctgggtcgccctcgatgctgcttcccgctgggagcctccttctgacggcggaaaggagcttcacctggggcggccggcggggaacggagaagaatccaccggggaagtggacggggctggctcccgggcctggcgctgcggctctcgggccgtcagacctcccgcgggttgcgtcactttcctcggttttctagacagcagttgtggggttgaatccttgccgtggttttgtaagaattaaatgagataatgaacgcgaacacc

SEQ ID NO: 242174 - DNA, 85 bp, Homo sapiens
aaaagatatcccagaagaaactgaagaaacaaaaacttatggcacgggagtaaattcagcattaaaataaatgtaattaaaagga

SEQ ID NO: 242175 - DNA, 506 bp, Homo sapiens
cggcgttttgcggggtcttcctgttctgaacgcgcgtaacttttgcctcagtatctcacttcttggaatccggcggcgttcacgtgtgtgctccagagaagggcgccagagggtattccctgaaagtgaaaggtcggcgaaagaggagtaaagacggcgagacgcgtccacgcagggggagtctgtgcggtttggaggaacgcgccaatgtctgcactcatgaggagcccccaagggcggttttaagagggtgaagcaggaccgggcgcagtgacttacgcctgtaatctaagtgctttggaaggcctaggcaggaggatctcgagcccaggagttcgagattagcctgagacctcatcgctaccaaaataaataaagtaggcatccatttgtgtaaaacaaaccatatatacacacatatatacatatataaacatttgtatatataggtataggcatagttatctataccttgtaaaccaaaaataaaattgtaagcctcccca

SEQ ID NO: 242176 - DNA, 604 bp, Homo sapiens
tactttattaaaatattgagttttatttcacaggcatatttttgtcttcccacaatttccatgtctgaccaccgctactactatgtcctatcataacattccatacatatttaaaaccaagcaaagggtgagttccatctttaaaaactaaacaggcattttggacaacacattcttggcaatggaacctggacaacatttatcaaacacggtagggaaagttctcactctgcattataaaaaggacagccatatatcaactgttacagaaatgaaatatgatggaaaatttttaacaaattgttgaaactattttcttaaggagacttcctccactgccagagatcttgaatagcctcttggtcagtcatccagaagcaattcttcacaaaattgatgaactcggcttccactttgggaagagaaccccctttttctatacttgcttgcatttttgctttaatgtcttctacagaactagatccttttggtgttttaggagttttttcctgtgttttgaaggattcttgtccttttgatcttggtgctgatgatggttttgagtcttttccattctgatttgacttgtgtgcatttttggctg

SEQ ID NO: 242177 - DNA, 583 bp, Homo sapiens
caacagtgtttgagaggattctgaaactctctgtaggcgaaaaagaagccaccaaactgactctgtttcaaatttctactctaagttatttctcctgttcgtgtgaaccctgggacagaacgggtgtgtattcattttaaccttagctcagatggacagctccaggtgtgtaagtgggttggtggtggctgcccagagaggaggagatatttcagatttggtttctccaaggttgcaccattgattgcattccatgtacattatgatcccaaagtgtgtttaatcgagagctacacaacagtgcaaagtggcggatgttaatgttgactagaacttaacctatacgttttgagtgccttcctggggcctggattttaactgagcatcgttaatgtgatgaatttctcactgttaattaaatgttataatgagtcttcaatacttttaaaaccagaagagaagtattctgtgagaaaactttatatatgtttaaaaaacaaaagaattccatctttctgttgacactttccccacacctttgtgcggcattttctaaaagagaataaaataacagcaaaatgtc

SEQ ID NO: 242178 - DNA, 423 bp, Homo sapiens
aatttagaagcactagctttattcataaaatccaagaactggaagcaactcaaatgtccatccacaggaaaataagcacattgtgatatattcatacaatgaaattatgcctagcaattaaaaaacagaactgctgacaggcacggtggctcacgcctgtaatctcagcactttgggaggccaagaggggtggatcacctgaggtcaggagtttgagaccagcctggccaacacggtgaaaccccatttctactaaaaatacaaaaattagctgggtatggtggtgcatggtgcatgcctgtaatcccagctactcaggaggctgaggcaggagaattgcttgaacctgagaggtggaagctgcagtgagccgagatcgcaccactgcactccagcctggatgacagaacgagactgactctc

SEQ ID NO: 242179 - DNA, 502 bp, Homo sapiens
tagagacggggtcttactatgttgcccagcataatcttcaattcctggccccaagtgatcctcccacctcagcctcccaaagcactgggattacaggtgtgggtcaccacacctggccaaaaacatgttaagttttaaaatcaaaagaaaatcagcaagccattttgcatatttttctggagatatataaatacagatatatatagatagagataaagatatacagatagatctggactggaaaccttatgataatatagtatcagttgggtataacttaaaaggacaaagggaactgattaaaaaagactcaaggcatatatatatacatacacacacatatatacatatacatatatatacatgtacatatatacatatacatacacatacatatatacatatacacatatatacatatacatatatacatatacacatatatacatatacatatatacatatacacatatatacatatacatatatatacatatacata

SEQ ID NO: 242180 - DNA, 310 bp, Homo sapiens
gaattcggcacgaggagaactagtcttgaggggggcattaaaatgagttcatagtgatttatctttgctagattaaataggttaagagtggatgataggaaacccatgaatctttggtatgattacataaaatggtttaattgcaataaaggagtaaaaaaaatagatttatgtttatatgcttaatgtttatattaatggcaaaaggataggtgttggggaaataacagcagcacagtatcagtactgtatgttaactttaagggttgagtgactctggaagttaggtctcaccaccctttctctcaca

SEQ ID NO: 242181 - DNA, 447 bp, Homo sapiens
gctcccaaataacgtggggctgtgtctaggctgtttctttcctcttgggccagctgtagggtttgcctttccttgtctgtctgcacctgcactgccgccatattgtttccattgttactgctttgtaagtcataatggcaggtgggacaagtcattcctccccctccttcttcagagtggtcttggctattctttacctcccccctttttattatgtcactgttcgtgttgatcatattaccaactttcagatttttctgttaaatcagcattgaaaatttacctcacagcctgcgtcaggacttccttagagtcctaattctcctttctgtccccgttaccctccggtcccctgtacctgttcccttggttgccctgcttcaggtgtcggctacctcaggctgcattcctacatcagcccccatacctccacacccccgcatcatc

SEQ ID NO: 242182 - DNA, 258 bp, Homo sapiens
atacagaatacgtttcatacctaatgagccccccaaaatgatccatctcaaccgctcctcagcggcgagggtcactttttaattacactgcagttagattagggacttacaccagtaacatttggggacataagaaaattaaatctccgtgggtgttcaccctgtttgatttctcagatcattcttttcttgtttttagagacaacatctctctctgccacccagggtggagtgcagtggtgcgatcattgctcactg

SEQ ID NO: 242183 - DNA, 265 bp, Homo sapiens
gaggctcccacttatgcctcggtgggctctcccacctgcgtcacaccctggctagtgacccagtcagacgtgctggggaccctggctgaccacctgtaccaggggcaaggaaggaaggagaggggagcattgtgaagcagggcaggatgactcttgaaggtggagacaggccctggacagctctgggacccttaatggtggcagcagcccccagtcataggcctcattgtgtgggcagcctgggcgaaagagtgaaactccgtcc

SEQ ID NO: 242184 - DNA, 523 bp, Homo sapiens
gatgagaaaacacagacactgatgcatatactgatgtggagaaaattacaagcttctaggcaaaaataacaaattacttgtgagggaataataagcacactgacattaactcagcagatgaggacacaaaaccccatgaatgagaaccagcacagataacaggtaacagatcagcagtggttaccagaggcttggggtggggaggctggacagggaaaggggaaacgttggtcaacaggcacagtttcagtgagacaggaggaataagttctggtgatctattgcacagcataatgactatagctaataatgtatatttcaaaatagctaaaagaaaggattttaaatgttctcaccgcaaagaaatgataaatactagtggtagatatgctaattagcctgatttgatctttccacaatgcatatacatcttaaaatagcgtgttgttctccatcaatatataaatatatacaattattatttgtcaaataaaacaattaaaaataattgtcaattaaaaaa

SEQ ID NO: 242185 - DNA, 1244 bp, Homo sapiens
atttttaaaaaaaactattgtcctaattttggctttaacttttcctgaatgccatttgctgtaattgcttaacttgtttccctgtctttaaaatggttaattctattcagacatataaatgcagatctatgttgaccatcttggtcctggtctgaagtatttcatgtcatgaaggtcactattctgttttccagacaggtagtttcctaaggcaagatgagtggttggggctgtgtgagcaggctttgcctgggcagaacaagtgggcagaacatgccaactagtagatatctttaaagagaacagacaagtaagctagcgtgtgcataaccaaatcaatactagagtatcggatttacagcttgacttgttttgactgaaaacaaaagcacacagaacagttacatcatcctaaaaattccttgtgtggcccctttgtggttactttagtcaatttctctttcttcccttaaccctgggcaatcactgatttatctgcctttcctatttgccttttccaaagtatcacataaatgaaatcatacaatatgtagtttttgcatcagacctctgtcacttaacaaaatgcattttaagattcatctatattattgcctggattggtggttctttcttttttttttccctgagtagtaactcattgtatggatgtaacactgtacatgcatctgtcaaggacatcttagatgtttccaagttgcaacaattatgaataaatctgctataaacatttgtatacaggtttttggttggatgtaggttttcagtacacttgagtaaatacctcggaatgggattgctggatggtttggtaagggcggatggacctttataataaaccgtgaaactgtttttcaaagtggctatatgattttgcattcccactagaaatgtttgcagaatctaatttggtatcttaaaatttgattaatttgtagttaactcttcccaggtcttcccttaagagcaaatacttcccaggtctaagatgaaatactttctcagggtttactcttttgaaactgtacttgatcttgctcttcggtaatatgtttgctaggacatgtacaagtatcccataagagaaaaaaagatattttcaagtagatgaaaaggcaagcacagactgggagaaaacatttgcaaaaacatctgtctaacaaagaaattgtatctagtgtgtgtaaagaactcttacaactccatagtaaggaaacaacaac

SEQ ID NO: 242186 - DNA, 406 bp, Homo sapiens
agagactgctgatttgattgaggcttaaactgtgaaagaaaatggaaacaaacacaaaactgatttgtgaaggtcactttaaaaagaccaaagtttctgtctgtggatatggatatatttttaagtttcaaagctaatgggttttatacatattcttagctttctgattttttggttagtggattgtaccttgcatcttactgagctgccccatctagggctatgccttcatttttaacgtagactattactttagaggactcatacttgttcctactgctttaacttggcaaccatggttgtcccctggaaatgagcatggaaatgtgtagagtcgctatcattgcttcccggcactgaatgagatatcgagatagggaacttaaacaataaatcttttttatag

SEQ ID NO: 242187 - DNA, 605 bp, Homo sapiens
ttgcatcatcctgtaaactactaaatatttagccggcgaattgtttttctctgaagtttaccagtctgttgaccaagaccaagaatccaactgctacagttaacaaagaataaaaaatcagacttttggctgggcacagtggctcagacccagcatgttgtgaggctgaggcaggaggactgcttgtgcctggaaaatttctgcataattcaccccttaatttgcatgtagttaaaagtgggtataaataggattgcagagctgctgctgagctgctaactctgggcacactgcctatggggtagccctgtccacaagaagcagtgtacctctgctgctgctgtgcaatgctgcttcaatacagtttgctaacaccactggatcgcatcagggcaaagccaagaaccctctcaggctaagccccaattttggggattgcctgccctgcatcagaggcatcactccagtctctacctccaacttcacatggcatactcccctgtgtcttctgtttccaaatttccctcatctttttttttgagatggagtcttgctcttgtcacccaggctggagtgcagtggcatgatctcagctcactgcaacc

SEQ ID NO: 242188 - DNA, 296 bp, Homo sapiens
catgctatgacatggacgaaacttgaaaacattatactggtgaaagaagccagtcacaaaggaccatgtattattgcatgattctgtttatataaaatgttcagataatagccaaatccatagagacagaaagtgaatttgtggttgcccggagttggcaggaggaggagatgggatgtgaccattaatgtttatggggcttcttttcgggatgataaaaatattctaattgattgtggtaataattatgtaactttgtaaatatatacatgaaacatttaattatacaatttaaa

SEQ ID NO: 242189 - DNA, 609 bp, Homo sapiens
ggacacctcatatcctccaccctgtgaggttttagtctctcaactaagttgttcctatcacatatggaacaatgtcagcttaaaactaggggccccctggatccagtcctaaaattctgttttcactagatctagaatggggctggaaatctttaaagaactccctcggtggcttctgcgatgaagctgtgtttggaaataccaccttgtctaagaatatacagctggttaaggacagaataaatttcacacttagagtgatatgattccaaaacacaagcttttccatattctatgtattatttttacatcgccttaagaaaacacttatgcaaacgtaaacttgagttaaaaaaaaaaaaaaacaaaaaaaacccaaaagccattttgtttactagatcagtggtcctcaacccttttggaaccagggaccggtttcatggaagcagatccggggaggagggatgatggtttggaatcaaacttccacctcagatcatcaggcattagattctcataaggaaccttcatgcaacgtagatccctcacgtgcgcagttcacaatagggttcacattcctatgagaatctaatgccactgctgatctga

SEQ ID NO: 242190 - DNA, 308 bp, Homo sapiens
cgtccctggaccagccctgccatcagcttgcccagcctagttccctttctcttctgcgctctgaatgtgcactccgcgtgttcagatgctcatggtttctgatgagaagttggctgtgtctctcacggagcctctctcggaggtgatgagtgacttttctcttgctgccgtcaagattcctggctgtggattggatggatgggaagctctgtccctgaacagcccttgtgactatggggctgtccttccacagtgtgcactgagggtgcaggccaaaccttttaaagaataaacagaaagaaatcggc

SEQ ID NO: 242191 - DNA, 1364 bp, Homo sapiens
tccagatctcagaaagagatccctggggattggctgaaagcaaacagaatcaatggcagcgggaagaatgaaagtcagatttcaggtagaacctcctgtctcagtaacaggagaaaaattcctccagtaaccttgaatatcttctgaacacggaaactgagacccaaagaggtcaagcaactgtccagagtcacacagcatggaactggctgaaccatgaccaaaaatcaagtctcctgactcccaggccaaggttcttgccagggctccccagatgtctatcaggggagggagaaagagggaggtggagagaagaaagagagagagggagagcgtgggcagctctcctccctctcccacgtgcagcccagctggctgcctcccagtctcctgggccctggggaattttccagcctctctggatgagaacaatcaatctcctgcctccaccggacccccaacatcccccatccatgccaaagctgaggccatgacccaagttgagaaaagagaatctgccctccacgctcctgcatcctgagttccccccatctccagtgttagccttgggccttcctcactggattctattccacagtggccactgggagagcctgtcctgccaacctccttgaacacctgccccctttctcccagacttggagtgggggcctaggcagctgagttcctctccgaggccctgcacgggcatctgggtcttgtgccataggcatgtgggagtagggctgaacgagcggggatgtggctctgaatgctggcacagctgtgttcagagaatgggggctttgatagcttctgaaagaggccaggaagcacgggaccccagcccaggcaggagggggtggggggcagaaatggctgagtgtggctctgagggctcttgctgccgcagacagggagtgtggagtgggaggggatgtggagcagtagggagacagcaatggggactacaggctgaacagcatcatcagagagcccccctgctgcaccagcaggagccagcgtccccatgagctggtcagaccgcgctttgagggttgcaaacccatgtgttcagaggagaccatcagcttgttgcacaaagaacagcgggaggaactggagggctggagcccgagtacatctgaatttacctcttgaggtcccaccagaaggctgcctgtagtgcctctcccagcctcctatggggaaggaccactcatttgtctgtgatgttggggcaggtactaatctccctgtgcttcagtttcttcacctgtaaaatggtaataaccccttgttgtatggttttgatgttggagccatgtaaatattttatataattaaaatacgaaattaattag

SEQ ID NO: 242192 - DNA, 580 bp, Homo sapiens
tggtctgacttctttcacgtagcataatttggagagctgttgactttagcatgtttgtgtaccttctgggaagtagttaaagctgtcatccataactgttccattttgaaggacacagaatgttcttactgaggcgtttgctgcctagctcccttccaccggtcctttctgggaagaagcgtgctgcgattgtacagagtgggtctggagatcgttgagaatgaatatttataaactataggccaaaggaaaagagtgacagattacatcgcataaaaatttaaaattctatattgctgaatacatttggaaccaaactgaaagatattcaaactcggaagaaatgtttgtatcataaataatatccccattttacaaggagctcctaagattggtaagaaaaagacaacccgctagaaaaaaaatgaacaaagattatgaaaaggaaattcatgcaagtaacgcaggtgactaataaacacagaaacacaaagcctctgtagttactgaggaaatgtgctaaggaagttacagtcgaaacactgttttgcagggattagatttgctgtaattaagacaa

SEQ ID NO: 242193 - DNA, 194 bp, Homo sapiens
actctgtattgccgataatgtataaggttgtagacatttgttaatcccaaaaaagttagaaaaatgtcattttattattaatcagctaatgagtattttgaatgttagcctggtgcctattaataaatttctataatcttgagtttctatttggtagaataataaacctttcatttgggaagatgtgtttgtat

SEQ ID NO: 242194 - DNA, 260 bp, Homo sapiens
tgttgtagtcaagacactcggagatcctagagacgcgaaaagcaggaggggaacgtgtgacggccactgcgaggctcagggagaatttaattcaaatttggatttttctcactcttacgctttggggcaatactgttaaatggtaaatatatagccattgtatgaacagcaatacacaaaggagttatttggaaatgaaagccttattgaaggcactggaaaaattaaacaaataaatgtttcctttagattgctcattc

SEQ ID NO: 242195 - DNA, 558 bp, Homo sapiens
atctgtctcagtctctcttccttcctctctttctctttacagtgaaaatctaaattccatataggatgtatatggaaaaagactaaaagagaagacaaaataaagacagtggatggtttattgacgtgaaatactgatatgtttttctttttctaatttgctttttattgccatgtgctaacattataaagtgaggaaggcttagcagaacaaagagaaatagccaagaatctctcttcctcctcctaattgaaaactctggacaacttccatgtaaacaaaaaagtgttacttccactagttttgttctcttttaaattaataaaagaagagaacaaatattgattatatcaccagtttttttctcaagtattatggcacatataaatctatgtttatacatcattttttgttttaaataatttttaaaacaaaaatttatgagcaactgttaagctggcagatggcgcttgggtgcttctctaaaagctgttttcattttttcttaggcttataaaataatacgaaaatgtaatttattttcaagacaaatttaaa

SEQ ID NO: 242196 - DNA, 469 bp, Homo sapiens
ttttaaaaagcatatattgtgcaaacacatttttcatgttctcttccagttaaattttacataaaacaagcccaaaacactatttaatgaagacctcttatataagtattaataatgagctaatcaataacttttgggtagatgaataactttgtccttaaattcgtaactctattttctgcttattttcacaccaacttgattatatagcggtgctctgaaattccacgaatgcttgaaccacctacacttgttgacagtttagcgaattggaaataatcagtaaattatttcataacttccaaagatataggaaggaaaattaacctattatttatctctgaaataagaataggtgctttacaccaaattcactggtatttggcagtattctcccaagtttcttagtttgaaaccagttaattgttctctttttaaatttaagataacataataggtagtagtcaat

SEQ ID NO: 242197 - DNA, 653 bp, Homo sapiens
gggccctgggacaaaaccccttttctggtaacagtcccagctactctggaggctgaggtggaagaattgcttgagcctagtctgcataacataatgagaccccacctcaaaattaaataaataaacaaaacaatttaagctaactgataagcatggagatctacttccatgtcttgaaataatacagttataatactctcacctctcaatggtttattttacttaaatcttcagttagaggaagaatatagtgaacacctgtatatccttatctagattcacacttgctttctctctcctgtttctgaactgagttagctgcagatagtatgtcacctaacaataatgacacgagaatttgaccttgatgaaacattactgtcatatgtagtctagtcatctattgatttctcagtttagaagatgtgctatgattattttgttgcccagctattccaaactcttctcccagatacatcaatttcttttctctcaatatgttcaaatacatatattgcctatcaatttcatcttcttgaagaatttgttcccagagcctctaacctgttcaagtctggatgggtagttgtctaagttagctgcaacctgttgtcttaatttgaaatggcttttcaatatcatttgaagaattc

SEQ ID NO: 242198 - DNA, 469 bp, Homo sapiens
gacgtcatgaagtctttgaatctcagtgcattgctaaagaaattttggcaggggatagggggagttaactttctcatatgtcatagtcatagcccaggttgtttaagttatgatctacagtacttcaatctttgcactccttcttttgaaataatgtcttattaagtaaaaggaaggaaatttttgccttgctcctaattgctgaaaaattttgcatagctaaacaatggattcaaaagaatccacctacaattaaagcctgattcagtaagatacaggagattatgtatgatgtaagacaaaaagattacaaaatgaaatgtctttatcccctgagaataatagtcatttagagtgttggttactcttttaagatcagaatacttaaggataatctgtagcctataaatacatggaaaggtagtataaataggatggtgatgctttaaaaaaaaactcactgatatct

SEQ ID NO: 242199 - DNA, 506 bp, Homo sapiens
atttccagtacttttaacttcctcttttagctatgtgagattaattaactattgctttctgtatttttatactcttaaaaatatccaacacggttgcatgatgcacccagtggtcaaaatgaaaccaagcaaaaaatgacaagtctaattagaaccggcctttggcaagcggatcctcaagcagtatctgtacccttcttgaagtacactgggagtattagcaacaaaacacaccagaaatatctgggtaatcatccagcaagagattggtaggtagagggaaagttgaaactgggaagaatctggcagtgttttctttaatgtaattgttgagaaaaaaactagagttcttttcttaggtaactaaacttgaattgtgaatcaaatgagaactacaaaacaagaaattaactctctttttcttacatatatgtagacgtttcaaatagaaacatttaagattccatttataccagtaagaaataaataataatttacttttgatt

SEQ ID NO: 242200 - DNA, 405 bp, Homo sapiens
tctccctttgtgattctttctaggtacaattagtgtttgtcacaatcttcaaacactactaagcgaccaattttgctgaagattttaagaggagatgacaattgtagacattatatgttgcactgcatttcaagcccagaatatctctagagaaaaaacaaatctccctcaatctcctctttatgttattctccaggaaggttccaaactttaccttctagcctcattcagcatctttcaagtcctcatctccttgctttccaaagctctaaatcacttctgttacataaatgcaattgggctttacttcagcttccccaatttatatctgtacagctattacaatcacactcaacaaactaaaaactgctttctgggcctacctttgttagaaggtggtggaac

SEQ ID NO: 242201 - DNA, 381 bp, Homo sapiens
agcctctggagtagctgagagtacaagcacatgccggtatgcctggctaatttttgtaaatttttttttttttggagagagggggttttgccatgttgctcaggctggtctcaaactcctgggctcaagcaattctcccacctcaccctcccaaagtgctggcattacaggcatgagccaccgcgcccaaccttcatgtattattcttgaatctaaaaggaaaaaagaatatgtatttttgtagtgattgctggagccctctttcctaggttggctgtggtcagtttgcagcacagtcctaatgttaatggagtctagccattctgatctggccttccaggtcattaggaggctctgccatcgtgtgaggaggtatgctat

SEQ ID NO: 242202 - DNA, 408 bp, Homo sapiens
taaacattaattttaaaagattgaggctgcttagttgcaatgaaaccataaataatattttgaatatagcagacttacttaaggaaaatagcaaggtgcctggcattattatctatgagcaggaactttttcttacatttaagaagatggcttgaacctgggaggcggaggttgcagtgagtcaagatcgccacactgcactctagcttgggcggcaaagcaagactccatctctacaaaaaacacaaaaattggctgggtgtggtggcacatgcctgttctcccagctattcatgtcgctgaggtggaaagattgcttgagccccagaggtcaaggctgcaatgagctgtgattgtgccactgtactacagcctgggcaacggagcaagaccctgtctaaaaaaaaa

SEQ ID NO: 242203 - DNA, 470 bp, Homo sapiens
tgttgtcacatgaaaccaccttcaatgagaattagaggcccacagtcttagctctgcaagagtaaagcaaatttcactcactcatgtcgcatacatctattcagaaccactttccggctccctcacacaccagctgtaggactctgggcaagttttgaacctcctaatgtctataaaatgggtgtaaggtcgagtgtggtggctcatgcccataatcccagcactttgggaggctgaggcaggtggatcacttgaggtcaggagttcaagaccagcctgggcaacatggtgaaatcccgtctctactaaaaagacaaaaattagctgggcatggtggtgcacgcctgtaatcccagctactcgggaggctgaggcaggagaattgtttgaactcgggaggcggaggttgcagtgagcccagatcctgccactgcactccaggctgggcgattaagccagactcagtctca

SEQ ID NO: 242204 - DNA, 308 bp, Homo sapiens
tctacttcttctacatacatggtacccaaattcatactaagctgttttctaggttgcttaagtgcaccctcccacccagcgcagcagccctgtgccctgtgtatgtgtggggagggaggtttaactctttcatgctacacctacgtagtctatgaactaaggtgataacttatacagatggtccccaacttctgatggtgcaacgtcatgacatattgactttatgatgatgtgaaacagttgcaattttgatgtaatgtacagtattcaattcaataaatgacagatattcagcactttattataaa

SEQ ID NO: 242205 - DNA, 723 bp, Homo sapiens
tcactgtgccaaattaacgagtgtgtacattgttcagtatgccaggttacatttctgctgagcttggcttctgtatgctgtcttttatccttgtaagcagaagtcattttatatctttaaaaaattagaacattggtagaattacagattttaaagttcaaacctgcacgctagtacttgtttaatgttttgtactgaagggcgcacattgtttatgtcattctgcgatacagcgacatgtatgtacacatacacactgcacagcgtgtataccgactggacacctgcaccaaatagtacacaccagactgcacatggacccgccccgcacactgcacatgcactttgcatgcatgcacacatcaaaccacagacactccacacacactgcactgcacactgccctgagcacactacactgtactgcacactgcactgcactttcagggctcacacgctgcaccacgcacactgcacggcgcacactgcactgcatacacacgttggttatggaggctgcttatggagcttccctgtgcagagaaatgctggcttgggttttaaatgggctacaattaacacttttagagcatttgggttttcaaagtgtcttcagagacttgatttttttaaagcctatattaggagtttttaaacatctgatgtaatagcttttttaaaaggaatcttgctgaattaaaagtgagtctaattactcggatt

SEQ ID NO: 242206 - DNA, 439 bp, Homo sapiens
aacctgggaggcggaggttgcaatgaaccgagatcacatcattgcactccaacctgggctacggagcgagactccatctcaaaaaaaacaaacaaacaaacaaaaacacaggatagtcttcttggccctacctgttggtgccaatggaaggataattcttagggccagggcacaagtgtcctgagttccccctgccagtgtggaaaaccacagatgcactggacggtgctcctcagagccagccttggatgctggctgctgctggctccccaattcctggttttagggacctctaagatggccccaatgtcctaacccgtccaccccactaaagagggacagtcccataatggtccaactctttgacaagaccatgagcaaggatgaagaacaaggggtagttgaccaacaaggccttcattcctgtccctctttatta

SEQ ID NO: 242207 - DNA, 322 bp, Homo sapiens
ggctgcttcaggggcgagggggtaacaaaaaagtcctggaactagagagtgctgatggttgcacgatgctgcgaatcatgtgaaatgccactccccatcgccccttgcctctgagagctgctcatctgccttctgcctagggatgcccctgttgtggatgctttgtataaatggaagcacacgacatgccccgtttgcatctggcatctttcacttagcgtgatgcttctgaggttcatccatattgtagatgtgtcagaacctccttcctctgtaaggccgagtaatactccattcttgaatataaccacgctggcattct

SEQ ID NO: 242208 - DNA, 579 bp, Homo sapiens
cagcccatgaagctccctgggatccctaacccaaagtcctctctcccttttgtgaaaactcttgacactttatctggtcttttaaaagtagcacttactactacttcctctatccttttttctgagcctgcccggccgcccgcctctctggaagataagttccctgaggaaagaccttgtcttctgtgtcctgccctcactggctgtagcagatcacttatggtttggggaccattcaagggtttcccacctacacatctgcccatgcttcttcctccccatggaatttcttctccccatcctaccactcgtctgcctgatgaatttccttgtttagcaagactgcccatccctcatgaccccagtgacagattttctgtcactgatacatgacattgtgttgcgccagtgtgtttatgtatgtgtatggacggcttagtttgtgagacactgcagtcaggatcttgtcttgttcatctgtgtatcgcaggcccagtttgtgcctggcccacagtatgtgcttagtaaatgtcttgtggatgagtggagtatactgggaagcccagcctccctcatatc

SEQ ID NO: 242209 - DNA, 477 bp, Homo sapiens
ataaatctattctttaaaaatggtagactgggactgattagaattgcatacaccttatacattagcatgtagggagaaaatctttataacagtatctttttatccaagaacatttcatccctcttcatctagcatctcttattatttcttggcaatattttggccccactttacttctaaagctcaatcttggaatcttatgttttttaatcaattatgaaaggaattttgaaactcctattggatctaattgaataatgctggcatatatatgactgtaagctattgattttggatatttactgtgtatccagccacttaaccaaagtttttaatattaaaatggatgtttttaggaaacagcttttcgaactttaggttttaaatgaactcttgaatataatgtattaatagaattcttgcattgttaggataaattttacctggtcatcaattattccttaaaagttatttgga

SEQ ID NO: 242210 - DNA, 493 bp, Homo sapiens
gagaaatttagtttaaggaattggttcacattgtgagggctggcaagttcaaattttacaggacaggccagcaggctggacattctataaagaattgatgttactatgctcttcagtcctaaggcggtctggaggcagaattccctcaattccctccttgtgcagaaacttcaggctttttttttttttttttgagatgtgttagggacccaacccagcaaaggccctccgccaaggcagatgttcccctcgctttgtttttctccatcccctccttttctcaccacctgcaggccctctgccaaggcagatgttccccagctgttgttttttcccctaacatctgcccatcaaccaggatgtggctctacccagaaacagcccccactccctaaaatatacttacaccccctagtctgtaagcctgggctgctgcctcctctgattgctgtggagcagcccagcaggttaataaacttgcttgcctgacttt

SEQ ID NO: 242211 - DNA, 910 bp, Homo sapiens
cttatgctttaaataccactctcatttcctgaaaaactttcttcctgcagttatcctctctcttctacagcatcaatttctccctaattaatcagtaccatcatacacatattctaaaatcttccatcttgaaataactcttgaccccatgtcattttcagactctccccttccaccagcatcacccccatttctctgttgttcttcattgcagaacttgtcaaaagagttgtctatactcactgactcaatttcttcacctctcattctcaacacatttggttaggcttctttcctctactctcccaaaactgctctagtttactgcttttctctctgccgccactcctatcatcatgcatggagatttcatatccacttggatgatccatttggcttctcagttctctgatctcctcacttggaaagatcttgtccttcaccccatcgtaggcacccactatcaaagccattgttaactgctctaccatttccagactatttcaagcactctaatctctaaccatgtcttagctttccagctcactcctccatgaacccccctatcaaattttcagcttaagggacttcaaatccattgatcctatgaacttttcattatatatcactatcttatgtcctgctgtctctcctcaccttatattccatggaccaacaatggaattactcccttgattctctctccctctgtcattcttgccttgttaaatcgaacccttgcctgcacttggaataacagataatggcaagagaaaggcaaacaactatgccaactatgataactgacctttaaatccatgcccctgaacttcaagtgggctctcagtgctgcttgccagtcatactgtatttccacagtcaatttattttccagctgtcccagaaatta

SEQ ID NO: 242212 - DNA, 548 bp, Homo sapiens
aattaaataaatactccaacaccattttttttttaactagggaaaatacctctatgaaggtaaacagtttagttgagatgaaaaggagtcagacatgtaaggattagggaaagatcaattcaatgtcgaagcagcaactaatgtccagtcctccaggtgggagtgaacttggcatgcttgaagcaaagaaataaggcctgcatggctggaatataatatgcagggaggagtcagaggctgcagtcatcagactgatgcatgtggcaagaggctattgtagagcatgctgtcatttggactgtggtgtcgatagtggacaggcaaggaacaggaagtctttaaaactgtccagcgatgcatgaatggataaagaaattgtgctgtatatatgcaatggaataatattcagcactaaaaaagaatgaaatcttgtcatttgtggcaacatagatggaactggaggacattgttaagtgaaataagccaggaagagaaagttaaacaccgcatgttctcactcatatgtggaagttaaaaaaaaaaaaaaa

SEQ ID NO: 242213 - DNA, 785 bp, Homo sapiens
agtgatgaaattagcagacaagcatgttgaaaaaaatgttataactatgcttatgtgaacatagcgaagagaatataagaagacatttaaagtgaaaatgtcatttgatggaattaatggcagaagaaaagatcagtgaacttgaatacatagcaataaaatgtatccaaaataaagcaaggagagaagaaacatatttaaaataaaaatgaacatatccacagtagcttatggggaaataccaagcactctagcctagtccttggaagaagctgagggaggaatagggtaaggtgaggcaatgcaacaggaagtatatttgatacaagctacacatcgaagaaactcaattaacccgaagaaggataagctcaaaacaccaaaacatgccaaactaacagtgataactttttaaaattttaacataagccagagtaaaatgaaacatcatgtagagaagaacaaagaaataaccttagaatattcatcaaaaactggccgggcgtgattgctcatgcctgtaatcctagcactttgagaggccgaggcaggcagattgcctgagctcaggagttcgagacaggcctgggcaacatggcgaaatcccatctctactcaaaatacaaaaaattagctggacgtggtagcacgcacctgtaatcccggctattcgggaggccgaggcacaagaattgtttcaacccaggaggcagaggttgcagtgagctgagattgcaccactgcattccagcctgggcaacagagcaagactctgtctagaagga

SEQ ID NO: 242214 - DNA, 526 bp, Homo sapiens
atggttatcccattatatgtaaacatggtaagaccattatataatgtaataggaaggttttaattaaaatgattagtattttaaaagtatgatgactgagattacaagtagcgaaaagcgtattttatatggtaaaaagtccaggtaagactctaccaaatgtaatcatttgtgttggagatttagtcaacaaacatttattgaacttgcgcatttagccagactctatgctaagcaacagaactgtgaagacaaataaaacacagtcctccaattgcctattcccatatgatagagaaactaaagaatgtgtttcatgctgtctcacagtgtttatattactttaaagataaatgagtggatcattttcattctcaacatccatcccccaaaatgagaaccacacttaattgctttcatatgtatgacttctattcctccccacctctcctgtcactggcttataaacgtagcttctgaagcgtgaagtacacgactatcaataacatcctttcttccttcaata

SEQ ID NO: 242215 - DNA, 392 bp, Homo sapiens
cagggctggggcctgacacctgcagcaggtgcctagaatgttaatgccaccaacttttcctgtcctctgctgggaatgccttgtccaccagcagctcctgccgagatcccttgatcggctccttctgtgagtctcgacaccacccaccaccgcactgttctcccgcagagatgacagacagcttaggtttaagtcttctgatgcccagcaagaatatacaaagaaaactggcctaaccaatgtattaatagtaaaatctggttcattcgtaagtagagttctgagggttttgagatgctgctgttatgtttaagctacaggcaatttacccaaggaatgtgatgttgaaatatgtttcagaataaacttccgcttgaaaattacaggcaata

SEQ ID NO: 242216 - DNA, 412 bp, Homo sapiens
tccaaacccaacccctccccaccaataaaacagatcaatggaaacaagattattctcacatacctgaggcagcccacctactgctcttactgcaggaagtttatctggggagtatttgggaaacagggttatcaatgccaagtgtgcacatgtgttacccataaacactgccatcatctaaccattacagcctgtatttgccaaaacaatattaaccaagaagattcaaagattgccaaacagaggttcagaatcaacatctcacacaacttcagcatccacaactacaaatcactaccgctttgcaatcactgtggcgccttgctttgggggataatgggtcttcatttctgaaggctctagtgtcaggtaaaactttgatgaaataaatttgttataattttcttttggt

SEQ ID NO: 242217 - DNA, 429 bp, Homo sapiens
tattcttttttaaaaattaaaacacaatttttcattttaaaagaatttcagacataaaaatgttttaaaaatagaatgaagaattcccatattccttgtcctctcccagcttctccaagtattaatatctcaaatagccacaacacaatgatcaaaagcaggaaattaacattgatatactattgtgagctaatttacagatcttacgaaaatttcaccggttggctcactgacgtcctttttctggttcaagatccaatccaggaccacacattgcatttaattgtcacgtctccaatctggggtagttcctcaagtctctgtcttctgtgaccttgataattctgaagagtattggttgggtattttgtagaatgtgcctcaattgtgtttaatgttttttgggattaaattcaagttatgagcatc

SEQ ID NO: 242218 - DNA, 378 bp, Homo sapiens
ttactatgcaccaggcgctgagaaggcagccttagaacagatggaaatccttgctttccgggagattccattctaatgggtcattgattcagtggcctcttcagtcatttgttcatatgcatttactcgtacctctcatgtgccaaggctcgattctcgaccctggggatttatccaagaacatggaagaaaatcccagccctcagggaacttcacttctagtaattcattgattcattgcttcatttgctcatttcttgatggatttatccattcaatatatatttcttaggcacttactaagcgccaggcactcttctaggtactggaaattcatcaaagaataaaacagacaagaaatcatgcctgtcagagctt

SEQ ID NO: 242219 - DNA, 778 bp, Homo sapiens
  misc_feature (1)..(1): n is a, c, g, or t
nacccttgcatgctgttggcaggactgtcacaagtgagttcatcagaatacagtatagtagtttctcaaaaaattaaaaagagatttccatatgatccagcaatcccatttctgggtttataatcacaagaattaaatgcagagactcaaagagatatttgtacacccagcattattcacaacagacaaaagacggaagcaacccaaatgttcttcaacaaatgaagatggccgggcgcggtggctcatgcctataatcccagcactttcggaggctgaggtgggcagatcacctgagatcaggaattcaagaccggcctggccaacatggtgaaaccccatggtgaaaccttggccaacatggtgaaacatctatactaaaaatacaaaaattagctgggcatggtggcacgtgcctgtacttccagctactcggtaggctgaggcaggacaatcacttgaacccaggagacagaggttgcagtgagccgagacagtgccactccagcttgaggaacagagcgagtctcaagaaaaaacaaacaaaaaacagacgaagagagaagcaaaacatatatacatacagtggaatgcagcctcgaaaaggaatgaagttctgacacgtgctacaacatggaggacatataggaagaaaaataaatcagtcacaaaaagacaaatactgaggtcaggcgcagtggctcatgcctgtaatatccgcaggtttggaggctgaggtgaaaggattgcctcagcccaggagttggagaccagcctg

SEQ ID NO: 242220 - DNA, 513 bp, Homo sapiens
actggctgttgtagctgtctgtgcaaggtgatgcctacatactggtagggtcaaactgaaaagctgttacaaagaatcagcaggataaaataatacaaaatgattgacgtgggttgttggaaagaatgagttctaagaggcatagggtacttactgctcttcctagaatctgccacagaggctttaaattaatgaagctaatattaagatatttggttaaatacacatagtacattctttttagatgctgatggggaaagatgacacacaagatagtagttttaggcgagtttattgtatgaggttgtgttctgcagtagagatttgactcacagcataaatccaagtatgtgatgagccatgtaataatagacgtctgctgttaattatggtggatactctcaatgaaatcagattttcttagggccatacccataaaaaaattcttgacctagatcttatataacagtcccaggtatatagtaaattttatgcatatggaatgttgacagg

SEQ ID NO: 242221 - DNA, 207 bp, Homo sapiens
gttaagaatcatcttgccactgagcttaagaagaagaagaaaaaagaatcagctacttaaagatagtcctaagtttgttgagcacccattgcataataggtatgaaatattcagttaacagggaggcccagatcaacaggcttattagaagaatgaactaaggtgtctaccatgattatttttctaagctggttggttaataaacag

SEQ ID NO: 242222 - DNA, 448 bp, Homo sapiens
tcaaaagcacataagaagtgattgaacatttccctggtacagaataggctcaataatgtcatctttgattattattaaatagatagatttgcattagagggctggaaggagaggggctgtgaggagatggacagagcattaggagcctgttagttttcactaacaagaaaaggatgaaactagggtaaaaaaagtagaagtaaatagacctccatgttttattctttcaatcattgaatgttgagagagtgccttctatctgccaggctctgttccagacgctgaggattcagatgagctgagagaggccataagagccaggtgacataggggattgacaggctgattttcagcctttgacttttactctgagatagaaatccatggaggtttttgagaagaggggtgacgtgaagtatgttcacatgaataaggaagactgtagcct

SEQ ID NO: 242223 - DNA, 694 bp, Homo sapiens
ccatttaggcctcattcctgcatcagtctttatgtacttcagttacaaaatcatcacatcttagtgtgattgtttctcactccctgactaaattgtgaggtctttagagatgaggactatatctgtctacctttttatatccagttcccagtatgctgcttgacatgtcataggtagttagtaaattctttctctgtgaacacacaaatggaaggatggcccattcttttaggagttcatatgagcttgctaactctgagtcagaatgacccgtgaactgaaacattcagacgacaccaccactaaaaaccatggggattcaattcttttggagttttactgctgaatgtacattttgcttaatttttctttctggggaacttgccaaaatttaggtaagggcgccaggtgtggtggctcatgcttgtagtcccagcaccttgggaagccaaggcaggcatatcgcttgagtccagaagttcgacaccagcctgggcagcatggcaaaaccccatctctacaaaaatacaaaaaatcagccggacttggtggcgtgtgcctgtagtgcctgcagctactcggtaggctggggtgggaggaccccttgagcttgggaggtggaggttgcagtgagccaagatcaccccactgcactccagcctgtgtgacagagtgagaccctgtctcaaaaaaa

SEQ ID NO: 242224 - DNA, 945 bp, Homo sapiens
catatgcgtcacacatattgccctatattggactaattccattctctcattactctgagcccttgcagattctgtgccctttacttggacagttcctgtttttctccccatcaaaccagtacacacccaagaatcaacgaccgcattcacagacaaattttcctaactctcttttccttccaggactggcctttgtatatgcatccctagcactctctaataatttggagatttcttaactgtcttttcctactaaactcaaatccttgagagtagtaaccattcatctttttttctccagccctaactcagaactgagtatctaatagatccacactaatatttactatgaaaaaaaagtaatattatgtaatggatgaaagagtgagtagacgaatggttaaagccaaaggacaagataatggaaagagttcctactgtgagatggacagcaacacagagggaaatgatcagaaaaccagtatagggacctcattctgcagtaagaagagtttgcagaaagaacatctagtctctgacagaactgggctaaaacacaggggttcagtcaaaaaaaaaatgacatggacaaaactcagtaactggagaaggggagtgaaaggaacctggtcacgaagttacaagtggtcaggttggcaccaccctagggaatggaacaaggtttcagtcacaagtgaatccaataataagcagccatagctggaagccagtaagtggagaacagggctagcaagtttggagtgagggcaagagcaaagactcacttgatgctgtgttggtaaattaccaaccttgagctccctaagtgaccctcacctttctaagattaagaccaggtctaccatctagaagctgaagtgggactgcacttagaaatatgtgccacagttgcccaacctcctgattgtattcactcgtgcagag

SEQ ID NO: 242225 - DNA, 697 bp, Homo sapiens
tcctgtttttcattttgtctcaatttcattcttatgaaaatattaaaaagtgtcatatgaatgtcatggagaagtgtcttgttttctgttttaaatgtgaaatcttcttgttggttaagtatcactcttagctataaatggtagagtttgcctggagaagccagctctccagaagaaaaaacccctaattaatagtgtttcctaattcccatggtgcaaatacttctacatggccaaattcaaccaacatcattgaatgaggagttgaaaaaatacgtgcaataacatattattatgtagtatttccaccatacaaatcaaataggtaaaatatgctgaagagtaaaaatagaagggaaatgttattaaataaatagaaaattatgagtttgaatatttacttatttcaaaaaacttttaagttcaggggtacatgtgcaggtttggtatataagtaaacttacaatcacaggagtgtgatgacaaattatttcatcaccaggatattaagcctagtatccattatttatttttcctgatcctctccctcctcccaccctgatcctctgataggccctagtgtgtgttgttcccctctatgtgtccatgtgttctcatcactcatctcccacttataagtgagaatatgcagtatttggttttctgtttctgtgttagtttgctaaggagaatggcc

SEQ ID NO: 242226 - DNA, 335 bp, Homo sapiens
catgaaaagcattagttgtgagaattctgtatcgatagcttgatctgtactataagtaaaaacataaaacaaaaagttatggtaaatatggaaatgtctcagcaatttttgcctaaggttaatttgtagcaaggaaaggcttattaaatcagtatgagtctatcctgtaaagaacatctatatgaagttaagataaaacattgtgtctacattctctacaggttctattttgtacatgtaataaaatcacaaagaatgcataagaaataaatatgagggggaataaggaggtagactaaggacttgggagtctgtagtttcatatcctctaattt

SEQ ID NO: 242227 - DNA, 229 bp, Homo sapiens
aaatctgaatatggtgtttttaaaataaactgtgttaaactaatttgtaatatcagaagtcaggaagggaagcatgagggggcatctaggggctggtaatgttgtgtttcctcctgtgggtattggttacctgagttaatttttttttgtgaaattacaacaagctgtgcacttatgaaagttgtacttttctatacatgtattcttattcaataaaaagaaaaaaatg

SEQ ID NO: 242228 - DNA, 379 bp, Homo sapiens
gctcagagcaaagtagtaacttgcccaaggtgacaagctggttagatggtggagcaagaatgtcagtctaggacattgattcaaaaaacgtgcttttttgggccaggcacagtggctcacatcttgtaatcccagtaccttgggaggccaaggcaagaggtttacttgaggccaaggttcaagaccagcctgaccaacatggtgaaaacctggctctattaaaaatacaaaaattagccaggcgtggtggcacatgcctgtagtcccagctacttgggactgaatcaggagaatcgcttgaacctgggaggtagaggttgcagtgagccgagatcgcaccactgcactccagcctgggtgacagagtgagactctgttt

SEQ ID NO: 242229 - DNA, 334 bp, Homo sapiens
agcaaggcaggataccagctgcgcgtcacttcactaatttggacttttaaaagtctctcttccaggacagggcgcggtggctcatgcctgtaatcccagcactttgggaggcggatcacctgaggtcaggagttcaagaccagcctgaccaacatggtgaaaacctggctctattaaaaatacaaaaattagccaggcgtggtggcacatgcctgtagtcccagctacttgggactgaatcaggagaatcgcttgaacctgggaggtagaggttgcagtgagccgagatcgcaccactgcactccagcctgggtgacagagtgagactctgttt

SEQ ID NO: 242230 - DNA, 254 bp, Homo sapiens
gaaggaaattttcttcataaataatttttctttctctcaataaatgaaagttctgaaactctggaggtttttgtttcagcaatggcagtgcagtgctcttgaaagaagtcttcagcagtactgcgaagaatgtgctaaaagccatgtttcagatacataaatggggaaggaattccgtaactgaggcagcttttaagacatagctgcagctctcatattgctgtatgtatagttaaggcttattagtactagct

SEQ ID NO: 242231 - DNA, 314 bp, Homo sapiens
catttgaaaatgtgcagattcttataaaagtccagatttcctgcttctcttgaaaaaatcagatctggaaacgctggcctcccattcccctgtggcagcagggagtggaggaggagatgcctgccttagacggggcaccagccctcctttctgcgcctccaccctgcctatttgctcacatgcctggcccctgtggacctttgagtttaagaacttgtttgaaacctttaggcttgtttgttccatgggagagtcctcctgggattttgatactttgtgcatctttaaagaaaaggtttaccgtgtttcaccaa

SEQ ID NO: 242232 - DNA, 663 bp, Homo sapiens
  misc_feature (218)..(218): n is a, c, g, or t
  misc_feature (335)..(335): n is a, c, g, or t
  misc_feature (652)..(652): n is a, c, g, or t
tgctagcagttaggagtctgcagtttctttttgttgttgttgttgttgttgagacagagtcttgctctatccccaggctgaagtacagtggcgcaatctcggctcactgcaacctccacctcccgggttcaagcgattctcctgcctcagcctcctgagtagctgggactacaagcacacaccgctactcccagcttatttattatttttagtagagnacagggtttcaccatgttggccaggatggtctccatctcgacctcatgatctgcccgcctcaccttcccaaagtgctgggattacaggcataaaccatcgctcctggcctcagtttncattgttacacagtcaaactccactggcattaaaaaacggttcgagaaggctaaacgtttaactttaacttttcctggcatttccacattttatcagaatatgaaggcttaattttcagcatctacaaagatgctatttcctagtataaatgtgataggaatgaagaagttggtactcactgactctaataactgacagtcccagggttgactgatgtagctggatccaagggtttgctcatccaaactcactctctgagatacccctagcaacacttggccttcactggcctggcttacgttcatcctaaaaccancaatgacctgg

SEQ ID NO: 242233 - DNA, 411 bp, Homo sapiens
tttcattccttcccatcttgtctccatgtatctcttcccaccattcattttccagatagcatctagactgttgtgttaaaaagcaaaactcctttcacaccacattccattaaatgccttcccactggcctttgaacaccaaaccaggcctttaaggctatgtcatctcctaccattgatctcagacctagctgcagttgcacaatacaacccctggctcaagtcttctgcacacattgttccctcacaggcaggaaccctatggtgactgatcaataattaaaacttgccttgggccaggcacagtggcttatacctataatcctagcactttgggaggccaaggtggatcagttgagcccaggagttacagaccagtctgggcatcatagagagaccttgcctctacta

SEQ ID NO: 242234 - DNA, 728 bp, Homo sapiens
cacccaggctggagtgcaggggtgcagtcatggctcactgtaacctcaaacttctgggttcaagtgatcctcccacctgagcctttgagtggctgagatcacacgtgtgcaccaccacatctggctaagttttgtgggttttttggtagagacagtgtcttactatgttgcccaggctgatcttgaactcctgggctcaagtgttcctcacatcttggcctcctaaaatgttgggattacaatcatgagccactgcacccagcccgaaattttttaaataaattttgccaggcaaggtgggataccgtgtagtcccagctactcgggaggcaaatgcaggaggatcacttgaagccaggaattccaggacgtgtagttcactgtgatcacgcctgtgaatgtccactgcactccagcctgagcaacccagtgagaccatatctcaaaaactaaataaaaataaagtattttaatatataactaaattgatatccaaaaaagtgctattttatatgactaatatatgaaagcttctgttgttccttaccttctccagttacttgccttgtgcagtctacaaatccagccttaaaaagttgtttaatttccatttcttctatgaaagatgttaaaaatttttttcctttgcttctcacttaagtttctttgtgaaatatctgttcatatttatcttttttaaaataacaaatgtttttctctttatatat

SEQ ID NO: 242235 - DNA, 481 bp, Homo sapiens
tttttaagcagactgttcagggagggctttaaatcttatctgtcagaacttgcagtgtggttttataaaaagacattttataaatgaacacattaaatcttatcaagacctgtgcagcctttaaaaaataaatcaggaattaccaatatgctgaaagaacatacttaaactggcaacatttagatgctctagattttaatttttcttaggtaagtggcattgaagaaatttgcattgcatataagataaagtcaatatttaagtaacatgagatccctagtaatgtagacaagaaaaaatgaatattgagaaagaagatttggatttttttcattaaaaataccaagatagggccgggtgcagtggcttacgcctgtaatcccagcactttgggaggccaagacaggctgattacctgaggccaggagttcgagactagcttggccaacatggtgaaacccctgtctctagtaaaaataca

SEQ ID NO: 242236 - DNA, 651 bp, Homo sapiens
ctgcttcacccctccctgccttggtacatgtgctccctactgcatagagtactcttttttggggagggtatcatagactgaattgtgtcccccttaaattcctatgtagaagccctaacccccagcaagttagaaggtgacttgcttctatttggagatggagcctttaaaaggtgactgaagttaaatgaggtcacgaggatggggccccgatcttcttggactggtggcaaggctgtgtgaggacacagcaagaaggtggacatctgcaagccaagcagagaggctcagaaggagccaaccctgctgatgttgatcttggacttgtggcctctagaactgtgagggaagaaacttctaatgtttaagccacacagtctgtggtattttttaggaaagccctagcaagttaatacacagggatctttactttttctatataagaagtatataaacaattgtttcttataatttaaggacagaggtgcaccaggaaatgtgaaagtcccatttcagatcttctctccttttattcccttccccagaggacgcccggtcaaaagccctgtagcctccttggagttcttctctatgtttgcatttgtactgttacatagattagattcccctatttgtatttttctataactt

SEQ ID NO: 242237 - DNA, 1036 bp, Homo sapiens
gagtgattactttgagtgggtgttcaggagggattgctggaggagatggttctttgatctgggccttgtaagatgggcagaagttgagtatgtggagatggtaatggccttcagaatttatgtcttatctgtttggcctggcatacaaggcctttgacaatttggcagagtctggcttttttggtaggtctccagccagctcttcactttgtttcagccacttggaaccaagccacatcgcctgaatatgcaggtatgggtgtttcagggctctgtgccttagccaagagtgtccgttctccttcacctccctcctcctacacctccctcctctttctcctgagctctttcttatacatccttgggcatggcctatatctgctttacatctcggggtcagaacctgacccatggcaagagctcagtaaatgataaatgaatagatggaggttgagccttggagaagacaagtaatgagaaaaaaaaatactttgttggcctcatgtccttcctgtcccttttggggcagaaaggctcattcacaagtccaggccaaagtcagcacaggcttcaatttcattggctcaggccggtacacagatggggtgcattagagcttgatgatttaaagggttgggtgaaatgcctgactgtggggagagctgagggagctgtggctggcattgcacaaagcttcctttatttcactccacagccacccccggcgttaaataatctatagattcttatgcaggtctgcctaatggaaagatcattgccccagcctcctccttggaaaataggcctttcttttcatttttccctccctcttccatttaagaaagttcaaggagagaatgtctctcctgttctcctctcttgacttaatctcctatgcagtttcagaatctgcccagtgggagttaggagctgggaagcagataactggagctggatcagcagtgtaattaaatgatactttgtactggtaatagggcctttcatctgaaagcttgacattcgtttggtgcaaaaa

SEQ ID NO: 242238 - DNA, 719 bp, Homo sapiens
tccactacctctcagcaagtcaaactcattgccttaactcaaaccctcacccttgcaaagggactacgtgtcaatatttatactgactctaaatatgccttccatatcctgcaccaccatactgttatatgggctgaaagaggtttcctcactacgcaagggtcctccatcattaatgcctctttaataaaaactcttctcaaggccactttacttccaaaggaagctggattcattcactgcaagggccatcaaaaggcgtcagatcccatcgctcagggcaacacttatgctgataaggtagctaaaaaagcagctagcattccaacttctgtccctcatggccagtttttctccttctcatcggtcactcccacctactcccccactgaaacttccacctatcaatctcttcccacacaaggcaaatggttcttagaccaaggaaaatatctccttccagcctcacaggcccattctattctgtcatcatttcatagcctcttccatgtaggttacaagccgctagcccacctcttagaacctctcatttcctttccatcatgaaaatctatcctcaaggaaatcacttctcagtgttccgtctgctattctactcctcctcagggattgttcaggccccctcccagtcctcccatttcattaccacttggctagccctgtgattattaaattctttctttgctgccaaaaaaaaa

SEQ ID NO: 242239 - DNA, 415 bp, Homo sapiens
cccctagaaagtgttagaactgattcgctgagttcaccaaggttctcttccaggacagcgttccccacagaagagaaactgctggggtgaagccaaattgaagaagagaaagatgaagagaaggtccaaatacaagtagaataggggatagtcaaccaaaatctctcagcagaatactggttttgaacacttagaaagaaacagggaagttcccgtgaatcatgcttccttctcaaagtttaggaaatggaatttacttaagaaactaaggaaagtttttagatgaatctcatacaaagttattttaatgaaaagaaagagcaaagataagatttctgggcaatgaagatctatcagaaaggtctacagagcagagcaaaactagttcgtttaaaatgtgctaaaagatattaga

SEQ ID NO: 242240 - DNA, 566 bp, Homo sapiens
tacacataagagaatattcaactttattaatcattggggaaatacaaattaaagccaaagggagacaacactccttacccctaggaatggctaaagttaaaaagatgggaatacccatgtcaggaaggatttgaaacaactgcaactctcatatgctgcaggtgggaagtaggaggcaggcctccactccagaggaggggctcacatgacacacaccaaattgaggactagctagaacagggatggctggaagcagctttccataagacacacccaccagtgtgccacgtcagtttaccattgccatggcgacacccagaagttaatgcccctttccatggcaatgacctgatgacccagaagctaccatccttttcctagaaatttctgaataatccacctcttaatttgcatgtaattaaaagtggcaataaatctgactacacactacctctgagctgctgctccgggcacactgcctatggggtagccctgccccacagggagcagcccttctgctgctgctgctgctgtttacggctgcttcaataaaaactgctaactcc

SEQ ID NO: 242241 - DNA, 303 bp, Homo sapiens
ccacgtgcagcctattaagacaattttctgtttgaacttcacaggactttcagcttcttgggttgggacacattgtctatttgttgcgtgtgtggagaacagtggacagcaaagatcaaaacccttaggggagaggggcaagagagaggatatgagtggggattctctgctcccctgaacagtattccaggattccttcaccaattgaagttcaagtttggtcctctgagcaaaaagtttagagaagttcctttatgcgtttatttaaatttagaataaacatctctgtagcaataaaaaaaa

SEQ ID NO: 242242 - DNA, 466 bp, Homo sapiens
aagatgctcccagtctcccctaagctgtgtttgggaaacagtgtcgctggtctcctcctccaaatattctcaggttccttccatatctagttggaaatgttcactatgcctccttctgatcttggggttcacctcgggagtggggagattaggacatgtaagtcacatctctctgctgtatttctgtctttctctcctgctcacagcccccttgggatacacagataggttccctttccgctctggtcttcagagtagggtgtgtgtacaacattcctttattttcttcccacctggcaagtgatttgcccgtccctatttcctgagacatgaaggcaaatagggtgcaaggaatgagaacttgttttcacagataagtgaacatgacctttgaagtggttagaaaaacacagcaatcacactagcatacatagacccttgaggctggctgggagccctgtacaaa

SEQ ID NO: 242243 - DNA, 457 bp, Homo sapiens
gacgttaaaaaaaaaaccaaccccaatgtggctttccttctttctcactagggtgatagtccgacgtgcatgtctgtttcctggaccctggatgtgaaaatggggttcttgaaggcactgggagtgtttctctgctggccccagaggcctgtgtgtgctgctggcgaggcagctgggccactgtcactgtgccctgacaacaacgttgggaactgttcctgaaagtgttaaacaaaatttcagtttattaagcgctcctctcattaagccattgttttatttttcttttttgattttttgggcttcttttgaagccataataaattggaatagaaagaatacataccaagaaacaaatattaggtctgattttttaattttttgttattatttttgagatggagtcttgctctgcactccagcctgggtgacagagtgagacgccatctcagagaga

SEQ ID NO: 242244 - DNA, 329 bp, Homo sapiens
tggctcacttagaagctcagtttgcttgctcttcaagtatcaagactaggaaacattgctaaggaaaactaaggtggctagaagccagtctgtctcatccatctctcgccactctccttctctttaaaaatgataatacaaagttgaagaatatcctgtttgtttgtttgtttgttttttgagacaaagtctcactctgttgcccaggctggagcacagtgcacgatcttggcttactgcaacctcagcttcccgggttcaggcatttctcatgcctcagactcccgagtagctgggactacaggcatgcaccaccatgcctggataat

SEQ ID NO: 242245 - DNA, 350 bp, Homo sapiens
ttggcaggtgacctgaatggtaaaacacaagacagtggctttcacactggcaaaggctctgctgtggaaccctacccctgtgatgaaactataggcttgcttatcaattacaagaactcgtgccgaattcggcacgagctagtctcgagttttttttttttttttttttccaaagtatttgccagttgtttatttctcaagagaaactatttcttaactcacatattcatgtttcatagttcaggaacataggtcagcgacaaacttttaggtcaacccaagaagattatctatattccaaaatcaccttgcactctgaaagataccagccttcctcatctcctcaaaat

SEQ ID NO: 242246 - DNA, 431 bp, Homo sapiens
atggttcaagacaactcacatgactcatctggggcgcttgtttaaaaggggctttccaagctacccataaccattaaatcaagatctcaaaaaactggcccagagatacagatttttagcaattactaagtgagcattatgtactctaatgtttgagaacactgtactacagcgacccccaaaattaacattaattgactaagtgaagtgcacaaaaataattgtactgggccatataattgattaagtaacctcatggggaatgcacaagtcactttattattagggacaaaggcaacttgtctatggcttacttgaaattcaggggcttaggccaaatctggcacatagcagatgctaaatacatattgttgagtttgtaagtggatataagaaaacctgagccacaatgtcagtccttaagcccagct

SEQ ID NO: 242247 - DNA, 432 bp, Homo sapiens
tcaaatccatggcttgctgaagtccaagcctaccctaagatgtctgtgagttccaggcatgctcaatgctgatgacctccctggtctggagtcaattgctttgttgcataaagtatttttcctctatgtgtttttccagatgagaaactcaatctctagttcagtttaaaagttatcttcaagcaaaatactctgaggtgttactaaagatctggaaagagattgtctagtggatcacataagaaccaacttgatccttcatatattaatccctttttttataagtctttgtaaaaaaagttgggttttgttttgtttagttttgttttgagacagagtcttgctcttgtcacccaggcagagcttgcagtgagctgagattgtgccactgcactccatcctgggcaacagagcgaacccatctcaaaaaaa

SEQ ID NO: 242248 - DNA, 643 bp, Homo sapiens
  misc_feature (622)..(622): n is a, c, g, or t
  misc_feature (635)..(635): n is a, c, g, or t
aatttgtatttccctaaagcctaataatgttgaacatctttttatgtgcttatttgcccgctgtacatctttggtgatgtgtctgtttaaatcttttgctcatttttattggcaattttgctcttcttattgagatgtaagttatttatttacattatgtgtaattcttttaacgtatatatgctttgcaaatattttctcccagtcttttcgtttctcctgtcttttcatttctttaatagtgtcttctgaaaagcaggcatatttaatttcaatgaagtgcacactttttattgtcctataagtaatttttttatttaaaaagaatgcaggctgggtgtggtggctcacgcctataatcctaacacttcaggaggccaaggtgggaggattgcttgagtccaggagtttgagattagcctaggcaatgtagggagactctgtctctataaaaaatttaaaaattagcctggcatagtggtgcgcacctgtagtcccagctacttgggaggctgagtccagataattgcttgagcccagtactttgagaccagcctgggcaacacagtaagaccctatctctacaaaaaaaaataatttaggaaaaccttacatacaaggnagaaagacgttgnggaacaca

SEQ ID NO: 242249 - DNA, 521 bp, Homo sapiens
ttttatttatttatttatttatttatttaaagacagggtcccactccatcacccaggcaggctgtagcccagtggtgcaatcaaggttcactgtagcctcaaactcctggcctcaagtgatccttctgtcttgatttttccaaagtgctgggattacaggaatgagccaccatgcctggcctgtattttttaattttacacatttccatctctaagggataatgagtggcagtgcacactaaaagcagataacttaaagtttgtaattaaattgcactggccaaatttgcccaagctttcccacaatacatgaccaaaaggttctgcataagaaacaaacttgaaacagaaataacaatgctaagtgaagagccttcatagatacacatagaaacatatctagtaccctttcttgaaatgcttcccttattttttttttttccaagaggaaaagcaaaaaggaaactgtatgagtttgctattgctggtataccaaattatcacaaacttcatggctaata

SEQ ID NO: 242250 - DNA, 505 bp, Homo sapiens
atcccactttagcctcccaaagtggtgggatgacaggggtgagccaccatgcctggcccatgcctttgctcttagtcttttccctcaggtctaagaggggaaacctccactcccatgcccccgccaaaaaggtccctttccatgctgtcacatgccccactgccgctgtcttcactgagctccatgctgagagcctgactgcttctgggctcactaagtgcctcaagggcaaggccgacaagcccacctggctcagtctggctaggccagtatgtgcactgggcctgggacataaattagaaaataaaattgaaaaagaaacaaacatattcttttaggaactactcagatctttaatggagtgagaaagggtaacaaacagttggacattctaaaacaattctaggccaggcacgctggttcacacctgtaatcccagcactttgggaggctgaggtgagtggatcacctgaggtcaggagttcaagatcagcctgaccaacat

SEQ ID NO: 242251 - DNA, 177 bp, Homo sapiens
ctggaagttataaagaaagaatcaaatggaaaatgtggaatttaaatgacatttatcaagattagaaaatcagtgcataggtataacagcagatttgacctagcaaaagatgaattggtagctgtaaaataagaaaaataaaatatatagaataggaaagagaaaaggagagaggta

SEQ ID NO: 242252 - DNA, 410 bp, Homo sapiens
tatatacccagtaatggaattgctgggtcaaatggtatttctggttctagctccttgaggaattgccatactgtcttccacaatggctgaactaatttacagaatttgaattttagaataattttaatgtgggctagacatggtgactcacacctgtaatcccagcactttaggaggctgaggcaggtggattgcttgagcccaagagttcaagaccagcctaggcaacatggtgagaccccatctctacaaaaatatcaaaaattagccagcgtagtgccccacacctatagtctcagttactcaggaggctgaagtgggaggatcactggagcccaggaggcggagattgcagtgagttgaaattacagcactttcactccagccaggacgacagagtgagactgtct

SEQ ID NO: 242253 - DNA, 533 bp, Homo sapiens
tcacttcccacctctagtgcctattactctgtacccttagtaaatatatgcttcatatctgcatgtatctatgttgtccattggagtacattcttaaagtcaagctctacacaaattaacttaagcaaacacacaatgcacttagtgttaagaatgtggaaaagagacctaaccagaaatattaaaaaagtactcaacaaacctagaggagcttacaagtctatggatgtaagcaaatgaaatggtccaggcacaggggctcacgcctgtaatcctaacactttgggaggccaaggtgggtggattgcctgaattcaggagtttgagaccagactcggcaatatggcaaaaacttgtctctaccaaaaaaagaaaaaaaaattagccaagcatagtggccaagtgcctgtagtcccagctactggggggctgagatgggaggattgcttgggcctgagaggtcgaggctgtagtgagttgtgttcatgctgctgcactccaatctgagtagcagagtgagaccctgtctctga

SEQ ID NO: 242254 - DNA, 322 bp, Homo sapiens
aaaaggtcacctcctggctggaggccaaccaacacaaaaccagcccactaaacaaaacacaaccaaggaccctcacagagtccactttaatcccttgctacctccactgtagcaggtgctggcatcagtggctgcaagacctgtagatagatcacaacataggactctttggagacactccccagtactagcccagagcacagtagctccactgggttcctagacccagaagagcaaaaacaatcactacagtctagctctcaggaagccctattcctaggggaagggggagaacaccacataaagggagcatcccatggtt

SEQ ID NO: 242255 - DNA, 370 bp, Homo sapiens
gagtagttatcactttaatagagttgtagtttgggtgatgaaaaacttctggaaatagaaagtggtggtggttacacaatattgtgagaattttaaccaacctttggattttctcatgggagaccattgtgtgaaatgacttaattaggttttcacagctctaaccattaacttaaagcaagacttagaggacttttgtaaatccctcttttaaaatttataaatctggatacattcaactcatacctcaatgagctaatgcacctaacaaagggcttctataaatcagtaagaggaaggatcaactatctaatagaaaagtaagcatatatgaaagagatcatagatttgagaggtgggggctcgtgca

SEQ ID NO: 242256 - DNA, 495 bp, Homo sapiens
tcagcacagagaactctttctttttgatagctgcatagcgtcccacgggatgtttgcaccatagctgattgagtttgaccctggttggtggacttttagattttttctagtttttcccccatcagacatggctgcagtgagaaccccttattcctgtgcaagaatgaagcagaacagatgagtggaatagtagaatggatgtgtttatgaaacagtgattgggctgggcgcggtggctcgcgcctgtaatcccagcactttgagaggccaaggcaggtggatcacaaggtctggagttcaagaccagcgtggccgatatggtgaaaccccacctctactaaaaatacagaaattagtcgggcgtggtggtgggcgcctgtagtcccagctactcgggaggctgaggcaggagaatcgcttgtacccgggaagcagaagttgcagtgagccgagatcacaccactgcactccagccttggtgacagagcgagatgc

SEQ ID NO: 242257 - DNA, 391 bp, Homo sapiens
acacaactagctattgggaggaacggaagtctgacagatgatggaacatgatcagagcatctctaaacttgaagggacattatgaatcatctagaataattattttccaaacttcaatcatttaaacaccaccctcataacttcacctatctctatacctgtcttttttcatttgtataaatttaggggttacaagtgcagttttgttacatggatataatgggtagtgcctatacccttcttcataagtttcctactgctgcctaacaaattgtcataaatttggtagcttatgcaacatggaattactgtcttgtaattctataagtcaaaagttggacatggatcttatgggctaaaatcacagtgttggcagggctttgttcctttc

SEQ ID NO: 242258 - DNA, 447 bp, Homo sapiens
tctgctggtgtgagtgctcgctagagccttctgctttaatgctctcccaactcctgtcagagggctggtgttttctactggctctctgagggttctcagaaaagcttgagaagctctcttcttatctgtgcagtgaagagtcttatgcagagagggctgctttagctagaaaagcccaaagttggagaaacatctctactgaaatgtatccatggacactattttttttccaactctctaaatcaggatacatggactcctatgtgtgtgagatggtcaggagatgcagtttggatgagaaagtgttgaagtatcaattggttatacaacaggactgaatatttgaaatcaggactgttctggaaagcttagcatgggaggaggggtcccatacgttgacgccggtgcccttccagatttctcccaaataaaatgtgctcttctaaa

SEQ ID NO: 242259 - DNA, 484 bp, Homo sapiens
  misc_feature (12)..(12): n is a, c, g, or t
gggtacggcttngagaagacgactgaatgtgaaaaagccttgggatttacctattgaatttattttcctccttaagcccatagggaagctcagaacacttttgggatgacagagctacataattatggtaccattattttcctgttagagatggcctgacgatcctagtcacctatcagttgaaagccattagaaggcttttgacccttaaaagtaggtcaggtgcagtggctcacacctgtaatctcagcactttgggaggcagaggcgggtggatcacctgaggtcgggaatttgagaccagcctgaccaacatggagaaacctcatctctacgaaaaatacaaaattagccagacatggtggcacatgcctgtaatcatagctacttgggaggctgaggcaggaggatcgctcaaacccaggaggcggatgttgtggtgagcccagatcgctccattgcactccagcctgggcaacaagag

SEQ ID NO: 242260 - DNA, 270 bp, Homo sapiens
tggacaggatggtgattgctcacaccaaagccttggacccctcccagcctgtgacctttgtgaccaactccacctacgcagcagacaagggggaacctgggatagaaccacatcagaatgaggaagagaaacccctatcacctccagtgtccctctagcatcctctactgataaagcttaacatcacgctagctggccgagtccaggagtaggagccaacaaagaaaggtaaattttgagctgaaggacaataaattaataactgacaga

SEQ ID NO: 242261 - DNA, 241 bp, Homo sapiens
ctccctttttctctaagtgtgaattaaagagaatctctggactaatatgtgcattgcttagcatttgtttgtgcctaatgactataggctttaagattctcatgcaaatactatcaaaacactctgaagtgacttagatgtttgcaaaacttttttcccccttggagtgaattaaaccatttcaattggtaatagtttttttttgttgttatttatttgttattctctgggtatagggttt

SEQ ID NO: 242262 - DNA, 487 bp, Homo sapiens
taatcttctgtgtctctacttaagttttagaacatatggaaccaaattatagcactgttttcaatgaacctgtcagttaattctaatatctatggcaattctgagtccatttcaatttcctggttagtctctttgagaaagctcatgttttcccatatgtctgtaagtctggaaatatttcaatggatggaagactgagagttttacttggttggatgctgggtacttttggcttcctataagtatttttgtgctttgttctaggatgcacttaagtcacttggaaacaatgtgacactttcaggtcttgcttttatgatttcttaggcaaatctggagcagtgctcagtttggggcacattactcctcaccacggagaaaagacctttctgaacactctacccaatactctgaattatgagtttttccacgcctgggctgggcaggatcagtccttctccaggccctatggtgagtactgtgtact

SEQ ID NO: 242263 - DNA, 217 bp, Homo sapiens
ggaagtctcactctgtcatccaggctgaagtgcagtggtgtgatctcagctccctgccacctcaggctcctgggttcatgcaattcttgtgcctcagtgatatggtttggctgtgtcctcacacaaatctcaccttgaattgtaataatccccacctgtcaagggcagggtgaggtggagataactgaatcacagggggagtttcccccatactgtt

SEQ ID NO: 242264 - DNA, 241 bp, Homo sapiens
tgaaggtagatgaatttagaatctaattcaggacaatagtgaaataagaaagtaaacctgagaaaaatataaaggaagaattcattcaacaaatgtttcagagactggacactgccttcatggagctcatacttagttaagcaccatattgtaagaataaggtatacttacctgttttggagacttaacatcaacttggttatagtttcagttcagttagaaaaaaattgtactaggtgaa

SEQ ID NO: 242265 - DNA, 449 bp, Homo sapiens
attgtctaaccagactggattctgtcaaagcagatgtgtctaagatgctagaaatgaatgcataccaaaggacacaattgaataatgctggacagagaattctgcaagacagtctgcctagccagagtagcaagggaaggcaccgagtcagctactgagaatgaattttgaaacagagacttgtcaaaggcatagaaaaattgcaaaagtggcaacaacatttatggtaattacataggatccacagagcactttcacatcagctatctcatttaaccctcaagatgcctcagagatgacaggaagcatggacatgcattgagtcacttgacttggccaagatgtattggcaagttgaagtatattgggagctgggaatgaccattttcctccattcatatggacatcttataatcatttcttaatatacctttactgtagagccttca

SEQ ID NO: 242266 - DNA, 263 bp, Homo sapiens
acacttccccatccttatgcaacgaatgactgaatatatattcaactgaaaaggaaaagtaagttagaaatgattataaaacataattgatattaggatcaggaagaagaggacactggatctagagtattagataaaatttctcaagccaggcatggtggtgtgtgcctgtaatcccaggtactcagaaaactgaggtgggaggattgcttgagatcaggagtttgagtccaggctgggcaatatagtgagacttcatctca

SEQ ID NO: 242267 - DNA, 224 bp, Homo sapiens
gatctttttctgagcattcagtctcctatttcctaagtgctcagcaaaacatttgccagcccaattcttaatttcattatcatcagcaaaatgaataatcagaattaattggtgaatggtttcttcctagcacccctttaagaaactttcccctgcaatctccatgggcactagcttcagcccttgagtataaataagtcagtaataaagaatgtaggagccta

SEQ ID NO: 242268 - DNA, 447 bp, Homo sapiens
gctttgatttatacagacttgtaggtttccctgtgaatctgggagcaggatgaagtgatgctcaaaggatcaagatcaaaaggcagtggaaagaaatgaaggatgcaggagaaagatggacattgtgaataaagggaagagagagaggggtgatggggaaggtaggaagatcaggacagagcaaggaacaacaggatgagattcaaaagaaagcaacatggggaacatgcaagtggtgagggctaagaaatcttaataatgaagaaaccatggggactaagaggaagttgaagaaagctgctggagcaacctagagagacagaagagagcagagaagtgagtgaaaggaataaacctgggatgagagagaggatctgcactgtaactctgatattgaccaagaggattgataacctcccttttattaaatgccacatacatgccaag

SEQ ID NO: 242269 - DNA, 361 bp, Homo sapiens
cctggttaattttttgtattatcagtagaggcagggttttgcagtgttgcccaggctggtctcgaactcctgggctctctgcctgcctcagcctcccaaagtgcagggcttacaagtgtgagccaccacacttggcccacactgactcttacttgaaatattttgagactaataaatttttgttttcttaaataaaatataatagactttttttgatcaaaagattaattgggccaggtgcagtggcttgcgtccgtaatcccagcacttgggaattccaggtgggaggttcatttgagcccaggatttggagaccagcttgggcaacatgatgagaccctgtctcaaaacaaaacaaaac

SEQ ID NO: 242270 - DNA, 565 bp, Homo sapiens
cccctgtagtcccagctactcaggaggctaaggtgggagaatcgcttgaacccgggaggcagaggttgcagtgagccaagattgcgccactacactccagcttgggtgacagagcgagaccctgtctcaaaaaaaacaaaaagatgatttttatttaaaaaaaaaaaaaattagctgggcgtggcggtgcatgcctctagttccagatagctgggagactgaggcgagaggatcccttgagcccaggaacttagagttggaggctgcagtgagctgtgattgcaccactacactcctaacctgggtgacaaagtgtgagaccctatttctaaaacaaaatggtgatttttaagtattaatatgctaattgatatggagtggtagaagtagtcataaaggattataaggcagtataattgaatttttctattttttaaaaaaatctaggccaggagcagtggctcatgcctataatcccagcactttgagaggctgaggagggaggataacttgaggccatgagtttgagaccagcctaggcaatattgcaagaccctgtctctac

SEQ ID NO: 242271 - DNA, 416 bp, Homo sapiens
taagcaagagtaaaagagtttaaccccatatttcctagacattatagtataaagacacttgacaatagtatcaggagatgccttactaagtctaaggttgtttctttgtgaactgaggtgtccagggtttgtcaaagcaggtcttattaacttatttataaagcagcccagacaccaatatccactctactttcggatggtcactgggattgactagacattgcacgaaagttaccttactcttgctttcttgtttcatctaaaagatggctgtgggaaacctcaagcctgttgcaaaggcacccttgggcttccagagtccagaggtctctctgtggaagctcagttacaccccactacctggccagtgccgacactatggaggccaagggcctgcagggacagagcaaatgttt

SEQ ID NO: 242272 - DNA, 651 bp, Homo sapiens
tttcagccagtcatctaaacagactgttggagacccttttaaccccttgagctgcaacaataaatatagaatctgcttagtgggcccatgtcagtaaattcagcttgatccaactttatattctttccactattatcccataccttcattatccattcccacatgtatttccttggtttttatctgtataaattggaaaaatcatgtagttcttctggagtgtagtgcaccttctcatgggtcacagtttgtatctcacctttcagggcctacctgagcttgagttcctttataggtctggtagcaaagaggagtagtaggagtagatcctgactgtctgatcaaagccaggttaatctcctcaaatgaggtggaaagactgctgctgctggcaaagaagactcagaattttggtgtttaacatccccagctccatcaggatcttcttacatatttccattccttcccaatcaacaccctcactttaatagcagacaaacttcaaggttggtgattcagtttgtgtttcagttcagtcacttgcaggatgagagtgttgttctgatttttaacaatcttagcactgaacctgcaggagataaggatttctttcaaggaagacctagaaactttcagataatttatacagtt

SEQ ID NO: 242273 - DNA, 425 bp, Homo sapiens
cagggctggaaaataggaagagtgaaccagggaagtaggtgagagagactttattcctggtttctactctttttatgctagtgttctgtatgagattttatttgagagatgattctgctgctggaaaagtaaaacaaaaaagctgggctgggcgggtggctcacaccggtaatcccagcactttgggaggctgaggcgtgtggatcacctgaggtcaggagttccagaccagcctggccaacgtggtgaaaccccgtctctattaaaaatacaaaaattatccgggtgtggtggtgggtgcctgtaatcccagctacttgggaggctgaggcaggagaatcacttgaacccaggaggcagaggttgcagtgagcgagatcacgccattgtactccagcctgggtgacgagcaaaacatcgtctca

SEQ ID NO: 242274 - DNA, 399 bp, Homo sapiens
tgcataaaattaactgtgttatatacagtactgctgtaataatttcatagccaccttctgttgctattgcagtgagctcgatgttacaagtatccgcttaaagcactatatgacactaatttccacctgagcaattaatctctccagtaagttgcatataacagttacaagtgatctctcacagttcttgagtatttttcattgtgtttagtacaataccatagaccttgaataacaccgtaggacccacataaagtgccgctaatgctctcaaaagcaaagttatgacatcatgggaaaaagttgaattgcttgatatgtaccacagattgaggtgtgtagctgcatttgcccaccacgtcaagataagtgaatccagcataacaactattgtttaaa

SEQ ID NO: 242275 - DNA, 813 bp, Homo sapiens
attaggctgcagaaaggaatctcctgagggagttattctgaagaagggaagttcctctggtctggtgtctactagaattgcttttccttgaaactctgccttcttctggaaggcagaaatctaacatgattcaatggctacagctgtggaagtgtgcagaggaaagcattagaccagggttctcatccctggcttgcacacccagagcctggcctgcacacctagagcctggacccaaaaacaacaaaaaagtgatggaactggatgctctcccagtcttacatttctatgtaaatgtgaaagagaaacatggctacaaggaccaggtttgaaatttttcactataaaaagtttttgaaaataaggagccccagagagaattcctagaagatggcagaggaggaaaaagaggaacctatcttcccacctagataataattttaccagtagaatctgtctaatgattttctcctctggatttgctctggcacctcgaagaagcttaggggaacagttcagctttgctcttcctgataattagtggctttcctgatggtgtggttcaacacacccaccagagacggaagatgtaaacaacatgtgtgctccagatggactctgaaatccaggctcccactttatgacacactcctctacaacaccagagactcccaaacacaaggcctttatattgactcatttcagctcacatcctggcgactctcaagagagaaacctcagagtgactaaaatctccagtttgagaagacctgtacattcagtatctatttggaaagaatcccaaaatgatac

SEQ ID NO: 242276 - DNA, 560 bp, Homo sapiens
attaggctgcagaaaggaatctcctgagggagttattctgaagaagggaagttcctctggtctggtgtctactagaattgcttttccttgaaactctgccttcttctggaaggcagaaatctaacatgattcaatggctacagctgtggaagtgtgcagaggaaaggtgaaatcattatagaatactgaggaatactttgacagaaattatccttactctttttccattgaagtggggtcccctgaggtaaccagaggtgtgatgggaaaagcaaatcaagttattttttacctgtgtgccaatgttgtgattgtcataagtccaatgagaagtggatgcctgtggttttgaaggaatgtgcttagttcacagaacgaaaaggcttctcagttaactcgaagactaaaagcacacagattaaaattcagagaatgaggaaaagaaaatccagggaagtctgagtttcattggagcaagtatagatggttaggatatgatttcctggcatggtctgaaaaccatattctttcattccaaataaataaaaaattcttacaaa

SEQ ID NO: 242277 - DNA, 443 bp, Homo sapiens
gacagagtcttactctgtcacccaggctggagtgcagtggcgcaatcttggctcactgcaaccttcacctcccaggttcaagctattcttgtgcctcacccacccaagtacctgggattataggccacctgactaatttttgtatttttagtagagacgggatttcaccatgttggccaggctagtctggaactcctggcttcaagtgatccacccacctcagcttcccaaagtgctggaattacaggcgtgagccaccacgcctggccaacacagaggtctactttaaactgggaggcagaggacatctctcggacgaagtgctatgttttaagctgtgcctcatgtgagaagaaggccaaccaggtaaggaactggagatggagctttcctgcaaaaggaatagcacatgagggcccttgagcccaaggaaactgaaagaa

SEQ ID NO: 242278 - DNA, 451 bp, Homo sapiens
gttcgagaccagcctggccaacatggtgaaactctgtctctactaaaaatacaaaaattagccagccgtggtggtgcacacctgtaattccagctactagggaggctgaggcaggagaattgcttgaacccagggggcagagattgcagtgagccaaaattgcaccattgcacgctagcctgggcgacagagtgagaccccatctcaaaaaaaaaaaaaaaaaaagaaagtaagaatattcaaacacttattacaatatagacatcgactcttaaattatcccaaattatgatataatcatattcagttgatggggaatagaaagtgttcacgtgtggcattaagtcagcaatggtggagcattatattaccatctgtaattgtgggaagtcaaaagtaacgcctaatactgaaaaatgaagaagtggcaatatgaacatgttatatgaga

SEQ ID NO: 242279 - DNA, 488 bp, Homo sapiens
cacagactacgacaacgtgcctaggcccatcagagtctgccctccacccaccttctcagcctcctctatgatcctcttttcccagcctgaagctcacgtctcctgactgctctggcccagtatctgccacactcttcatgctttggtgcctttgtgtcttgtccctcagcctggaatacccttctctctttctcccctgcagtgaattcctgctcatccttcaagatcagtggaaaacatagctcttctttgaagccttccctgaccagctctgagcacagttagttgttcctttcctggaggtccagtaggatctagagtcactgcctccttgtagaaagacccttcacatggtaccagagatggtagtaaacatgcttgagtcaggaaagacttttccaacttttattactgtactaatgcatttaactaacacagatatggagacactgtgttgatgccagagtatctgttatatccaaataagg

SEQ ID NO: 242280 - DNA, 535 bp, Homo sapiens
agtgagttgtgcaagcttcagacttgccagcccccagctcccaggcctagtacagagtaattcataaacttaccatattagactatcagattgaaaccaagggtttctactgtggtggaattggaaagcccattgttttgattatcatttcatcagccccaactgatactagtatgctcaaggaaaacatacttcagttacagttgattttcagattccaaaatggtgctgcaaagcctgtgcatctctaattatattttatgctaggctgtgcaataccaaaatatacgccgcagcaatcagtgagtgaacagtatcaatcaatttgtaaacagatgaagtcactcattcccaaactggttttccaaaaacaattactaaattacaatagaaaaaaattgtacagttactgtatttgtgtgctgtgttacaatcaacataccagggaaacaaaacaatttaatgcagaaaaatcatcattcatctacattataattgcttctttttcacatctacagggcggttaattaaaatt

SEQ ID NO: 242281 - DNA, 436 bp, Homo sapiens
gccggacctggctcctgtgggctgggtgggggcttcagctgtgtcccttctcactccagctgcctttcctgggccaggctcgctctctcctgctttcaaggattctttttctttccaagctccttgccgtctttcctctctgtggagggcagatactccaccagctagagggaggacccgagccgaggggccaggctttcagactgggaggcgcctgagtgcgatccagcctgcccgtccccagctctcctgctcccaacccgatgtctcccagggctgccacagccactccaaagccagcagaacccagtaccaaccccaccaggtcctgttgccttgtcgcccagctctgggaccccatgcccaccctacagctcttgctctgcctgctacagggtcttcaaggtaggcaggaagccaggctgtgggcggccgc

SEQ ID NO: 242282 - DNA, 695 bp, Homo sapiens
ctgttgtatcctgtggggggggtggtccccgctccggctgcggccaggctgcacccccgcacgtgcggctcgcgggagcctaagagctgggtacccgggaggggttgcagagagaacagacggcgcgtcccgggctagtgctttattttaaggggccagtagagagtcgcttcttgcctgtttcccgggacgctctccctgtcgcccgagctcccagtccagtcctgccccgccccgccccgccgtgcttctgttctccttaagcccgcgcgaaacaaacacccggttccccaagcctggggtcttccgggagctcatttcgaaaccatgacccttgaaaccaggaaagtgacaggagagactctggacagcatgggacggaggctgagtctctcctctttgtcccttgttccaactattaaaatgcggcccgggtgcaggtggaggcggtgtgctgagcgggttccaatgcaacgggggaacgactagcaacggcaaaaggctcagctccggagggttaaaatctgaaatctccaacctggcccgaggctggtgtaaggcggctgtaggattctttttgtcacttcctaacaccctgaaatgctgccgtcagcaacatgtctttaagtggaggctgcagtgagccaatattgcagcactccactccagcctgggcgacagagcaagactgtctc

SEQ ID NO: 242283 - DNA, 1162 bp, Homo sapiens
tcttctgtttttcttcgtttgtttttctggctcttttccccgctgtctttttcactcatctcgtggtttccgtttctctgctccctgatggggtttggtttcgtctccgctccttcgtggcccgttgtcctcctggccttggttcgttggccctgtccgcttcacccccttttccggcgcccctgaaaatttttggttataacgcaccaccaggaccctgagcgcgatacaactgcaccgtgcgcttgctggacgacagcgagtacaccctgcaccatccagagagatgccaaggccagtacctgttgaccttctttgccaccatcgtggacctacttgagaaagactattttggtatccgctttgtagacccagataagcagcggcattggctggaatttacaaagtctgtggtgaaacaattgagatccagcctccattcaccatgtgcttccgtgtgaagttttatcctgcagaccctgctgctctgaaagaagaaataaccaggtatttagtcttcctgcagatcaaaagggatctctaccatggccgactcctctgtaaaacatcggatgctgccttgttagcagcttacatccttcaagcggagattggggattatgactcagggaaacaccctgaaggctacagctccaagttccagtttttccctaaacattcagagaagctggaaaggaaaattgctgagattcacaagacggaactgagtggtcaaacaccagcaacatcagagctgaacttcttaagaaaagcacagacattggaaacatatggagtggatcctcacccatgtaaggacgtgtcaggaaatgctgcatttctggccttcactccttttgggtttgttgttcttcaaggaaacaagagggtccacttcattaaatggaatgaggtgaccaagctgaaatttgaaggaaagactttctatttatacgtaagtcagaagaagaaagggataggctcatgccctgtctaaacaaactgggaaaactcattttcttcagaagttatttcaagaaaggctcagcgactctgtttctcatctttccaatttgcaggataatttttggttttgaattttgatttttcatagatgtatattattttcaagtatcaaataaaaataatttatataaatatt

SEQ ID NO: 242284 - DNA, 151 bp, Homo sapiens
ggtgccgcagcccgcgcggaggacaaaggctcccccctccgccgctgcaggcgaaccccgccccggggagggaggagcacaggccccaggaaagcaaagcccgggggtccagattcagctctgcggcagtggggcagcgtcctgtgtcccg

SEQ ID NO: 242285 - DNA, 1153 bp, Homo sapiens
tgcagtggctcacgcctgtcaatatcagcactttgggaggccgaggcgggcagatcaccaggtcaagagatcgagaccatcctggccaacatggtgaaaccccgtctctactaaaaaatacaaaaatcagctgggcgtagtggcgcatgcctatagtcccagctactcaggaggctgaggcaggagaatcacttgaacctgggaggcggaggttgcagtgagcagagatcacattactgcactccagcctggtaacagagcaagactcatctcaaaaaaacaaaacaaaacaaaacaaaacaaaacacattcccccttacccaaattgatatctagattcaatgtaattccaatcaaaaccatgacagacttttgtgtagaaactgaaaagctgattctaaaatgtaaagaaatgcaaatgacttcaaagaatcataagaattttgaaaaagaacaaactgtcaaatttcaaaatttgctgagaagagtactgtaatcaaaaaacattatgtattagctgaatggacaaatcaataaagaacagaccacacacagatggctgattttggataaaaatgccaaaataatataatgaaaaagtactgtctttaataaatggtgtgtttaacatacagtttttaaaaaaatgaacctcaacctcacacaaaaaataactcacaaaatggattacaggtttatattttaaagctaaaactataaaaatgctgggttaaaaagtggagaaaatcttagtaaacttggggtaggcaaaaaattgttagataggacacaaaagtcattaaccataaaataaattgataaaccagacttaatcaaaatttaaacctttagctcttcaaaagacaccaagaaaatgagcatgcaagccagagtcaatacctgcaatacatgtatctgacaaaggacctagatatagaatatatataaagaactttacgtttcaataaaaaggcaaactcccagccaggcgtggtggctcacgcccataatcccagcactttgggagacgagatgggtgatcacttgagctcaggagttgagagaccagcctgagcaacatggcggaggttgcagtgggctgagatggcgccactgcactccagtatgggcaacacagtgagatgctgtctcc

SEQ ID NO: 242286 - DNA, 695 bp, Homo sapiens
tgcagtggctcacgcctgtcaatatcagcactttgggaggccgaggcgggcagatcaccaggtcaagagatcgagaccatcctggccaacatggtgaaaccccgtctctactaaaaaatacaaaaataatataatgaaaaagtactgtctttaataaatggtgtgtttaacatacagtttttaaaaaaatgaacctcaacctcacacaaaaaataactcacaaaatggattacaggtttatattttaaagctaaaactataaaaatgctgggttaaaaagtggagaaaatcttagtaaacttggggtaggcaaaaaattgttagataggacacaaaagtcattaaccataaaataaattgataaaccagacttaatcaaaatttaaacctttagctcttcaaaagacaccaagaaaatgagcatgcaagccagagtcaatacctgcaatacatgtatctgacaaaggacctagatatagaatatatataaagaactttacgtttcaataaaaaggcaaactcccagccaggcgtggtggctcacgcccataatcccagcactttgggagacgagatgggtgatcacttgagctcaggagttgagagaccagcctgagcaacatggcggaggttgcagtgggctgagatggcgccactgcactccagtatgggcaacacagtgagatgctgtctcc

SEQ ID NO: 242287 - DNA, 363 bp, Homo sapiens
ccttcatggacctttaaccattcagatctcattctaatcctgtcaagaggggaccagtatcctgactttacagttgaaaaaaattgaggctccggaatccttaaatgagttgcctaaggttttgcagtgagtaaatacatggtagcattcagacctaggtgttatatccatgtctggtgcttgatccaatctagctgaacaactatccctaaacgagcaaaaaagattctgatttgaggtctgaggaccagggatgaagtcctggcccttgcctcttggtagcacatgatgtaaggcatatcagttagcctctctgaatcatagttttcttatttgaccaccctttattgcctgctttgtgaa

SEQ ID NO: 242288 - DNA, 310 bp, Homo sapiens
cagaatgttaattcccgttgtaggaggtgacgacactcagagagacctcgtcctggcctgcgtgcttcaggctgtgtttgaaattttccactatatgtaattttttaaatttgcagtttctttcttccttccttccttccttccttccttccttccttccttccttccttccttccttccctccttctttctttccttctttctttctttcttgagggagtctcactctgtcgcctaggctggagtgcagtgagccgagattgcaccattgcactacagcctgggcaatacagcgagactccgtctcaaa

SEQ ID NO: 242289 - DNA, 573 bp, Homo sapiens
tcaccagtttcaaactttttataaagcaacagtagcactatggtactggtataagaacaagcatatagattaagggaacagaattgatagtccagaaataaacctctacatttatggtcaagtgatttttgataaaggtatcaagaaatttaattgggggaagggataatctttataacaaatggtgctggggcaatcagttgtactgtaaacccatatgtgaaaggacgaatttagagctttactcaatattatacacaaaaagttacttcaaaatgcatcacagttctaaatataagtgctgaaatggtaaaactcttagaagaaaagatcagagaaactccctaaggtgttgacttaatcaaagagttcttagataaaataccaaaagcatgatttgaaaggaacaaaattgttgaactgaacttcatcaaaattaaaaacttctggttttggaaagacactgcagtaaagagaaggaaaagacaaggcacagaatatgagaaaatatttgcaaacatatctaataaaggacttgtatccaaaccatttaaataactatgacaactcaat

SEQ ID NO: 242290 - DNA, 167 bp, Homo sapiens
tggtcttccactgtactaatatttaattaactgttttcaaaacactctaataaatgttatttatttcttttgtgtagtaatttgtagtaacaaggaggttgatgtccagagaagttacatgacttgactaagatcagtcatccctttatgccaaatagtaaaagcca

SEQ ID NO: 242291 - DNA, 521 bp, Homo sapiens
tcatgctacagagaaatctttcatgaaaggaaaagtcaagagatgtggcaaacgtcattgttgtcttattttaagaaatttccacaaccactctaaccttcagcaaccatcaccctgagcagtcagctgccatcaacatcaaggcacgaccttccaccagcaaaaagattacaacttgctgaaatattaaatgaccattagcattttcagcaataaaggatttcttaattaagctatgtacatttttagatgtaatgctattgacaactaacaggctatggtatggcataaagataatttttatatgcactgggaaaccaaaaaatttgtgtgacttgctttattgcaatagttgctttattgtgatggtctggaaatgaacctgcaatttttctgagatacaaaatattaactgtactttgttttggtttgtacatatgaatctaaggtttattgacatggaatgatttgaccaaggtgatatagtggttaagcagttaagtgattaaactaactagtac

SEQ ID NO: 242292 - DNA, 351 bp, Homo sapiens
gtggatggcttgagctcagcagttcaagaccattttgcatgatatggcttggctctgtgtctccacccaaatttcatctcaatttgtaatccccgtgtatcaagagaggaaggcgattggatcattggggtggtttctctcatgctgcttttgtgatagtgatgagttctcaaaagatctgatttttttttataagtgtctgacatttcccctgtttgcatacttcctcctgccaccatatgaaaaaggtccttgcttcccctttgccttctgccatgattgtaagtttactgaggtctccctagccatgtggaactatgagtcaattaaacctttttgcttaataaatta

SEQ ID NO: 242293 - DNA, 460 bp, Homo sapiens
ccctattttttattcttctaagtagttaaaattagaaatcacagcaagtcaacaggaagctctcctctgccagtctcctaaatcacaatatggccttgtcgtggctggagtatttcaaaggctcagtcccactccagaatcggccctgtcgcctccgcccgcactccagagccggctgagaaccgcagcggcgcgggatccacgtgcagcgtctctccaggtcaaagctacctagatgtcatcatacaaattacaggctatgacgtccacctcattctctttctggaaggctgaccttaactgtcctgcacattccttacacagcatatttgcccttttcctatactaataagccctaaatcttgggggtaacagcctggggaactacctgtcttgctaccactcaagaccatacttctgtccacaaattccccccaataaattatcttttactgacaaa

SEQ ID NO: 242294 - DNA, 571 bp, Homo sapiens
agccttccatctagactgcaccctaggtccctcttgggaactctggactgctccccactgaatgtgccaacgcccccactcaccactgcctggctttcactcccagtgccatggacttggttccaaagggctttgagaacctcacataaaaacccactccaaatctttgagggtctaaagggaagattctggccccttcccagagacccatctactgtagggacaggaaaagaagacctggggggtagggaggggtagatggtaaatttccttaccaagaaaaatgccagccaggtgcggtgtctcatgcctataatcctagcattggaaggccaaggtgggcggatcacctgaagtcgggagttcaagaccagcctagtgaacatagcgaaaccccatctctactaaaaaaatacaaaaattagccggtgtggtggtggacacctgtaatcccagctacttgggaggctgaggcagggaggattgcttgaacctgggaagtggaggttgcagtgagctgagatcgtgccactgcattatatcctgggtgatagagtgaggctccctctca

SEQ ID NO: 242295 - DNA, 470 bp, Homo sapiens
gcacccacaccttctctccccggcttggcgcggggtgcagagtggagtgagaatggggggcccgggggctgtaaagcatgggggaaggggatggttcaaagacaacctcaacccttccggacccttctaaactcgccgttctccccgtaacttgcaggtcctcccacctcccagggctgtccattcgcccccacctctccagagggcccccccagttctccatccccgaagcctcctggtggctgactcccagccgcccgcggcgtgatttctccccggtccccaggacatccccagacttgtctgatctcccctgccccttcccccaacgcgctctgcctttctcccctgtccccaaactgcacgcctctcgtgtttccctccggccgttcgcagccctccgccccctcggctctgctgcgggtctttttggcccggctccaggcggggaaagttccccggcccggccc

SEQ ID NO: 242296 - DNA, 801 bp, Homo sapiens
taaaagactcttcagtgaaaacaagagcccccatttttgttccagtcataatttttttttcttccttactacagtttgatctgagctattccaaaatgtggtcatgtcatgtgatattttttccaaatctctctcacttatttcctctgtaggtcactccactttggtctcctctttcacgaactcactttctctcactcttaatcctgcctttgaaactgggggactcctaatcaactcttcctaacgggtaataaatattggcacaaggtctcacctgccctgcttgtacttaaccattcatttaacgcatatttaccaagtatccactgtgtgcaaggtgcaggctttcctcaagagtcagtgaactacagccaggtatggtggctcctgcctgtaatcccagcacttctgggaggctgagatgggaggatcatttgaggctagaagttcaggatgagcctgggcagcataatgaggccctacctctacaaaacacttttaaaaattagccacgtgtggccaggtgtagtggctcatgcctataatcccagcactttgggctaaggtgggcggattgcctgagctcaggagttcgagaccagcctggccaacatggcgaaatttcatctctactaaaaatacaaaaattaggcgggtgtggtggcgcatgcctgtaatcccagctactcgggaggctgaggcaagagaatcgcttgaacccaggaagtggaggttgcagtgagctgaaatcgtgccactgcactccaggctggatgacagagcaagattctgtctcaa

SEQ ID NO: 242297 - DNA, 1309 bp, Homo sapiens
  misc_feature (1137)..(1137): n is a, c, g, or t
aaatagccgaaatgcctgtgcagaggcgtgtgattgaatacattatgatacactcgcacaatggagccacatcacttttttttccatcttcagaaaagaatgagaaagacctctatgactcacatgcagtgattgccaggatatattgttaatagaaaaaaagcaaaatgcaagagtatccttaatacgcttactttttctggaaaaagggagatataaaatacccttatctgctcatttctactggggaaacaacacaggaaagagaaacctgaagcagagaaattggttatgggtgggtagatgggaaaggcatgtcacaggtgaggagcggggaatagaggaaagcaggtgtgtgttggggaggcctgactctgagcataccttcttatgtagttctgactgttagaacatgtgaatgtttcacatacttgaaaaagtaaataaactggacaagattttaaaaaagaagaatgcaaaacaagtaaattgaaatgtatttcaattgaataatgtgaccatgccttaggggataggagagggatagagaactaacactagtaacctttgaacttgacattttgaccctaaacccttaagctagggattataataactgtgaactaatattaaacttaagttggttggctggtttttcacagtggtttggattagtgattctgaaactatgtgtattctaggtttgagcaaatacggaaataaattgtggataatgggagccaagtttcatccctttggagagagaagttataaagatggaaagtagaatgccaaaagtcaaccctcagtgtgttggactgcgattggaagtatcagtatcaatggattgtttttaatgtatggatgtagaaatagatatagatgtgtctgtacacaggagtgcacgtttcccaattctgtctgctgagaaggtctagaagcagtgagaccccagcaacagtgagcacaactatcatccacatattagtttctaaatatcattctcactaataggaactccttggagaagtggctgattccagaacaggagcaggaaaagatgagcctagagcatcttgctgtgccggaaagtaaggaagtgcccaaagaatgatagggacacatcaaaggacacangctgggattacaggcgggagccaccgtgcctggcctagaacaaaggaaatttttaagaaatctatacactgtttagcaatctttgctaatttgttattcatggataaaggttggggaggttgtgcattccagaaaggaaagagaaaaaaaattaaagtaaggccaaaatgtg

SEQ ID NO: 242298 - DNA, 108 bp, Homo sapiens
caaaagtgcattattttcattccctggtatttgttgctaatgtaaattttgttcaacaacctgaatagaattaagcaaagctttgggaatttttgccaggcaggtaca

SEQ ID NO: 242299 - DNA, 449 bp, Homo sapiens
ggatggtgaaagtatgaatggaaacatggagattaggaagaaacagaggtagggaagaatatctctatggtagaataaaaccaggcctttttcttactgctcagagtaattctgaaggctaaaactgagaaggccagtaacaaaaatgaagtgacaatggcccagagagagaactcaagagggttactctactcagcaaagaaaggcagcccttagaatgcccctgagcgaatggatggagccacattacgtaactcactcacttctctgcctttcatctttgtcaatggccataaacccgcaatttcactaaacgcaattcccatttcagagagtctttaaagcaagcggcactgcctcacaaacccatgaaaataggtccttttcactctcttatcttgaatctcaaaaaaacatactcttgctatgaacagatatggacttctttg

SEQ ID NO: 242300 - DNA, 414 bp, Homo sapiens
agattgaggcaatcagttataaggacgcctgctcataattaccttctcagaaggtaattatattaatactgaatttatttagtggtatgctgtcatcaaaaaaattcattaaaaataaaatcaatgaaggccgggcgcagtggctcacgcttgtaatccctccactttgggaggccgaggtgggtggatcacctgaggtcaagagttctagaccagcctggccaacatgatgaaaccccatctctactgaaaatacaaaaaattagctgggcgtggtggcacacacctgtaatcccagctactcaggaggctgaggcaggagaatcgcttgagcccgggaggtggaggttgcagtgaaccaagatcgtgccactgccctccagcctgggcaacaagagcaaaactctgtctcca

SEQ ID NO: 242301 - DNA, 469 bp, Homo sapiens
aagtccactttgaagtttgaagtccactcaagtgttgaagaagcttctaaaggtccaagtggagaccctggtcatagaactggtaggtttggtaggttgctccacaattatcatggaaatcaacaaacaggtcctgggaggaaagtcaactttcccctgccttttccccgtttctgaccatggctgtatgcagcatcatctcacattatactagctcatctatttttccaatcacctttattttttatattttcttatttttttattttcattctttagagatggggtctcagtgttgcccaggctggtcctgaactcttgggctcaaacgatccccttccctcagcctgctgagtagttgggattacaggcccaagccaacacgcccagccatctttgtttttgttgttgttgttgttttgaaatggaatttcgctccagcctgggtgacagagcgagacgctgtctc

SEQ ID NO: 242302 - DNA, 183 bp, Homo sapiens
tttttttttttaaaacagggtctcactttgtcacccaggctgcagtgtaatgtcgtgaacattgctcactgtagccttgacctcctgtactcaagtaattatcctacctcggcctcccgagtagctggaatcacaggcacacaccacagcgcctggctaattttttaaaatttttgtaggctg

SEQ ID NO: 242303 - DNA, 837 bp, Homo sapiens
atgtttttctcgtataagtgaagtgagattcttctaaaagtactgtctttccctttgctgtgaactaaaactcatgttccttaactctcatagagatgttggtctttttctttgtaatttgtgggagttctttgtatattagggaaactaatcctttgtgattttaactgcatttctaccaccaccccctcccccacaagtttgtcactttttaacattttaagtcctttaagtctgaatctggacattcaactcttaggcacatttaaagggctgtattatatatgaaagtagggaactacctgtaaatgttgccaagtaaatacagtattagtcctgaacatatttgaagacagctatgtggatgaaggttagattagatttattccttctctttatggagaagcaaattgcagctcagcatatggaagaattttctcttattagatcagcttcaaaatggaatggaaatcctttggaatagatggattcttcgttactagatttgttattgggaaggagatgccagccttttccccagttcattgcacaaaataagcacttagtgttgaataaacgaatctttggggcatctggatggttggattagctggtttttaataactttcacactgtgtttattttttatttttttgaaacaaggtctcatgttgtcatccaggctatagtgcagtggcacaagcatggcttactctcctgagcctcgacttcctgggttcaggggatcctcccacctcagcctcttccaagtagctgggtctacatacacacgccaccattgcactccagcctaggcaacaagagcgaaactgtctg

SEQ ID NO: 242304 - DNA, 189 bp, Homo sapiens
tgaattaaactacattaaaataaaaaaatttctattcattaaaagaggtttcaaagaaaactaaaaaaaaagtaagagatatttgccactgacagagcattttcttttctctctcttttttttttttttttttgagatggagtctcactctgtcacccaggctagagtgcagtggcatgctctcagctc

SEQ ID NO: 242305 - DNA, 618 bp, Homo sapiens
aagggatccagtttcagctttctacatatggctagccagttttcccagcaccatttattaaatagggaatcctttccccattgcttgttttttcagtagagatggggtttcaccatgttagccaggatgatcttgatctcctgacctcgtgatccgcccacctcagcctcccaaagtgctgggattacaggcgtgagcaactgcgcccggccccaaaatatctttatatagaacaaaagttttctgagtctttatctctgttattcagattctgtctaaaagagattaatagttcagaagaatgaattgtgttgggattttacctattatctttgtatctcttttcttagataagattcactgattgtaaatttcaattaaatatagtttatgtgtctgaatgaaattgatgaccagaatcttgccagtgtaggaaaagttgatttcctacactgctttcttctgctgcttacctttctgctactcatcagtatctgatcaggggatagaaacatgacgtatatcagacttgtttggagctccaacaaaatctgaagggagaggaaattaaaaatgtggctgagtatttcatgttatgacacttttggttcctatatt

SEQ ID NO: 242306 - DNA, 451 bp, Homo sapiens
gtaagaacgtgcttgtggaagacaagtctgtggcttggtgagtatgcgtggtcagcagtctccaatatgtgcagggtattaatgtgtcatcagggctgagtgttctgggatttctctagaggctggcaagggctcctgaaccagttgtttctgtcctgccggtctgtcagagttggaaagtccaagccataggacccagtttcctttcttagctgatgtctttggccagaacaccgtgggctgttacttgctttgagttggaagcggtttgcatttacgcctgtaaatgtattcattcttaatttatgtaaggttttttttgtacgcaattctcgattctttgaagagatgacaacaaattttggttttctactgttatgtgagaacattaggccccagcaacacgtcattgtgtaaggaaaaataaaagtgctgccgtaaccaaaaaaaa

SEQ ID NO: 242307 - DNA, 577 bp, Homo sapiens
  misc_feature (480)..(480): n is a, c, g, or t
  misc_feature (518)..(518): n is a, c, g, or t
  misc_feature (523)..(523): n is a, c, g, or t
  misc_feature (535)..(535): n is a, c, g, or t
  misc_feature (571)..(571): n is a, c, g, or t
gtaagaacgtgcttgtggaagacaagtctgtggcttggtgagtatgcgtggtcagcagtctccaatatgtgcagggtattaatgtgtcatcagggctgagtgttctgggatttctctagaggctggcaagggctcctgaaccagttgtttctgtcctgccggtctgtcagagttggaaagtccaagccataggacccagtttcctttcttagctgatgtctttggccagaacaccgtgggctgttacttgctttgagttggaagcggtttgcatttacgcctgtaaatgtattcattcttaatttatgtaaggttttttttgtacgcaattctcgattctttgaagagatgacaacaaattttggttttctactgttatgtgagaacattaggccccagcaacacgtcattgtgtaaggaaaaataaaagtgctgccgtaaccaaaaaaaaaaaaaaaaaaaaaaaaaaaaaaaaaaaanaaaaaaaaaaaaaaaaaaaaaaaaaaaaaaaaaaaaanaaaanaaaaaaaaaaanaaaaaaaaaaaaaaaaaaaaaaaaaaaaaaaaaaanaaaaac

SEQ ID NO: 242308 - DNA, 407 bp, Homo sapiens
ggttccagtaggaaaatgggatcaagcgggactggaggttctttaaactacagcgaatgcattttgcatagtgaacctaatggatggaagagaatgttggggaagcctgcaaacccccaagccctagggtgtcctaaaagacaaatcagattgcagtaaaaagtataggtgatgaggtcaggagtttgagaccagcgtggccaacatgacgaaaccccgtctctactaaaaatgcaaaaaaatttagctgggcatggaggcgggcacagtcatggacacctgtaatcccagctacttgagaggctgaggcaggagaatctcttgaacccaggaggtggaggttgcagtgagccgagattgcgccattgcactccagcctgggcaacaagggtgaaactccgtctcca

SEQ ID NO: 242309 - DNA, 467 bp, Homo sapiens
gcctggatcaatcttggctactcaggtttctgacggagggtttctgtcacttgatcatcacatcagctaagggttaaatagtgtatataaagtaagacaaaacaaaacaaagcaaaatttaaaaacccacatcacattcgttttggacctctgcaagatctgcacttttcatacacgtttagatctctgataggaaaatggtgccctcttggtctgccctgattaaatgtaattggctgcagacatctgtggcacacagatgtcctgcctgcactcgggaagggagagtgacactctgggagggtgggagagctctcaggggaacttttcccctttctttatctaaaatgaagttccctgactccctccttccaactgtggactccagaaacagaaatgaaatggcagttaaaggagccacacagacgcctccctgcatgtgcactgagggaaaaattaaaagatga

SEQ ID NO: 242310 - DNA, 333 bp, Homo sapiens
gggtccccttctcaaatcggactattgcaaaaagcaggcagaaaggaggcaggcgtccttgttgctcccgcctgcaattcactgcgatgagtttggcacctacattgctgtgctaaacctaaggcatttttgacctaaaaaattgaaatgtttgagcatcgtgaaagaactctttggaagcagtcctgctttctccctctttgccttaacttggcagtttttctcacctacagacaatcgttgccttgtaaagacccttgaagaaatctaacacatcctccctggggtacaccttttccaagcaaaaactgcattaaatcttttcatggtggg

SEQ ID NO: 242311 - DNA, 411 bp, Homo sapiens
gtcatagtcgatgaagaaaaattattttgaagaagacaaattaataggctgtggcttggaagaaagaggacttaagagtatttgaagatgaggaacacatagcaaacagacaacagaaaagggagtgagtttgaaaggaagggtagatgcctaaaggactcccttttcccaaggtattaagggactagacttctcttccagttcaatgaattacaagagtggttctaatttacactgtaaaaattattaaagaccccaaagagcttttgcttatgtggattatatctattggtatttaccatattcaaaattaaaactgagaaaatttactttattcatttaaaatggcaattaaaggccagaggcacagtggctcacaactgtaatcccagccccttgggaggccgaggc

SEQ ID NO: 242312 - DNA, 238 bp, Homo sapiens
agacatgggcaaagtgcaaataagaaattgagagagataatagaaggtacagctatgctctttgcacctggccagatatgggtagaagtggaccaggggctacctggctgtgcaaattctctccatgagccatgcagccgtgctccagactccattccccacccatgggaggtccctgtggcaatcactgaaaattttcctgaaacagccatttccccagaatgcaatctactgggca

SEQ ID NO: 242313 - DNA, 303 bp, Homo sapiens
ataactcaaggctttagtctggtgttccaacattagtcattttgttggatgttctctcagacattctatatagataggaatagcaatactgatggataataactttatagtttatggcacccagaattattcttataattgtaatactccccattttagaagtaatgttaatcattttatttattatataagcagtaacatgtatttattttaaacatttagataagtcttattttcttaaataataattctgtccttagtttattattgcttaaaatccaaaataaatgtaggtgaaaaacc

SEQ ID NO: 242314 - DNA, 455 bp, Homo sapiens
caccagcatcttcatggccctcacatggctcatgtgcatatcctaactctgatactaagggaggagaccacccctcatattgtcttatgcccaatttctgcctccaaagaaagaagaagtaaaaactaaaaggcagaaatgaaatccacaagcagacagcccggcgccacaccctgggcctggtagttaaagatcgacccctgacctaatcggttatttgcataagaaaagcactgtgaagatccctgtcctgttctgttccattctaattaccggtgtatgcagcccccagtcatgtacccctgcttgctcaatcgatcacgaccctctcacgtggacccccttagagttgtgggcccttaaaagggacaggaattgctcactcggggagcttggttgttggagatgtgagtcttgctaaagctcccagccgaataaagcccttccttcttaac

SEQ ID NO: 242315 - DNA, 429 bp, Homo sapiens
aaaaaaaaaaaagtacataatttgactatatctctctagtgggatagtacctaaggattaaaaaatattacaaagaaatctcactgggagtagtcatggtgttaataatacttttgatttgttattttggaaggtagatattaatattgttagaaactaatatgtataaaatcaaagaagttaaacaaaaccccttgatttctaaacttgaattagatcagagaatagaggaacatgttacttgacaccatggaaatgcagtcagcgaagtctggaatgtggggaaataaatggcaagagaaaaataaatggcaatagaaaaaaaaggttgaggagcagaacctgtaaataaacctttagagacatatcaaccaaaagcaagggtagaccttgtttaggtcctgatacaaacaaaacccactgcattta

SEQ ID NO: 242316 - DNA, 723 bp, Homo sapiens
taaaaaaaaaaaaaaaaaaaaaaaagttaataaaaaattttaaaaagagcagaggtgagattcaaatgtagatttcaccactttctagctgtgtgatcttgggcaatttacatgacttctctgaccctgtttatctgtaaaatgtttcaaggatcaaatgatatcacatgtttgaaaaacttgtcacaaagtactcaggacatgttaataaggatcacaggccgggtgtggtgactcacacttgtaatcccaacactttgggaggctgtggcaggattgcttgagacccggagattgagatcagcctgggcaatataggaagaccctgtctctacaaaaaaaaattaaaaattagctgggtgtggtggagtgtgcctttggtcccaggtactcaggatgttgaggctgaaagattgcttgagtctgggagattgaggctgcagtgagccatgattgtgccactgtactccagcctgggtgatagaacaagaccctgtctcaaaaaaataattaaggatcacaaatgagcatttccttgccaccactgagtataatgccctgtataatgctgagtataatgctgaactcctagaacaaagaagtaaatcagatgcagtcccttcccccatggggagacagacttgcaaacagctagcacctgagtcagattgtgaattgtgccaccatagaggtctcagccaagtgtggaaggtgcactctccc

SEQ ID NO: 242317 - DNA, 541 bp, Homo sapiens
accacttcgagctcgctaccccacaccacctgagtcaggccgggtgtggtgactcacacttgtaatcccaacactttgggaggctgtggcaggattgcttgagacccggagattgagatcagcctgggcaatataggaagaccctgtctctacaaaaaaaaattaaaaattagctgggtgtggtggagtgtgcctttggtcccaggtactcaggatgttgaggctgaaagattgcttgagtctgggagattgaggctgcagtgagccatgattgtgccactgtactccagcctgggtgatagaacaagaccctgtctcaaaaaaataattaaggatcacaaatgagcatttccttgccaccactgagtataatgccctgtataatgctgagtataatgctgaactcctagaacaaagaagtaaatcagatgcagtcccttcccccatggggagacagacttgcaaacagctagcacctgagtcagattgtgaattgtgccaccatagaggtctcagccaagtgtggaaggtgcactctccc

SEQ ID NO: 242318 - DNA, 496 bp, Homo sapiens
taaaaaaaaaaaaaaaaaaaaaaaagttaataaaaaattttaaaaagagcagaggtgagattcaaatgtagatttcaccactttctagctgtgtgatcttgggcaatttacatgacttctctgaccctgtttatctgtaaaatgtttcaaggatcaaatgatatcacatgtttgaaaaacttgtcacaaagtactcaggacatgttaataaggatcacaggccgggtgtggtgactcacacttgtaatcccaacactttgggaggctggtcttgaatcctgaccttctgacctcagatgatccacctgcctcgggtcctggtgatagcacactagttcagaacaagggcagggctgtatgctgtggctcacatctgtaatcccagagcctttgggggccgaggcacgaggatctcttgagcccaggggttggggctgcagtgagctatgattgcaccactgtactctagcctgtgtgacagtgagaccctgtctct

SEQ ID NO: 242319 - DNA, 528 bp, Homo sapiens
agataattaagtgttccttttccagaagaaaaaatgaaactttctcccacaattagaaccattttgtaagccacatctttgtgtttgcagaactccctaaaaatgtgaaaaagttcatgcatcccagcaggtgagaagtttatttcttttccctgacaggaatattaatcactattattatcagctcagtaagtccttgacctcatagggagatgtgtgcagctgctggctttggagagggaaatgtatgttggagcaaagtgttgatatccactgctttactgcctaataaggaaagccagcacctgtccagaaggtagaattccaggattccagatgaggcagccatggtacctaaaatgtccatcattagaattattccttggggtttaatacagtctttagaaatgccctactaaaatggagatgttgtcaaatgctacattagcacagatatctttaaaaactggtgcatgattatgacggataccaagggaataggatctgggatcacagacaaaaaaaaaa

SEQ ID NO: 242320 - DNA, 384 bp, Homo sapiens
catttcatggaatgtagcccactttgggcatagctggatacagagctttgagctacgtcaaagaacacagcctgttcctctctgtctgcctatgtctctcactctttctctgtgtctgcccaccccccacacaacccccacgcccctgcttcctctgttttcctcagtgttggcttcattccaaagcaggatgtcccctcgctcccagtaaagacagttgctggccagtccaggctgatattctacccactcagcaacaccaaacactggagagtgtctctttgcccataacagtaaaaaaattgcaggaagggctgctattggtctggcttgggtcatgtgcccaagcctgaaccaatatagcagccaggggtatcctgagct

SEQ ID NO: 242321 - DNA, 283 bp, Homo sapiens
gaatgcagagaatactttccattggtttgagccaccacgtttgtggtagctcattccagcagcactagggcactccctctgaaatttatctaggagatgaaagatccacaagtatctaaaacacgctaccaaatatacagctaagaagagtgccgtgctggaacaagaacagtcaaccagggcatggaccagaatagagacactggaggcagacgtctatattcacgagcattcagcactgactgtctagtatttggtgttgagaaagtgactcagaaaatga

SEQ ID NO: 242322 - DNA, 384 bp, Homo sapiens
aacagtgggccatgggagcccagtagaaaagccagaaacagacctatttgtctatgggattgttgcaaagttggtgttgccgacattggtgaaaagatgattgttatgggctgaatgtctgtgtcttctaaaccaaaaaatatctaagacaggtctcaaccgatttagaaattttgccaaggttaagaatgtgccagggagacaggtctgtgcctttttccaaagatggttttgagggcttcagtatttaaaggggaaaagcaggctggaggggataggagggtatggtctcactactgaatccacttgttccaagacaaaaggagcagggaggggaatggccaattcggtgcttgtccaggcttagtacatctgctctttatg

SEQ ID NO: 242323 - DNA, 579 bp, Homo sapiens
agatgcgaccaagtgaattctcaatgttttttcagctgtatcctctgctgattcttgattcttcaaatccccagtgatttgccactggtattcttgttctcatcccattattcatgtattcagcaaatatgactgagaatctattggtacaagcactgtgccatgttctagaaaagaaccaaaaatgatatggttcctgacccattaaagttgtcttttctttattttcccttttctgaattttccctgagaacacttggtatacattaggagatgtacaaaggaatataaataagaaggaggaaggactcaaattcacttgtaggagaaatattgtgaataagtgaatacagtccagcaatgagaggagggttggaggggaaacagagtcaacatggagttcacgttatgacaggattatgaattgctattttccttttcttttaaaagtttttaaaaaatgtatacttccttttttgtggtaaagtcttgctctttcacccaggcagaggttgcagtgagctgagattgtgccactgcactcccgcctgggcaacagagtgagacccctactcaaaa

SEQ ID NO: 242324 - DNA, 1667 bp, Homo sapiens
  misc_feature (1166)..(1166): n is a, c, g, or t
ctaataaatctggtcagttttaaaatttcttattgaatcagttttagtaatatgtctttataagaatttgttccttttgtctaattttttagtataacattgattattattcccttataataatatttttgagatctgttctttatttctgatttggggattttgtatcttccctttttcttggtcagtctaggtaaaggcttatggattttatctttttaagatcccagcttttagttagttttattgattttctccattattctcatttaattaatttctgctctgatctttattattccattccttcttcttactttggctgtaattcacttttcattttcttggttcttaaggtggaagcttagatgattgatttgaaacctcttttctaatataggcatttaaagctatacatttcctgctaagcagttttttagcttcacaccataaattgcgatgtgttatgattttgttttcatttagtttaaatatattctaatgtctttcatgattgtttctttgactcttgggttatttaaatgtgttcttaaattccaaatattgaagatttcccaatttcttcctgttgttgatttttaattctgttatgattggagatcatactttgagtggcttcagtccgtctgaatttattcagacttgttcttatgtggtctcacatatagtctgttctgccagttgttctctatggccttaaaaagtacatgtattcacctgttactaggacaagtgtgctggaaatgtcagggcaatttggttgatagtttgttcaaatctgtcttttgactttctatctagttgttttccgtgacgttttgagtattgaaagttattcaccttgagaccttgtgtgctagtgagacctttatgattttggtctcacctagctaaaccagcttgggtcatgagatcctagtgaatttttacagggtgacactaaagaaaacactgtcaattcaggtaatagagtatatgttaaataaaagtcttcaggtattggcattttaggaaaaataaacttagctatgtgtgctgcaagactgtatgtgtttctgaatcctctgcttcgagggaaaaatcatattagtagaggataagtttactcagtactggaaaaattgtgtagattttaggaacttgtnggagcagaaaggcgattaattgtgagaaatgaaagtcaattttagtggcagcaggtatatcaagtacatcaagtcttagttcaatgtttatagattttgaaaatttataggttcattattcctttcatttgtttcttcttttgtcccatttttgtcaagcatgtatttattttgtttgaatccttttttgtctcatggactgagaagaaaatataactaaggttggattatcccacaatttgctctgtgtctaattattctgaggtggattgtaatgaagccagcaagacttatacattggaattttaaatgtatgggattgtaaggagggtagaagctacaaaccaaagataagatatgcctgcagatctgcttcagatttcctgagggcagtagatgaaattatttctaagggcctttttcaccactgctctttaagtatatgagtaataaacaaaaagaacaaagtatgtggttcagaaggaataaaacaaaaaaaaa

SEQ ID NO: 242325 - DNA, 435 bp, Homo sapiens
gaaggtttgcatttgttgtggggactgaaaatcatgcattgtgcaaaatgagaagatgagtgtggcggcgggggcaccatggagactgtcacctactcggattggggccttagcatacaaaacccacccgacggacatcagggattagctgttctgcttcgagcttctcaatttctccacatgctttgcgcccagacccactgagcagccagactcaaccagattccccaggtctgggcccccacagggagggcaggtcccctaaggctgttacacgtgagtaccaagcagatggagcccagaagatgggaaggagtgggacgaagtcaaatgccagccccaccctcacaacctcagtccccttctctgtaagacaagtgactagagggaaagccacagggcccacctctacttgcggactaaactcctgatgtg

SEQ ID NO: 242326 - DNA, 317 bp, Homo sapiens
gcgcgagctcgccaaaggggttcctgcaccgccttcagcagccagctggcttcgcccctcccccggaagtgtccgcacctcctagagcccagcgagcgagcgtttgtgcttttgtcctttgaaccgggtgtggtttggatttcggagctggagctttggaatcaaacctagcttccaaacgattgtgtacccgtgaccttgggcttgttacgcgcgatgtctcggaccctcctttatcttttctgtaaaagggggagagtagttcctaccttccagagttgtcttgagaattatatgagaatacgtacataaagcac

SEQ ID NO: 242327 - DNA, 498 bp, Homo sapiens
cccttagaataatgtctagcacgtcgtaaacgatgaatagatattagctttaaaaatgatacttgttattctgtgtgctagatatctagggaagtgaaggaaggacggcaagggaggcagagatgaataaggcagtgactaggccccatgggagggagatcgcggtaccacagctgaatggattgtctcccctacattgccattcagctaagagacattcagcaatttattgaataagcacttcttgagcccctagtgcatgcatcagacactgcgttagggctgggtgcacagcagtgaataagacagacgtagttcttgctctcgagtgctcatggtccaatgagggagacagagggtgactgggaacaacagtccagtgtgataatgctagcatagcagcagaacaggggctgcacaaacacaaagaaggaacatctaactcccaaatgaaaagaggggcattgacaaagtcctcctagggaaaaagaaaactga

SEQ ID NO: 242328 - DNA, 521 bp, Homo sapiens
tcattcctaactttgtagttgggacagacctctgattaacaagagaaaaacaagcaagtttactaaggcatgcagcccacagcacgtgggagaaacctcagtgaaactcaaagcgcagtggcttagaagtctggctcatcttcaacaatacatttgtggagaaatgacaggacaatggaaagcaattttaggtgtccgaaggcgagaaaccgtgggaagataaatatatgggaagaaactagtggagtacatgtgtttgcacattcttctgctgacatccctgagctggtaagaatggtctccggtaaaagagaatttacatcctgtctttagatgaaaagaggggaggatctagagagctcttcctccattggctgcttcttaattgcctttacttcaaaatatttgtcaaaaaggcatatttgggggtgacatattctgattaccttcagaagcttgtctttatacacatttatttcttttagggtagattttactttcatttgtcactaatatgattg

SEQ ID NO: 242329 - DNA, 490 bp, Homo sapiens
taagacacagagtcttgctctgtctcccaggctggactgcagtggcgtggtcatggctaactgccgccgagggagtttgaggctgcagtaagccgagatcacaccactgcactccggcctgtctcaaaaaacaacaaaaaaagctcctcctttcctgcttgggggagggtggctggcaggccctaagcctgtggaggtgcagggtgcactggggggctgtgtgcacccaccctgagaaccacttggtctctttgcagaaggaagcgggtcctctgtaagatggggctgcatccctgccccgctcccagcagcatggggtcaggtgagtgaccagcgtggcagtgttgtcaagggcaatgtgaggaacaccccttgccttggagtgtcctgcgagtgcgcttttggtcagcagtggccatttagctgagaacttggagacaaggcctcaagatgcatctctcagaagtctatgtggtcacctttgtttttt

SEQ ID NO: 242330 - DNA, 628 bp, Homo sapiens
attttgcagagatgggggggtctccctgtgtcatccaggctggtctcgatctcctggactcaagccatcctcctgtctctgcctcccaaagtgctaggattacaggcaggagccaccacgcccagcccgtcatcttctaatttaacagaaagaggaagtgagtccctggtcactcctgaaccagtcagagaaaccctggtctgtgggtgtccctgagtctattactggaaccatcacttcagcagtatggtcttacagatggggaaactgagggctgaagggggaggcatccagcccaggctgcacaagtaggtggcaaacccacaaccagaagccacgggcaagcagcatgaggacagtacccatagccaggtgcgggtactgtgaaggcaggtgctgtttcatccccattttacagatgcaaaaactgaggctcaggggagtgaagtgacccatccaaggtcccacagcttgtccgtggcagagctgggtttcaaccccagggagaaaccaatgcagtgctgcacatccaatcactattgagtgcttctccttcgtccgtaacgttcagcacggagaacagtgcctggcacatagtaggtgcttaataaaacgtgctgaatgaatc

SEQ ID NO: 242331 - DNA, 209 bp, Homo sapiens
tctcttcagtctgcgcctcatccccctcatcccaaatgggattatataggacccccatgttgggtttcagggagaaaccaatgcagtgctgcacatccaatcactattgagtgcttctccttcgtccgtaacgttcagcacggagaacagtgcctggcacatagtaggtgcttaataaaacgtgctgaatgaatcgtcgccagtgtgca

SEQ ID NO: 242332 - DNA, 325 bp, Homo sapiens
ctcggaggcccagagcggggagcagcgggcctgcaaccagggaaccctgaaaggaagcgggtcctctgtaagatggggctgcatccctgccccgctcccagcagcatggggtcagatgcaaaaactgaggctcaggggagtgaagtgacccatccaaggtcccacagcttgtccgtggcagagctgggtttcaaccccagggagaaaccaatgcagtgctgcacatccaatcactattgagtgcttctccttcgtccgtaacgttcagcacggagaacagtgcctggcacatagtaggtgcttaataaaacgtgctgaatgaatc

SEQ ID NO: 242333 - DNA, 375 bp, Homo sapiens
tttttaaaatttgaaattatttattctctgtgtctgagaaatattttgagaggcaagagcatttgttcttgtgactcttacaagatacagtggctggccgggcacggtggctcacgcctgtaatcccagcactttaggaggccgaggcagatggatcacgaggtcaggagttcaagaccagcctggccaagatgatgaaaccccatctctactaaaaatacaaaaattagctgggcatggtggcagatgcctgtaatcccagctactcagaaggctgaggcagagaattgcttgaagctgggaggcggaggttgcagtgagccgagatcgcaccactgcactccagcctgagtgacagagcaagactccatctca

SEQ ID NO: 242334 - DNA, 142 bp, Homo sapiens
cagtcaacgaggaaagggttagctaagcaaatgaatagcaaaagtgagagaacagtgctgcagctacttaaaagtacaagctgtttcaagtactctgtgatttagaagagaaataaactctggttataaattatttttacca

SEQ ID NO: 242335 - DNA, 244 bp, Homo sapiens
gatatatcaaggccaaaaaatatataccaacagtagtgtttcacttttgagtctcatccaggaacttaactgtgcatcagtgaagtggcactcaaataaagaaaggtggaaccatcaatgccattatgaaacacgatcataaaaggtgcttcccagtagtatctatcttggtaactctgatgcaaaatctttcactatcttagtgccacgggacagggctgcaaatttagagtaattccttagc

SEQ ID NO: 242336 - DNA, 668 bp, Homo sapiens
tgtgttcgtgtgtgtttgtgtatgtgcatgaatgggtgtgtgtggtgtgtgtttgtgtctggtatgtgcttgaacaggtgtgattgtgtttgtgtgtcaccttctgggagagggagcataaattgacagtggagaaacctggtgaacactgcctcagccaggtgttcaagtcagcattaaccctggtaaatcatgttgacagtgcgtagccccgatgtgatatgatatgataagaatagcactttacccctgtggtctctttccaaaactcataataataatgagaaaagcatgagacaaattccagtagaggggcactctacaaaatgcctgaccagtactcctcaaaaccatcaaggtcatcagagacaaggaaagtgtgagaaaccgtcgcagccaaaagaagccgaaggagacgtaacaaccgaatgtaatcctggatgggatcctggagcagaaaaaggggttcagttaaaactaagggaatcagaatgaactgtgaactttagtgaattaaatcatatatgtcagtactggttcattaattgtaaccactgttcatgtaaaagatgttaaaaatagagaaaactgggtttcagagtacttgggaactctctactattcaatttttctgtaaatcttaaactgtttttaaaaaggaatttcta

SEQ ID NO: 242337 - DNA, 408 bp, Homo sapiens
gatataatttcataattttatcataatttattatttccattgggattttttttctgtgagctattggcttttaaaagttatttcttaattactacatagagggcttttctaactatctttgttattgatgtctagtttaactattactgtggccaaagaacatatttcacattattacaactcttcaaatatgttgagacttgctttatggtccaatttctagttaatttaggtaaatgttttaaatgcttttataaataatgtatatttttaagttattgaatttagtcgtctacatagctcacttaggtaaattttgttaatcagcttgttcatatcttttatacccttactgaagttttatttggtttgttcattttatacgttaataagagaagcgtttaaaat

SEQ ID NO: 242338 - DNA, 534 bp, Homo sapiens
ggagtagggtaggcagttgcatgtgtgtctctgtgtctcccctctatgccagctgcagacatcaccaatgaattgggctactcttcgccgtggaccctggatgcagccagtaccaaccagtccaagcttacatgcacaggaggacactagttcaccgtctttgtttttgagtaactcaaattcttgcacatacctcagcttctttttggaaaatccaaatatgactttcctgtatgacaagatgctatagggcatttctcctttagcgaaccaaagaagtcttccctggctttctaaaggcgatcacttaacgtttactgccctcattccttttctatcgacaaaccttgtatttcagcacaaactgtaattctcctctccacagtaagttattggtgtctcgggaactcgacagacccagtcaacattaaaattgctcctagattggcttttagctctgcttcctaacttgattccgatctggattacaccaggcctggaactctccatgatttattctcaaccagcaatcaa

SEQ ID NO: 242339 - DNA, 807 bp, Homo sapiens
ggagacaggggtggaattcgtcttctgggaggaagctggagagagcacagtgaaattgaaatacccattcccagatagtcaaaaacatgaactttcccccagcctgcaccagtattgttttcaaacattgcccatgagtaggccctttgaagagttagcttcctcctcatctttgactataaaattgtttaatcaatggaatttgtaccagccttttaaaaagttttagtttttcctaagtgattttgctctcttccaatctaaacctgttgcttgtttggttcagagaactacaaactgtcaaagaaagggtggggatgataagaaatgctaatataaaaatgctaagtgaaaaaaagacttggccaggagaaataatttaaaatgcacatttgctttggatgcactgttgttctgttaaggctgtatatatttgtttatttaaggtgactgaaagtgcaaagaggaaatggacagcatgcaattcatcctaatgtacaaaacgttatatgcactcaaatgttataatttctaatatttttaaagtttatattcgagttgtacaaagttaagcattaatcagatatttcattttttcataatgttaccattttcttaaatattattacaaaattttaagtctgtctaatggagagttttttttaaactgtctacctcatataatacaagtatttacaacgctaaagttaccagaggtcaatgaataatcaaaacattttttacagtacacctttcctggatgatatgcaatcgaatgctatattattaaacgcatttttctcctta

SEQ ID NO: 242340 - DNA, 909 bp, Homo sapiens
gctatgagtaagaaaaactttttaaaattactcattacagtagcaaacaagacacaaagtaaactcctgtactgaagttgagatcctccaaattaatgccaccaaaactataccacaggggttaagggaaaaaagagttaattcatgcacaaataatcacagattcacatccaatacaaggtaataatgaagacatggattaaggggaataatggtagtttgcgtagtagtttattctattcaattaataccttggtgatcacagaatgtatggcactgtgttaaaaataactgaaagagaaggagaagtattgaactatattcaaacaaatcagagcattttaaatctaaccgtaagtaggttctaaaagtataaacatataatgaatgattcaattaaatcttaaaaagcctagctaaccaatatggcagatctagtaacaaatattccaagataatgctatgtagagtaactacttaattgctgttattttctacttagaattctcaacacagaacctaagatacagtcatgactatttttctcagtctttttcattcataaaatctcagccttcctcagggagattctgatagcccattcatgttctccatcaccacctggagttatgccccagtaccttttgcttaaggctaatataaaagattttgtagtgaagatggtttgtccctgtttgaaattgatattatgaaaacaacatggttatttttccattttccaagtataaaactactttatattgaacatctctttttaaatcagacatgtctctctagagatcccgatggcctctacattcttactgatataaagcatatagtcaaggtgaaaataaataattgtttattgatgttaatcaataaagctatcaataccccataaaccta

SEQ ID NO: 242341 - DNA, 387 bp, Homo sapiens
agtgtgaggcaggagaatgcctgtcaggagctgtcattcatcctccccaaaaggaaccccttagggccactcttgggttcccagaaccttcactgcagactgactctttcccccagcttatttggtcctgtgtttcccaccagcactcggagtgctgtgcagaaggcatccaaggctgacactctggggacctgaagacagcagcctcaggattctcccatctggcctttttttgtgcctttccaacctctgtaaacacagctggaagccccatcccatctttaagaaatgatctgaaagatcttttaatcttacgacatcttactttccgtcttgaaaaccgtccactaggcaggaatagtgggggtgttgataaatggagctagc

SEQ ID NO: 242342 - DNA, 513 bp, Homo sapiens
atttgttgactgattggctaagagagttcaagaggaatagaggtctaggatgactttctctcatttgaatggatggatttgtcattactgtggcacctaaggctttgctgcttataccactgcattttttactaaaaatgaaaaaatcaggccaggcctggtggctcatatctgtaatcccaacactttgggaggctgaggcaggagaattgcttgagctcagtgtcaggcttctgagcccaagctaagccatcatatcccctgtgacctgcacctacacatccagatggcctgaagcaactgaagatccacaaaagaagtgaaaatagccttaactgatgacattccaccattttgatttgtttctgccccaccctaactgatcaatgtactttgtaatctcccccacccttaagaaggttctttgtaattctccccatccttgagaatgtactttgtgagttctaccccctgcctgcaaaacattgctcctaactccaccacctatcccaa

SEQ ID NO: 242343 - DNA, 445 bp, Homo sapiens
ctcaggagttttaattaaaaaggacagctttttaattcccttctcttccagttctctaaataatgtatttctgacattaagtgtattaggaccagactggtgtcttctggcagtagaatggtagacaaaaaaaaatgtgttttcaagctggagacctgaggctgggcatggtggctcacgcctgtaaaaccagtgctttgggagaccaaggagggaggattgcttgagcccaggagttcaagaccagcctggggaacatagtgagactgtgtctctacaaaaaaatttaaaaattagccaggtgtggtggtgcacacctttggtcccaactatttgggagactgaggtgggaggagcacttgagcccaggaggtcgaggctgcagtgagccatgaccatgccactgcactccagcctgggcaacaatgtgaaactgtgtctctga

SEQ ID NO: 242344 - DNA, 356 bp, Homo sapiens
tgcatatggcatttattttcatatcatgataagcattctcatgtttgcacttaattttccttatttctatttttcttagatttgttgatgttgtgtggcatattaaaagtaggaaggactgtataaactcatgtattatttttaaattgtttttctgaatgtactcaagtacttttttatgtgaatatgaacacggaataaaagtactaaaaccagttaattatgagagactaagaatgtggaaaggaacattccggagtatattagtagctaaagaaatgccttggatcttaaatttcaacttctaaaattattaaaatacaaatattaaaaagatatagaggccactgctaaag

SEQ ID NO: 242345 - DNA, 180 bp, Homo sapiens
gcatgaagcatgtgacaaatagcaaaaacttattgcatgttattatctattgttattttatattccttattataccaggaacgtgggcacgccaaaatgattttttgaagatgctaatgtagatctgaagtctaaatgacaggcatactcaagaggttttgagtgagcttaagattgaag

SEQ ID NO: 242346 - DNA, 449 bp, Homo sapiens
ctgttactactacatctcaggcaaattctcattttcataatgcatatcttcacaaatttcaaatttttcagtgtggaaattgcccagttttaccagatgttgctctgcttgatattggtgcaatttgctgggattcagattctggcattgctatttaataattgtgtgaccatggacaagttgattaaccttattgcatttcaattttttcatgtataaagtattaatatgttatataagtttattgtgaggattaaaggaattaataaatacaaagcacacatggcacatgatgctattttctgactgctattataagtacactactgtcagccgggcgcggtggctcacgcctgtaatcccagcactttgggaggctgagacaggcagatcacgaggtcaggagatcaagaccatcctggctaacacagtgaaagcccatctctact

SEQ ID NO: 242347 - DNA, 439 bp, Homo sapiens
tttgtgtttagatttgatagaaggatcacaggagcatctgtatcataagggacctgagccaatctattttggagaaacattctgagggaaagaccccacaggttatggaagaaaagcaacagacagaagatgggaaaaacaggtcacgtttataagaccagcttgaagaccatgccacactgaggagtttggtttttcgttaggcaaagaaactagctgttttttcttcaatgttcatcggaaaacttgcccagcagctgtgagtgactcttcagctttcgaatcattgtcttggaatcttctaaaccagtaagaccatacttattttattttaaacatggaatttaggagcaaaggactagacagtcctcaaagtaataaaataaaaaagaaagaaaaatcatattagaaataaagaatgccgcctccccaaccaatt

SEQ ID NO: 242348 - DNA, 590 bp, Homo sapiens
agactaacacaggtgaccaatgttgtcagggaagttgttcttgctacaatcttagccatctgtttgtctgaaaaacactacaattttagccatgtgcctgggatcaagttgatgatctggaatcactttggacctaacaaatcgcccctagtataacagaagcctctcctactgcatccctttaactagctgactatatattcaaatctcaaatgagtacattaaatgggcagcatccaaaacatctggaaccccaaatgcaagggggtcaaaaattgagttttaaaatattttatttttgataatcgccaaagtttatacttaggaatataaattttgtacatggtaaaaatattcagactatagaaaaagtggtctgaatcttcaaataatccttctctattctcactctgtttattgcgttgcttcctgttttagtgagaaaggtagcaggtgagaattccttaatctcccatcactaccactatacaacctgcatctgtgattaagtttcctttaacttctcctgagactgagtgacctgatcctgctcctacagaagtaaacccttccacctatcacaccccata

SEQ ID NO: 242349 - DNA, 234 bp, Homo sapiens
gggaaaagcttttacagaccgagtaagagaattaacatgcttaggacagcaatattataatgaaaacctaagaaaaactttgtggcgaggtaaaaatcgttccaaatcacctcatccaaatccattctcctgctttctcttctgtaaatcacacctggtatcagcctgaagctttttggatgtgaatccactgagctggtgagttccttaaataaacatcctcctgtattcccc

SEQ ID NO: 242350 - DNA, 110 bp, Homo sapiens
cgccattgtactccagcctgggcaacaagagtgaaactgtctcaaaaaaaagaaaaaaaaacagaattttgtgaaataaaggccacttgggagtatctgagccaccccac

SEQ ID NO: 242351 - DNA, 588 bp, Homo sapiens
ctttattttttacttttaaattaattaattttttcttagagattgggtcttgctatgttgcctaggctggtctcaaactactggactcaagcaaacctctcacctccacctctgaaagagctaggattacaggcatgagccactgcacttgaccctgaaaggccccatcatagatgttctttaatgaccattccagctatgacacatggtggatttttccccagccttctcctcctgcagagggttccctcagagctggtgagctcctgcgtgcctgccactgctctgttccctccgcatccccagaatgcatctcctggcagcctgtttcacaggtgtgcacacttaccttcatgaaagccctgaggttaaatgacttgctcaaagtcacacaactggctgccagagcaaggactttagcctgcacaacctggctgcaagtccagagttttccacaccaccatctgcctcctcagacagtgctcaagcagcacccaggcctcccagggagaatgccctccaccccactggcctgcaggccattaggctccctgcaggagcagagctcttcctcttgtcttctgcatc

SEQ ID NO: 242352 - DNA, 4055 bp, Homo sapiens
  misc_feature (4047)..(4054): n is a, c, g, or t
aaggcggccaagatcatgatgggcaaggtggacaccttcctagactccctgaagaagttcgacaaggagcacatccctgaggcctgcctgaaggccttcaagccctaccaaggcaacccgacgttcgaccccgagttcatccgctccaagtccacggccgccgccggcctgtgctcctggtgcatcaacatcgtccgcttctacgaggtctactgcgacgtggcgcccaagaggcaggcactggaggaggctaatgcagagctggcagaggcacaagagaagctgtcccggatcaaaaacaagattgccgaacttaacgccaacctgagcaacctaacctcagcgtttgaaaaagcaacagctgagaaaatcaagtgtcagcaagaggccgatgccacgaacagggtgatcttactggcgaacaggctggtcgggggattagcatcggaaaacatccgctgggctgagtctgtggagaacttcaggagccagggggtcacgctgtgtggggacgtcctgctcatctctgccttcgtgtcctacgtgggctacttcaccaagaaataccggaatgagctgatggagaaattctggatcccttacatacataacttaaaggtccccatcccgatcacgaatggcctggatcccttgagcctgctgacagatgacgcggacgtggccacctggaacaaccagggcctccccagcgaccgcatgtccaccgagaatgccaccatcctgggcaacaccgagcggtggccgctgatcgtggacgcccagctccaaggaatcaagtggatcaaaaacaaatacaggagtgaactgaaagccatccgcctgggacagaagagctacctggatgtcatcgagcaggccatctcggaaggggacacgttgctcattgagaacatcggcgaaaccgtggaccccgtgctggaccctctactgggcaggaacacgattaaaaagggaaagtacattaagatcggtgacaaggaggtggagtaccaccccaagttccgcctgatcctacacaccaagtacttcaacccacactacaagccagagatgcaggctcagtgcaccctcatcaacttcctggtcaccagggatggactcgaggaccaactcttggccgctgtggtggccaaagagcgcccagatctggaacagctgaaggcaaacctcaccaagtctcaaaacgaatttaagattgttctgaaagagctggaagattcgctcctggcccgtctgtcggctgcgtcggggaactttctgggagacacggccttggtggagaatctggagaccaccaagcacacagccagcgagatcgaggagaaggtggtggaggcaaaaatcacagaagttaaaatcaacgaagcgagagagaactaccgcccggctgcggagagggcatctctgctctacttcatactgaacgatctcaacaaaatcaaccccgtctaccagttctccctcaaggccttcaacgtggtgtttgagaaagccatccagaggaccacccctgccaacgaggtgaagcagcgggtgatcaacctgacggacgagatcacctactccgtctacatgtacacggcccggggactcttcgagagggacaaactcattttcctggcacaagttacgtttcaggtcctgtccatgaagaaggagctgaacccagtggagctggatttcctcctgcggttcccttttaaggccggagtggtctcaccagtggacttcctccagcatcaaggctggggcgggatcaaggccctctcggagatggatgagttcaaaaatctggacagtgacatcgaaggatctgccaagcgctggaaaaagctggtggagtcggaagcccccgagaaggagatcttccccaaggagtggaagaacaagacggccctgcagaagctgtgcatggtgcgctgcctgcggccagatcgcatgacctacgctatcaagaacttcgtggaggaaaagatgggcagcaagttcgtggaaggccggagtgttgagttttctaagtcctacgaggagagcagcccctccacgtcaatcttcttcatcctctccccgggggttgaccccttgaaagacgtggaagccctgggaaaaaaactagggtttaccatagacaatggaaaactccataatgtgtccctggggcagggacaagaggtggtggctgagaacgccctggacgtggctgcagagaaaggacactgggtcattctgcagaatatccacctggtggcccggtggctgggaacactggacaagaagctggagcgctacagcacgggcagccatgaggactaccgggtgttcatcagcgcggagcctgcccccagccccgagacccacatcatcccccagggcattctggagaacgccatcaagatcaccaacgagccccccacgggcatgcacgccaacttgcacaaggccctggacctgttcacccaggacaccctggagatgtgcaccaaggagatggagttcaagtgcatgctcttcgccctgtgctacttccacgctgtggtggcagagaggcgcaagttcggcgcccagggctggaaccggtcgtaccccttcaacaacggggacctcaccatctccatcaacgtgctctacaactacctggaggccaaccccaaggtgccctgggacgatctccgctacctttttggtgaaatcatgtatggcggccacatcacagatgactgggaccgtcggctgtgcaggacctacctggctgaatacatccggacggagatgctggagggagacgtcctgctggcccccggctttcagatcccccccaacctggactacaagggttaccacgaatacatcgatgagaacctgccccctgagagtccctatctgtatggcctgcaccccaacgcagagattggctttctgacggtcacctcagagaagctgttccgcactgtcctggaaatgcagccaaaagagacggactcgggggcaggcacgggagtgtcccgcgaggagaaggtgaaggccgtgctggacgacatcctggagaagattccggagactttcaacatggctgagatcatggcaaaggcagcggaaaagaccccctacgtggtagtcgcctttcaagaatgtgaaagaatgaacatcctgaccaacgaaatgcgccgttcgctcaaggagctgaacctggggctgaagggagaactgaccatcacgaccgacgtggaagatctgtccacggctctcttctatgacaccgtgcctgatacgtgggtggcccgggcctacccctccatgatgggcctggcggcctggtacgcagacctgctgctccgcatcagggaactcgaggcctggacgacagactttgccctgcccaccaccgtgtggctggccggcttcttcaacccccagtcgttcctcacggccatcatgcagtccatggccaggaagaacgagtggcccctggacaagatgtgtctgtctgtcgaggtgaccaagaaaaaccgagaggacatgaccgctcctccgcgagagggctcctacgtgtacggactcttcatggaaggggctcgctgggacacccagactggagtcatcgctgaagcgcggctgaaagagctgaccccggccatgcctgtcatcttcatcaaggccattcctgtggaccgcatggagaccaagaacatctatgagtgtcccgtgtacaaaacacgcatccgcggccccacctatgtctggacctttaacttgaagaccaaagagaaggcagcgaagtggatcctggcagccgtggcgctgctcctacaggtttagctcgctcctgcctcacagcccacactccctggggctggaccacaactcagcccttcacctgtgcacctgtgacttattctttacaggaactggtggtggtttttcgttctcttaaataatcaggtgctttgtaaccaagcacatcggaaccagagggtggaggttggtgtggaagaggtggggcagattaaagccagtggagccactcannnnnnnna

SEQ ID NO: 242353 - DNA, 1754 bp, Homo sapiens
  misc_feature (1746)..(1753): n is a, c, g, or t
gaccccagattcccagccgacttgtagattaagctcctgagccgattctttatagcgccccggatctccccttatttttgcccgtttttcccctcccaggctcccccaaacttttttttttttttttttttaaagaaagaaatgcagcctcagggaagggggaatggaattttcctttatgtcgctgggagcacagggggcagcccacaaagggggctgggaaacaagtgggatctgtacagacagcaaggtgtgggtgaacgttctggcaaggaatgcttaaccaacaggacatgggtttcagcctgcacagctttgcctatgcttacaaactgccctctttttcagggttaccacgaatacatcgatgagaacctgccccctgagagtccctatctgtatggcctgcaccccaacgcagagattggctttctgacggtcacctcagagaagctgttccgcactgtcctggaaatgcagccaaaagagacggactcgggggcaggcacgggagtgtcccgcgaggagaaggcaggatctttgaaactgctcccaagcgagaggaagggggaggatctagaactgaggagggggtcacagggactggcggcagtacaggggaacttgctggtgaggtacactctgccccagccttgggcttgggtatcagaaacactggggtatggcccgcaggctggtcagcaggtcctcagacgtggcagctgcaggcttcgggtgaaggccgtgctggacgacatcctggagaagattccggagactttcaacatggctgagatcatggcaaaggcagcggaaaagaccccctacgtggtagtcgcctttcaagaatgtgaaagaatgaacatcctgaccaacgaaatgcgccgttcgctcaaggagctgaacctggggctgaagggagaactgaccatcacgaccgacgtggaagatctgtccacggctctcttctatgacaccgtgcctgatacgtgggtggcccgggcctacccctccatgatgggcctggcggcctggtacgcagacctgctgctccgcatcagggaactcgaggcctggacgacagactttgccctgcccaccaccgtgtggctggccggcttcttcaacccccagtcgttcctcacggccatcatgcagtccatggccaggaagaacgagtggcccctggacaagatgtgtctgtctgtcgaggtgaccaagaaaaaccgagaggacatgaccgctcctccgcgagagggctcctacgtgtacggactcttcatggaaggggctcgctgggacacccagactggagtcatcgctgaagcgcggctgaaagagctgaccccggccatgcctgtcatcttcatcaaggccattcctgtggaccgcatggagaccaagaacatctatgagtgtcccgtgtacaaaacacgcatccgcggccccacctatgtctggacctttaacttgaagaccaaagagaaggcagcgaagtggatcctggcagccgtggcgctgctcctacaggtttagctcgctcctgcctcacagcccacactccctggggctggaccacaactcagcccttcacctgtgcacctgtgacttattctttacaggaactggtggtggtttttcgttctcttaaataatcaggtgctttgtaaccaagcacatcggaaccagagggtggaggttggtgtggaagaggtggggcagattaaagccagtggagccactcannnnnnnna

SEQ ID NO: 242354 - DNA, 3135 bp, Homo sapiens
  misc_feature (3127)..(3134): n is a, c, g, or t
ccccacagtggatgagcagacccagggttgcagtcctgggagcttccagaatggacgaatgttgtaaatgagtctgggtggaggccaagcagaaggtttcggtcagggctcccaggggaggacagagtatcgccagaggggtgtaaaccctgctgcaaagatgagcctgatcacccaaggaaagagcaggtgcatctcccagaagggcccacgtcacaggccagggaggaggaacagacaaggagaggtgcagtgctcttccagggaccagaagggagggttcaaggtggcggcctggcctggggctggggtgaaaggtggtctgtacttgtgttcctctcccctggtcactgggaggcccactaaccctttcctccaccaaccgccaggtacattaagatcggtgacaaggaggtggagtaccaccccaagttccgcctgatcctacacaccaagtacttcaacccacactacaagccagagatgcaggctcagtgcaccctcatcaacttcctggtcaccagggatggactcgaggaccaactcttggccgctgtggtggccaaagagcgcccagatctggaacagctgaaggcaaacctcaccaagtctcaaaacgaatttaagattgttctgaaagagctggaagattcgctcctggcccgtctgtcggctgcgtcggggaactttctgggagacacggccttggtggagaatctggagaccaccaagcacacagccagcgagatcgaggagaaggtggtggaggcaaaaatcacagaagttaaaatcaacgaagcgagagagaactaccgcccggctgcggagagggcatctctgctctacttcatactgaacgatctcaacaaaatcaaccccgtctaccagttctccctcaaggccttcaacgtggtgtttgagaaagccatccagaggaccacccctgccaacgaggtgaagcagcgggtgatcaacctgacggacgagatcacctactccgtctacatgtacacggcccggggactcttcgagagggacaaactcattttcctggcacaagttacgtttcaggtcctgtccatgaagaaggagctgaacccagtggagctggatttcctcctgcggttcccttttaaggccggagtggtctcaccagtggacttcctccagcatcaaggctggggcgggatcaaggccctctcggagatggatgagttcaaaaatctggacagtgacatcgaaggatctgccaagcgctggaaaaagctggtggagtcggaagcccccgagaaggagatcttccccaaggagtggaagaacaagacggccctgcagaagctgtgcatggtgcgctgcctgcggccagatcgcatgacctacgctatcaagaaaaaaactagggtttaccatagacaatggaaaactccataatgtgtccctggggcagggacaagaggtggtggctgagaacgccctggacgtggctgcagagaaaggacactgggtcattctgcagaatatccacctggtggcccggtggctgggaacactggacaagaagctggagcgctacagcacgggcagccatgaggactaccgggtgttcatcagcgcggagcctgcccccagccccgagacccacatcatcccccagggcattctggagaacgccatcaagatcaccaacgagccccccacgggcatgcacgccaacttgcacaaggccctggacctgttcacccaggacaccctggagatgtgcaccaaggagatggagttcaagtgcatgctcttcgccctgtgctacttccacgctgtggtggcagagaggcgcaagttcggcgcccagggctggaaccggtcgtaccccttcaacaacggggacctcaccatctccatcaacgtgctctacaactacctggaggccaaccccaaggtgccctgggacgatctccgctacctttttggtgaaatcatgtatggcggccacatcacagatgactgggaccgtcggctgtgcaggacctacctggctgaatacatccggacggagatgctggagggagacgtcctgctggcccccggctttcagatcccccccaacctggactacaaggtgaaggccgtgctggacgacatcctggagaagattccggagactttcaacatggctgagatcatggcaaaggcagcggaaaagaccccctacgtggtagtcgcctttcaagaatgtgaaagaatgaacatcctgaccaacgaaatgcgccgttcgctcaaggagctgaacctggggctgaagggagaactgaccatcacgaccgacgtggaagatctgtccacggctctcttctatgacaccgtgcctgatacgtgggtggcccgggcctacccctccatgatgggcctggcggcctggtacgcagacctgctgctccgcatcagggaactcgaggcctggacgacagactttgccctgcccaccaccgtgtggctggccggcttcttcaacccccagtcgttcctcacggccatcatgcagtccatggccaggaagaacgagtggcccctggacaagatgtgtctgtctgtcgaggtgaccaagaaaaaccgagaggacatgaccgctcctccgcgagagggctcctacgtgtacggactcttcatggaaggggctcgctgggacacccagactggagtcatcgctgaagcgcggctgaaagagctgaccccggccatgcctgtcatcttcatcaaggccattcctgtggaccgcatggagaccaagaacatctatgagtgtcccgtgtacaaaacacgcatccgcggccccacctatgtctggacctttaacttgaagaccaaagagaaggcagcgaagtggatcctggcagccgtggcgctgctcctacaggtttagctcgctcctgcctcacagcccacactccctggggctggaccacaactcagcccttcacctgtgcacctgtgacttattctttacaggaactggtggtggtttttcgttctcttaaataatcaggtgctttgtaaccaagcacatcggaaccagagggtggaggttggtgtggaagaggtggggcagattaaagccagtggagccactcannnnnnnna

SEQ ID NO: 242355 - DNA, 870 bp, Homo sapiens
  misc_feature (862)..(869): n is a, c, g, or t
tatatgcacagatgtataattatatgggggatgttcacatagggcagacattacacattaagaatcagggaactttactctgtaatttttagctggagttatgacttcctgccactgacattaaggctgacagatgaggctctgaaaatgccacagatttaaacggatggaacccgagggctttagctgagctgttccttgagcccagcgggacggggtagttacaacatgcaagcccataactacaaaggccttttgtttcagctgtggcagctggcctgaagccttttggggtagagcccatctctgcagagggcggggagtgtgaggaccccacccttcctgccagcccctccctcacttactggcagcacacctgaccctcagccatactgtccctgcaggggctcgctgggacacccagactggagtcatcgctgaagcgcggctgaaagagctgaccccggccatgcctgtcatcttcatcaaggccattcctgtggaccgcatggagaccaagaacatctatgagtgtcccgtgtacaaaacacgcatccgcggccccacctatgtctggacctttaacttgaagaccaaagagaaggcagcgaagtggatcctggcagccgtggcgctgctcctacaggtttagctcgctcctgcctcacagcccacactccctggggctggaccacaactcagcccttcacctgtgcacctgtgacttattctttacaggaactggtggtggtttttcgttctcttaaataatcaggtgctttgtaaccaagcacatcggaaccagagggtggaggttggtgtggaagaggtggggcagattaaagccagtggagccactcannnnnnnna

SEQ ID NO: 242356 - DNA, 490 bp, Homo sapiens
cacctgctcatggcactgcccatctgctgtgtcattcacaccccttttgtttgtgtcgaggtggtggaggcaaaaatcacagaagttaaaatcaacgaagcgagagagaactaccgcccggctgcggagagggcatctctgctctacttcatactgaacgatctcaacaaaatcaaccccgtctaccagttctccctcaaggtgcgccctgcagctggggctgggtgcctccctcaaggtggggctgcatctgggctccacagccaggcctgttgcccacacagccatcgggcagtgccagggccaccctcagagggcagacctggtccagcctgcagatggagctggaagagggggagccaggggcccccatcagtcctacacccattctccccaggagagggtatgagctgctccctcctccctgctcttcccctggtgcctccaggcactcacaacccaatcaaaacaaactggatggcctggcatg

SEQ ID NO: 242357 - DNA, 1550 bp, Homo sapiens
  misc_feature (1542)..(1549): n is a, c, g, or t
gaccccagattcccagccgacttgtagattaagctcctgagccgattctttatagcgccccggatctccccttatttttgcccgtttttcccctcccaggctcccccaaacttttttttttttttttttttaaagaaagaaatgcagcctcagggaagggggaatggaattttcctttatgtcgctgggagcacagggggcagcccacaaagggggctgggaaacaagtgggatctgtacagacagcaaggtgtgggtgaacgttctggcaaggaatgcttaaccaacaggacatgggtttcagcctgcacagctttgcctatgcttacaaactgccctctttttcagggttaccacgaatacatcgatgagaacctgccccctgagagtccctatctgtatggcctgcaccccaacgcagagattggctttctgacggtcacctcagagaagctgttccgcactgtcctggaaatgcagccaaaagagacggactcgggggcaggcacgggagtgtcccgcgaggagaaggtgaaggccgtgctggacgacatcctggagaagattccggagactttcaacatggctgagatcatggcaaaggcagcggaaaagaccccctacgtggtagtcgcctttcaagaatgtgaaagaatgaacatcctgaccaacgaaatgcgccgttcgctcaaggagctgaacctggggctgaagggagaactgaccatcacgaccgacgtggaagatctgtccacggctctcttctatgacaccgtgcctgatacgtgggtggcccgggcctacccctccatgatgggcctggcggcctggtacgcagacctgctgctccgcatcagggaactcgaggcctggacgacagactttgccctgcccaccaccgtgtggctggccggcttcttcaacccccagtcgttcctcacggccatcatgcagtccatggccaggaagaacgagtggcccctggacaagatgtgtctgtctgtcgaggtgaccaagaaaaaccgagaggacatgaccgctcctccgcgagagggctcctacgtgtacggactcttcatggaaggggctcgctgggacacccagactggagtcatcgctgaagcgcggctgaaagagctgaccccggccatgcctgtcatcttcatcaaggccattcctgtggaccgcatggagaccaagaacatctatgagtgtcccgtgtacaaaacacgcatccgcggccccacctatgtctggacctttaacttgaagaccaaagagaaggcagcgaagtggatcctggcagccgtggcgctgctcctacaggtttagctcgctcctgcctcacagcccacactccctggggctggaccacaactcagcccttcacctgtgcacctgtgacttattctttacaggaactggtggtggtttttcgttctcttaaataatcaggtgctttgtaaccaagcacatcggaaccagagggtggaggttggtgtggaagaggtggggcagattaaagccagtggagccactcannnnnnnna

SEQ ID NO: 242358 - DNA, 3318 bp, Homo sapiens
  misc_feature (3310)..(3317): n is a, c, g, or t
ccccacagtggatgagcagacccagggttgcagtcctgggagcttccagaatggacgaatgttgtaaatgagtctgggtggaggccaagcagaaggtttcggtcagggctcccaggggaggacagagtatcgccagaggggtgtaaaccctgctgcaaagatgagcctgatcacccaaggaaagagcaggtgcatctcccagaagggcccacgtcacaggccagggaggaggaacagacaaggagaggtgcagtgctcttccagggaccagaagggagggttcaaggtggcggcctggcctggggctggggtgaaaggtggtctgtacttgtgttcctctcccctggtcactgggaggcccactaaccctttcctccaccaaccgccaggtacattaagatcggtgacaaggaggtggagtaccaccccaagttccgcctgatcctacacaccaagtacttcaacccacactacaagccagagatgcaggctcagtgcaccctcatcaacttcctggtcaccagggatggactcgaggaccaactcttggccgctgtggtggccaaagagcgcccagatctggaacagctgaaggcaaacctcaccaagtctcaaaacgaatttaagattgttctgaaagagctggaagattcgctcctggcccgtctgtcggctgcgtcggggaactttctgggagacacggccttggtggagaatctggagaccaccaagcacacagccagcgagatcgaggagaaggtggtggaggcaaaaatcacagaagttaaaatcaacgaagcgagagagaactaccgcccggctgcggagagggcatctctgctctacttcatactgaacgatctcaacaaaatcaaccccgtctaccagttctccctcaaggccttcaacgtggtgtttgagaaagccatccagaggaccacccctgccaacgaggtgaagcagcgggtgatcaacctgacggacgagatcacctactccgtctacatgtacacggcccggggactcttcgagagggacaaactcattttcctggcacaagttacgtttcaggtcctgtccatgaagaaggagctgaacccagtggagctggatttcctcctgcggttcccttttaaggccggagtggtctcaccagtggacttcctccagcatcaaggctggggcgggatcaaggccctctcggagatggatgagttcaaaaatctggacagtgacatcgaaggatctgccaagcgctggaaaaagctggtggagtcggaagcccccgagaaggagatcttccccaaggagtggaagaacaagacggccctgcagaagctgtgcatggtgcgctgcctgcggccagatcgcatgacctacgctatcaagaaaaaaactagggtttaccatagacaatggaaaactccataatgtgtccctggggcagggacaagaggtggtggctgagaacgccctggacgtggctgcagagaaaggacactgggtcattctgcagaatatccacctggtggcccggtggctgggaacactggacaagaagctggagcgctacagcacgggcagccatgaggactaccgggtgttcatcagcgcggagcctgcccccagccccgagacccacatcatcccccagggcattctggagaacgccatcaagatcaccaacgagccccccacgggcatgcacgccaacttgcacaaggccctggacctgttcacccaggacaccctggagatgtgcaccaaggagatggagttcaagtgcatgctcttcgccctgtgctacttccacgctgtggtggcagagaggcgcaagttcggcgcccagggctggaaccggtcgtaccccttcaacaacggggacctcaccatctccatcaacgtgctctacaactacctggaggccaaccccaaggtgccctgggacgatctccgctacctttttggtgaaatcatgtatggcggccacatcacagatgactgggaccgtcggctgtgcaggacctacctggctgaatacatccggacggagatgctggagggagacgtcctgctggcccccggctttcagatcccccccaacctggactacaagggttaccacgaatacatcgatgagaacctgccccctgagagtccctatctgtatggcctgcaccccaacgcagagattggctttctgacggtcacctcagagaagctgttccgcactgtcctggaaatgcagccaaaagagacggactcgggggcaggcacgggagtgtcccgcgaggagaaggtgaaggccgtgctggacgacatcctggagaagattccggagactttcaacatggctgagatcatggcaaaggcagcggaaaagaccccctacgtggtagtcgcctttcaagaatgtgaaagaatgaacatcctgaccaacgaaatgcgccgttcgctcaaggagctgaacctggggctgaagggagaactgaccatcacgaccgacgtggaagatctgtccacggctctcttctatgacaccgtgcctgatacgtgggtggcccgggcctacccctccatgatgggcctggcggcctggtacgcagacctgctgctccgcatcagggaactcgaggcctggacgacagactttgccctgcccaccaccgtgtggctggccggcttcttcaacccccagtcgttcctcacggccatcatgcagtccatggccaggaagaacgagtggcccctggacaagatgtgtctgtctgtcgaggtgaccaagaaaaaccgagaggacatgaccgctcctccgcgagagggctcctacgtgtacggactcttcatggaaggggctcgctgggacacccagactggagtcatcgctgaagcgcggctgaaagagctgaccccggccatgcctgtcatcttcatcaaggccattcctgtggaccgcatggagaccaagaacatctatgagtgtcccgtgtacaaaacacgcatccgcggccccacctatgtctggacctttaacttgaagaccaaagagaaggcagcgaagtggatcctggcagccgtggcgctgctcctacaggtttagctcgctcctgcctcacagcccacactccctggggctggaccacaactcagcccttcacctgtgcacctgtgacttattctttacaggaactggtggtggtttttcgttctcttaaataatcaggtgctttgtaaccaagcacatcggaaccagagggtggaggttggtgtggaagaggtggggcagattaaagccagtggagccactcannnnnnnna

SEQ ID NO: 242359 - DNA, 480 bp, Homo sapiens
accaactcttggccgctgtggtggccaaagagcgcccagatctggaacagctgaaggtaatggcctgaagtttggtcacacgggaggaggtgccgtcccacacagagggggccaggtcactgtgagggtccccgaccagggctgccagtccagtgtgtgtcgttgcttctctctgaaggtgcctcagtgtgtcccacggcatcacagcttctcatacgacaggatggctcatttccttccccagctgtcccctcttcctgctcccaaatttaattctaagtcacatgacctctttgcttaaagaacatgagtcacagcggtcctcgggggctctaagctccaaagcgctgccctgcaagaatggcctggctgccagcccttgcacctgccacatttctggctgttatagccacttgcatgggctcaggaggcccaggcccgcctgtccccgttctgccccctacagtctccgtgacagga

SEQ ID NO: 242360 - DNA, 528 bp, Homo sapiens
tgtgaggtctcctgttcgcccatgtatctgtttcctgttggggctatgactggtacagaagggtgcacgcccactttcaagtgttgacgcctccaagaaggaagggaggaagatgaggcaagggtgtgacaggtgtccctcggcacagggcacagcaggtgctctaaagacatttcatcatacaaagatgcatgctggtaaagacggatgattgtcttagaggtccaagcttttactgtaggcctttgtagaattctcttgagaagggacagtgttttgtggtagtaaagacgaatatgctgttaaaggaagaaaaaatgactcctctggcagatggtaatggcaggaatcgtcaacatctttaacccacagagggctgctgtcatcctgtcacacaggtactcggggagaagcagagagctagccacagccagggctctgcccattaaggaaaaatggcttcagcaaaaagggaaggagatgtggggtgcagttctctcctcccccagtccacagggatgacttgca

SEQ ID NO: 242361 - DNA, 402 bp, Homo sapiens
gcctgcctggccccatagattcatgagctagtcatgggacaagattgttaaccccagcacaaatgcaccctgccctataacagcatcctataaaaggtaacacattggctgggcacagtggcttacgcctgtaatccaagcactttggaaggccaaggcgggtagatggcttgagttcaggaatttaagaccagcctgagcaacatggcaaaatcccatctctactaaaacttaaaaaaaattgcttggcatgacgacatgtgcctatagtcccagctactcgggagggtaagataggagggtcacctgggcctgataggttgaggctacagtgagctgtgatcacaccactgcatccagcctgggcaacagagcaagccctgtctacaaacaaaaaaagaa

SEQ ID NO: 242362 - DNA, 456 bp, Homo sapiens
tgagggccaacgtatataatcagagagcctgacgtcaggttgatactgaaaatatgagaactaaatggcattactaccagtctttagtttagaagatatagcatgtttgatgccttgtaaagaaggtatccaaggccacatgatactttgtaacatctgatgggactgtggtcacatgggagaagggaagggggctcttgagcacgtgcctgtggcccactgaagacagcatagccagctggagattgggcccacccacccttttagggctgtccggggctgacagttggctacttgggggtcagcatagcactgatgccagaactcacttgcctgaggttggattatctggttatagacttgtctgggcagagattgacttttgggcattatgaaaagtcagacatcagggctttttggacaaattctgcctcttaggtatatgtttgagttaaa

SEQ ID NO: 242363 - DNA, 604 bp, Homo sapiens
gtagaccagatggacctaatagacatttatagaacatacattaatctcatctgcacgtggaacattctccaaaattgaccatatgcttggccattaaagcaagtctcaatacattccaaaatactgaaatcagatcaagtatctttttggagcacagtggaataaaattagaaatcaaataccaagagggactcttaaaactattcaagtagatggaaactaaacaacatgctcctgaatgaactttgggtaaacatgcaattaaggcggaaattgaaaacaattttgaaataaatgaaaatggagacacagcatactaaaacctctgggatacagcaaagacagtgctaagaggaaagtttatagcgttaaatgcccacattaaaaagataggaagatctcaagctaccaccatacatcaaggaactagaaaaataacaaaccacacaaaaagctagcagaagaaaagagcaaagatcagagcagacctaaatgagataaaaaaatgatacaaaggataagtgaaacaaaaagttggttctttgaaaggatacacaaaattgacagcctgctagctaagttaaccaagaaaaaaaaaagtttt

SEQ ID NO: 242364 - DNA, 363 bp, Homo sapiens
gatttctcttatttccttcatgggcacaactgttaatttccacaaagacctgcagcattttattagcagagacaaaagataacaacttgtgtaatctctcagatcaatttgtcctttgttgggtgtgtattaaaacgtaggcttgataaagtaggaaattggtgtctgctccaaatataaaaatatcacaggggatgatgggcacaaccacaatatccacatcccaactttacaccttaactcttcttgacatttaaaaaactttttagaggagaaaaagtttaagggaattcaccacagagtaacagataaagggactccacagaataacagtaaaagtctcatgaaatcttgtagtaaaaa

SEQ ID NO: 242365 - DNA, 562 bp, Homo sapiens
ccttgctcccaccagcccggcgtctgcccagtaagagaagcagaggggtcctgcccaccatccttttccttccccttcatctatattattaccatcctttggggacttggatctggtgttaggccatgcagttgggcagtgggaaactcctccatcctcagtcttgcttaaagctggcttgtcccctgactcctccttatattcatggccttgtttctgtaccttgagtattgggggtaggacatgggcataggagtaggctaacctccccgatacactcataccttcagccctatcctccctggcttaactattggatatagagtaaaataagtggctggctgacaaggattttcatttcctacctgagagaagaatctagctttttactagaggccatcagtttcttgaaaagcccatgtgctatgttgggagtaagagcgcaaaacttaggcttatacagattgtgtattgcacagcttccagggacaccattcacctcatagtcattgtgtggatagttactatgatagttttctaataaatgtcagtcatcttgagg

SEQ ID NO: 242366 - DNA, 429 bp, Homo sapiens
tgaatgtttaaacaatgttagacttcatccgtcccccatctccaaatggcagttaatagcaggggttataacccccactccctgaacaagtatcaataagccagatggattgcctatttgttcactgttttaagtaccgcagaatatgcacattcgaacacaaatgttgtgagacagtggaaagaacctttaagttgatgacaggaaacagcaaacaagtcattttacctctctgagtctattctgccactgtgaaactagcccatgggtattgatgttgtaagttgaaaagaattatttgggtcaggtgcagtgtgcagtggctcatgactgtaatccctgcactttgggaggctgaggtgggaggttcacttgaggccaggagttcaagaccagcctgggaacacaataagactccattgccaccaa

SEQ ID NO: 242367 - DNA, 455 bp, Homo sapiens
gtcaagaataaatgaatacaaatgtgagacaatattctgatagatacagtactttcacagagtcttgtgtctgagagtatggaaaggccaatgaggagacagtgagctatcaaacatctgtcataaatatatatctaagtaacttttaagttgcctgatacttgaatacatcaagggaaagatagcattttagggtcaattaaacaaaagtatgtgtactgtaatagtttgacacaaagaagaatggatagagaaagaaaaacagtcaaagtggtaagctttatcaaaatagagtttttgaccttgtacggataaagaaagagagtttagaaatatgaattggcttacccatgcaagttaaaaaaataaataaattaggcagagagagtggaagaggaaaaatgaatacagacatctgtaacttttgtacatgaaaagcagcatgtacaatgaaa

SEQ ID NO: 242368 - DNA, 686 bp, Homo sapiens
ggctagccagcccttaatgtgtgtgcagatgagatcttactcaaactcattcacacagaagtacaggcatgtgtcacctaacaaccaggatacgacagggatacttccaagagatgtgttgtcaggcaatttcatcattgtgcagacatcatagagagcacggacgtaaatctaagtggcagaacctacagcacacctaggctatgtgggagagcctgggctcctgggctacaaacctgtgcagcatgtagcaactgcgacaccgtggaattatgtgtgtagctaatcatagaaagggtacagtaaaaatacggtataaaagatgttttaaaatgacacaggtgtatagagcacttcccgtgaatggagcttgcgggactggagtcgctgtgggagagtcagtgtgtggtgagtgtgagggcccagggcattactgtccactcgtatgtgactggcagtgtaataggtgtgttcacaccagcgtcaccacaaacgagtgataacgtgttgcactgtgacattacacgccgcaacctcactaggcaacgggaattttcagctgctttgtagtcttatgggaccaccgctggatatacagcctgtcattgacaaacttcgttatacaatgcatgactgtattctaaaataaatcactcaggccatagcaccactctcctccaatctgc

SEQ ID NO: 242369 - DNA, 268 bp, Homo sapiens
cagtactttcaatttcctgtggaaagctactttgtacctactttactgccatgctgtcatatttggggggattagtattcagcagatttacctggctacaataattagtagagggatggacacatcagccattgaaccactggggcatttgctaggatttctaggggaaaagactccatcttaaacttggttgaagtagacagtagctcttacaaccaacttgcccttcattgagcctgagataaagacaacattctaagagcaagtg

SEQ ID NO: 242370 - DNA, 441 bp, Homo sapiens
ctccggtgtcactattcactggaacagtgaacagtgcatgtgcatatgcctaaagccaggactggccagctgcatatgagttttactataaaagaaactgatttattgctgggtacagtggctcatgcctataatcccagcactttgggaggccgaggggcagcggggggaggtgggggggtggatcatgaggtcaggagttcgaaaccagcctgacccaacatggtgaaacccccctctactaaaaatacaaaaattagccgccagccatggtggcgagcacctgtaatcccagctacttgggaggctgaggcaggagaattgcttgaacctgggaggcggaggctgtggtgagccgagattgcactgctgcactccagcctgggtggcacagcgagacacagtctcaaaacaacaacaacaagaagaacaaaacacatt

SEQ ID NO: 242371 - DNA, 554 bp, Homo sapiens
aataattcaaccagaaaattgatatgagcaaacatgtcactgaagaggatgtacagatggcaaaaatgcatgtaaaaagatttcaacttcataaaccgttagggaaatgtgaattaagcaaccaatcagaatggttaaaatgtttaaaaaatagtaacaccaccaaatattggcaaggatataaaggaatcgaatcactcatgcattgctagtaaaaaatgtaaagaggtacagccacactgggaaaccttttcatggttttctaaaaactaagcatggagttaccatacatcccagcagttctactcatcagcatttatcccagagaaataaaaatttatgtttacactaaaacctatatatgaatgttcataatagcatttttcatagtagccaaaaattggaaccgtctcaggtgtcctaccatgggtgaatggttaaacaaactatggtgcatctatatctaccatgaagtagaactcagcaataaaaaggaatgaactattcatacaccttataacttggatgcatctccaggtaattgtgctgagtga

SEQ ID NO: 242372 - DNA, 786 bp, Homo sapiens
ctcaccttcaagttatttccctcctctagaatgctgtacttccaccactgccaaatcgtgaactttctctccttcaatatcccactgagaactcacccccaggatgggactctgctcaccccgtcctctactcaagcagaagcctctcagcgatcatagggcaaggcctgaacacaagcttctgttggtgtaaagtggaggcacaggctgcaggactgtctcagaagggaaataatatttaccttccaaactgagatctaaaacccgaacaaagcctcaggaaacatactccaccaccatcttacaagtttgtgctacgggtggagggaaaatgaatctaatgtaggaggcctcccgctgtgcgtctagcaggaaagaccatacggtgcaagtctccaggatcactagaggggtggattgttcatttcagtccaggtagcaacaggaagcccgtgcaaatgttcctctctcactgcggggctaaggagtgtgggtcctttcccgcgactacctgcttgcctctctcagaacctgcaagtgaagtgcggaagatctgtctatcttctcggcggcgcagagcccaaggtagaaaccgatggaggcggtgcactagataacatcaaagccccgggcaggggccagaaaggggggcacaggcagcccggggaatgaagcgcctccctctagcatttcctctcacgcccacttccaacctaggaggcttttggtttctgcttttttgtttttaaaattaaaagttaaacccaggaagctttggatcagact

SEQ ID NO: 242373 - DNA, 368 bp, Homo sapiens
cggcacgaggcttagtgtttcctgacttattacacatcagagaaggtgtggggtgggtgggtcttatctgaggatgtcaggggcgcagtggtgaggaaacagccaaatcctgcaagctgtcaggggctgtttcctggcatctgtaaggtatccagatgtgggggcaccctgcgttccccggcagctcatggcccctcatgcagcctcccccacccctcactgtcaccagttccgagagcttccattccacggctagaattgcatggcttgagttggttgaaacagtacacatacctgcaggcagaaggatttcacttttttgtttgtttgcttgttttttgagacagagtgagactccatctcacagg

SEQ ID NO: 242374 - DNA, 465 bp, Homo sapiens
ggggcaaaggaagctgcccatgccatgaataaatgctatcaaacacaatggcaatttacctcactgctttagcagttatcctcactggcttcctaccacttagaaagtccaaactgcttaacttgccatgtgaaaccctgtacagtcttatgctatcatttttccacttttccactcacacactcaatacttaagctacacaatttcacatgtacttatgtgcatctcaccatttctcacccatttatcttggcttcttatgttccctctgcctagaatgtcctttttaaaattcatttaatacgtttattgagtggctacagggtgccagccatcattctggacaatgaggatacagcaggaaggaggggaaacaaacaagggattccctgacttcactgagtgtaactgcctttatacccctttattaacagcagacattaaatacatgatttcagtaaaaca

SEQ ID NO: 242375 - DNA, 1005 bp, Homo sapiens
aagactctaggggttcacctgtaagagtcaagggttcccgtattccaaactaaggcaatggccaggtcagatcccaaacccttggcctcacccacacaccttctggtcttaccaacacttactgaggagagagtttccccttcctgaccggggatacacttcctttcaggtgttcttagtgcttcatttccagctttctcagcaaaaggcccttcacgccttccctctgcttttatctgaacctcctgaatctcccaactcaccttttctccttaatcaagaagcagcatatactaacctacctgtcccactttgcagaattactttataatgtacacgaagaaagtttggcaaggcagctagaaaatttaaaagcacaatgttgtaaagtaaagctacattctccaggtctcttagcataaaagcagaactattgtgcttcatatttggtaactccaggtcagcactctaaatacgtcatgccgccagaacattatttcataggttattgttttatacccccaaatggataccagattcattccagttctaccaagaaaacatgactgagatgccttggatctgtattgcttttcccttccttttgcaatatccacttgttcatttgttcattcaacaaacaccagagtagagatagtggtgaacaaccaccattgctgcatcacggagtttaagttctcatcttacactcaattgccagggccgtggtccctttacaaagtagacaactccagaactggggcttgggaagacatctttgaggtcagccagtcaaaccttttgtgttacagatttaaactgatgctgagaaagatgactggcttcttcccccaactagtaagttactgtggggagagtgcagagcacaggccccttccacctcttgtgtgctcttcaggagcccatctgtctcagccagaagacagaaacagagggaggccctgagaagtgacaaggacattggttggggtgggcaaaacactg

SEQ ID NO: 242376 - DNA, 415 bp, Homo sapiens
ctcccggcgcgcagggtgtggtccccgagaataagatgagcagaattaaagcagatcctgcacccactctgctgaaatccggcttctgaggcagcctcgcccagggctgggtgggctcaggcggctgctactcggttcaggggaggttacgcacggtggctgccgcgcgcaggggaggcttcgcttccgtactccttgggccgggagatccgatctttgttccctcaagactcacactctccaaccggtcattatcctcccacaaagatttatttctagaaaaaattggcaagtgccacagttcccgccccttcagctgaacgactgtgacagctccgtgtttcaagttgaatgcaggcgttatgtgccagagtcaatcattcaacaaataaagttcttaaaataacagctacca

SEQ ID NO: 242377 - DNA, 475 bp, Homo sapiens
tttttttttttcctgttttccatttgcttggtagatttttcaccatcccttcattttgagcctatgggtgtcattgcatgtgagatgggtttcttgaagacagcatactattgggtcttgctctttatcaagctggccactctgtgccttttaattgggtcatttagtccatttacatttaaggttagtattgatatgtgtggatttgatcctgtcattgtgttattagctgtctttgaaaaggtggacatttgctcatttatagttttccgggatttcttttgtcctcctttgtttgaaatctctgtcaatcataagtcctttccaattgagaacaatgttgcttcagagagaagatgggaacataataggagataagtagctttgctttctttttgccatgtattaataccaaatttttcttgcctaaaccaagagtccatctcttcacatcttgaatatagctaaaaatggc

SEQ ID NO: 242378 - DNA, 430 bp, Homo sapiens
atttattggctctcttatccttttctctgtctcttgacttttttttctattttatacatctttatttctctgttgggcaatttcttctcattaggtcaagtttttaaattctatcttcaatcatatctctcctattatttaacctgtgttgagtttttaattataacaattatattttaacttttagaattttgattttattctgtataaaacatctatccctttgtcatgctgtcctattcttatagtttctattttttcctttatccatctgaacattttaaatatacacgcttatctcaaactctctcttaaatgatcttattactttagggtgaaaagtcttccattccacaacttaaataatagaaattatgtatacatccacatatatgaaggggaaaaataatttttaaaaatcatggtgaat

SEQ ID NO: 242379 - DNA, 744 bp, Homo sapiens
tgtttcggtgtggtgagtgaaatggagaaggctaaactttttcttcccacatgctcacttccttgcttgttcgctagctgctgcatctggcccctcaagggtaaagtcaaggggaaaaggagattgagaggaaggacagtctgtgaattgtgcgagggatatttctgctgacaattcaacattcaaagggatgagtgtatgacgtctctaagagatgtcatggagtgcatgtagaagggactttttatggagaactacttctcaaatcactattcacatcctggtagaagtcaagcaatgaagatggcacagaaacacatcccaaatactatgataccataaagtatactgtagcaatgcattggcacaccctcatttgaacatttgtctcagaagattttgacagaagataaaattgtctggtttttatttcattggtttcatgaaaatttatttcactggtttcatgtcacaggcccatgactgtataaagagtcataatctttacaaacacaacaatgactcacagcgacatgttgcaaagctgtaatcgaaaacactgatgttgatttcagaggccattaatggtgttaagaaggcgcttttgttaaccaaataattgaatactcgtaattacttttcagttctagttcagttcttgacaccaaaacaagccattttctttacatagtgaatgcagaacttgccagtaagaactttcatactaaacttctatgtaaaaca

SEQ ID NO: 242380 - DNA, 835 bp, Homo sapiens
tgtttcggtgtggtgagtgaaatggagaaggctaaactttttcttcccacatgctcacttccttgcttgttcgctagctgctgcatctggcccctcaagggtaaagtcaaggggaaaaggagattgagaggaaggacagtctgtgaattgggtctcaccgtgtttcccaggctgaagtacagtgttgtgatatcagttcattgcaacttctgtcttctgagctcaagcaatcctcttgcctcagcctctcaagtagctgggactgactacaggcatgaaccaccacacctggctaattttttttgtatttttgtcgaaaagacagtttcgccatgttgtacagaactacttctcaaatcactattcacatcctggtagaagtcaagcaatgaagatggcacagaaacacatcccaaatactatgataccataaagtatactgtagcaatgcattggcacaccctcatttgaacatttgtctcagaagattttgacagaagataaaattgtctggtttttatttcattggtttcatgaaaatttatttcactggtttcatgtcacaggcccatgactgtataaagagtcataatctttacaaacacaacaatgactcacagcgacatgttgcaaagctgtaatcgaaaacactgatgttgatttcagaggccattaatggtgttaagaaggcgcttttgttaaccaaataattgaatactcgtaattacttttcagttctagttcagttcttgacaccaaaacaagccattttctttacatagtgaatgcagaacttgccagtaagaactttcatactaaacttctatgtaaaaca

SEQ ID NO: 242381 - DNA, 1333 bp, Homo sapiens
tctctgcagctgctactactctgtcatcctaagagaagaatctctgaaattttgacagcatgtggaaatattcccactgattattggattatgaagatggagaagagtattttaaaggagttttgtaggagctgcaggagaggattcaggtatatttatattcatagtatatgtgtaatgctttgttcctgctccttcattacttctattaagaagagacaaggagagagacatggaaatgactaaggcaccaaaggaaaggcattttttacatttcaaagtcacaggtaaaaaacatttatcattttcatgtggaaacattcttccaagctgtaactaataatggtctctcctactatttcctcccacttctgcagctgctatttctaaaggggaacatctttttaaagcctttgttgtattaattaagaatccagggccaagcccgtggctcatgcccataatcccagcactttgtgaggccaaggcaggtagatcacctgaggtcgggagttcgagaccagcctgaccaacatggagaaaccccgtatctattaaaaatacaaaattagccaggcatagtggcatatgcctgtaatcgcagctattcaggaggccgaggcaggagaatcgcttgaatatgggaggtggaggctgtggtgagccgggattcgtgccattgcactccagcctgggtgacaagagcgaaactctgtcaccaaaaaaaaaaaaaaattcagtggctggcatagagtcaagaaactctatgaacagaagataactgacttagcagcagcagagtaagcctccaaaaagaagcaagatctttgaaagtggctgggagagctcccaactgaataggcttcagcctcccactgtcagtacttaaggttcaaatgcctcaggctgcgggaggggacggggtggagactggccatgtcggaggtgacctggagtctgctgcagctctggggcgccagttttaggagaggcgccaacttcgacttttggggccagccggtggaggcgatagatgagtatcagatattagcaagacatctacaaaaagaggcccaagctcaacacaataattctgaattcacagaagaacaaaagaaaaccataggcaaaattgcaacatgcttagaattgtgaagtgcagctttacagtccacacagtctcaagaagaatttaaactggaggacctgaagaagctagaaccaatcctaaagaatattcttacatataataaagaattcccatttgatattcagcctgtcccattaagaagaattttggcacctggtaaagaagagaatttggaatttgaag

SEQ ID NO: 242382 - DNA, 1387 bp, Homo sapiens
tctctgcagctgctactactctgtcatcctaagagaagaatctctgaaattttgacagcatgtggaaatattcccactgattattggattatgaagatggagaagagtattttaaaggagttttgtaggagctgcaggagaggattcaggtatatttatattcatagtatatgtgtaatgctttgttcctgctccttcattacttctattaagaagagacaaggagagagacatggaaatgactaaggcaccaaaggaaaggcattttttacatttcaaagtcacaggtaaaaaacatttatcattttcatgtggaaacattcttccaagctgtaactaataatggtctctcctactatttcctcccacttctgcagctgctaaaacacctttgccaccagctccgacaatcaaaccatgcctttggatttcttcagtttctaaaggggaacatctttttaaagcctttgttgtattaattaagaatccagggccaagcccgtggctcatgcccataatcccagcactttgtgaggccaaggcaggtagatcacctgaggtcgggagttcgagaccagcctgaccaacatggagaaaccccgtatctattaaaaatacaaaattagccaggcatagtggcatatgcctgtaatcgcagctattcaggaggccgaggcaggagaatcgcttgaatatgggaggtggaggctgtggtgagccgggattcgtgccattgcactccagcctgggtgacaagagcgaaactctgtcaccaaaaaaaaaaaaaaattcagtggctggcatagagtcaagaaactctatgaacagaagataactgacttagcagcagcagagtaagcctccaaaaagaagcaagatctttgaaagtggctgggagagctcccaactgaataggcttcagcctcccactgtcagtacttaaggttcaaatgcctcaggctgcgggaggggacggggtggagactggccatgtcggaggtgacctggagtctgctgcagctctggggcgccagttttaggagaggcgccaacttcgacttttggggccagccggtggaggcgatagatgagtatcagatattagcaagacatctacaaaaagaggcccaagctcaacacaataattctgaattcacagaagaacaaaagaaaaccataggcaaaattgcaacatgcttagaattgtgaagtgcagctttacagtccacacagtctcaagaagaatttaaactggaggacctgaagaagctagaaccaatcctaaagaatattcttacatataataaagaattcccatttgatattcagcctgtcccattaagaagaattttggcacctggtaaagaagagaatttggaatttgaag

SEQ ID NO: 242383 - DNA, 428 bp, Homo sapiens
tttttactcaagctggggcctatgtttggtattgaacaaaatggaatgctgcaattttctctctactgattttgttactacagaaagcttaatgtaaaggtggctgatactgctgtttccttagacactgacaccaaatacaataaagaagtctctcaagaggaaaacatggtgtgtttacaggagcaactaacagttggtttgtaggcatcctaaatggtggatggcaagcttgggtttcccaaaggtttctagtctttatacgtcttctagtaggtgcccaggttagtatggcctgtgttaccagagtaacaatgaaaatggctacgtctttaaatcaggccactttacagtgaactatggtccttaattgctatcacatttcaaacaagaactatgaccaattaaactttactattgttgaactg

SEQ ID NO: 242384 - DNA, 239 bp, Homo sapiens
gcaattaaaaatggaatcagtagggtggatcattcacgcattcagaagaagcatcttcatgtcaagaaagctgcccttaggacctcaccaagtcaccaccctcaactggaagttgagaattctaaaattccctttcagctcaaaatcttcttctgtctttctacttgttccactcagtgtgctcctttactcagaatatcttttctctactagtctgtttaactcatggccaggtacta

SEQ ID NO: 242385 - DNA, 471 bp, Homo sapiens
ttgatcttcgtatttctctatttgataatgcctgtggtctgagttcagttagatcagtgtttctaaaactttaatgtgcaacagaatcatctggaaggcttgttaaatacagattgttgggcccgtggaccaaaccccaatgtgtttttcagcgagtctgaggtgggtggagctgacactttgcatttctgacgactttccaggtgctggtaaaactgatgttgctgatatgtggatcacactttgaggaacactaaattagatgcttaagcatgaaaggctaagatatgtctaaagactttggtccagttcacagccaaaggttttactttcctttgctacatgtctgccttcatttcaaaaattattggtagaaagtaccctcataaagttctctggttcccctggactatcctgccttctaatacactgaggaatcccagaggaggggcacgatgtagccacattcat

SEQ ID NO: 242386 - DNA, 508 bp, Homo sapiens
agggtttaagtgacatctgaagaaaggctgctatgtgaaagagcaacgtccacatggacgactgggaaagcatggttcccaaagcagcggaattcaggaggagatgaaaatgtaaacagaaaattgacctcccacccattggtatcctcagaaaggcccaagaaagcattgcatccataaaacaagaacaggatgctatgaaataagaatatttggagaacaaaaaagagctttagattaaaaatatgatagttgaaataaaaagttcattaaagggatacatgacatttcatgaaaagaagaagaaagcaaagactggaacatctgaaaggaaagctgagaaagatgcaatacaaaggcaggtgatggagtatttgactaatggaagtttcagaaactgaaacagaaaacagacgggagaaggttatacaagaacaatacaagaaaattgcctggatcaggacaaaaatcttcacattaaaacatccctcagtgtgcccagcacttt

SEQ ID NO: 242387 - DNA, 521 bp, Homo sapiens
agtgaaaccatcattacaatccagattgagaaatttgccatgccagccaggccttgaactctccaccggtcggtaactttgtttccttaatctttgggtcctcctagctgattgaagggcctcaaatcacaaagtaaagggataaaacaattatggtgtagccatacaatggaacactgcttagtaatacaaagacacaagccattgacacacaagcagatgaacccaagataattatgatgaaggaaagaagctggacaaaaaacagtacatactgtgtgattccactgatacaaaactctggaaaatgcagactaatctgtgtggcaggaagcagatcagtggttgggggcaggagtcattactgagggcaggagggagtactggacgcgttcactttgtggattgtgatgatgatttcactggctataacgtgtcaagacttcaatttgtacactatatatgtgcagttattgtatgttaatcacattttaataaagctgttaaaatattgacctgaa

SEQ ID NO: 242388 - DNA, 744 bp, Homo sapiens
ctggtcttgaactcatgggttcaagtgatcctcccatctcagcctcccaaagtggtgggattatagacatgagctaccatgcctggcctctccatgtattactattttctagctatcagttttaattttctaaagacttcatttcattattagacacagttacttcaacattaggaaagtgtcttgcagtttttaaaaaaatcagacataaaatccgggttagcaagagaattatagacttgcttgtataaaatacattaagtttcttaaccagaacttatactttaagcaaagcccttgtatacgtcccattgttcagctggaagagtatctgttcttttatcttagatatctgtgtgtttttatttaggagaggttgtaaggagtgaacactccttgcttttacaggttacatcctgttataaggaactctgcagggtatctacattgtagagtaattttattttagtgactacattgttaaaagtcacattcccaagcgttaggagttacaggaattggaagcagaacagatccaggctgggtgtggtggctcacgcctgtaatcccagcactttgggaggccgaagtgggagggtaacttgagcccaggtgtttgagatcagcctgggcaatttagtgagaccttgtttccacaaaaaaaattcgtggaaggatcacttgagcctgggaggcggaggttgcagtgagccaggttcatgccacctcactccagcctgggca

SEQ ID NO: 242389 - DNA, 738 bp, Homo sapiens
ttttaatatgattacattgaatctatagatcagttttggggagaattgccatcaacaatattgaatcatccaatcaaagaacatggtatatcttcctgcgtatttggtctttaaatttttctcagctctggtttgagtgtcttttgttaggtttgttcacaggcattgcatattttggggcgtctctttccgcctgagctggcttggtgcacctcccacacctgtttctgtgctgatgggcgttggtgaatcctcctgcgagtctcctctgccctggagtgaactggagcttctcctgcacgccctcagggcttctaggcttctcgtatcctgtccgtggcctgtgtcctcctggctgtcctctccccactgccttcggccatctctcccatctctctggcgcccccattctgtggcctctcccagctgctgtctgcccactaggtgctccccttgttttctggggaggtcttgggtgtccttcactgacaggtgggcccctccagccaggggatgccagtgcacacgagagcaggtccaggtcatccccaattctcccgcctatttacatcttggctagcagcttcagtaatttttggtgggtgcaacattaaaaaaaaaaaaaaaagaagtggaaaggtaaccaaagataagacaaagaatgggagaaaataaatagaaatcgtgtactcaataagggcctggtatccagagtagttaaagaatccttacaactca

SEQ ID NO: 242390 - DNA, 406 bp, Homo sapiens
ctccgccaactgcgtccctgggttaagtgtttgacctcaccttcttaggatggcctgtttccctcatcagaccatcagcatcatctccatcttgtacagtgtccacccagttaccgtgcttggagcatgtgggaggccttcctcctggacattttagggatcttagccctggcagtcagatgtcagtttcagcagttcgaaagcttttctgaatccttgagtcttcttgcaaataagacctggctgacttttcctgcctctgggacaagtgaagcccatcagcttttgcagtgtatattcagtttaaaacttggtattggcacccactcatagagcaaataattcttgcaggtgatgctaatgggggaaaagatctgaagaagaaggggtgtgttcatagcatttc

SEQ ID NO: 242391 - DNA, 308 bp, Homo sapiens
taatgtttttaccaaatcaagcagtttttattattcctggagccatctttagctttctgacaataatgagttcacttagaatctggggctatgtaaattacatttcactagtggctgttccttgtaacagacaacacttgaatccaagcaggtggaactagggctcatatataaatgaaggagcatgaattatacactccacttggaaaacagagggcacttcgtgttagtctccattcagagtatcctttttctgccttttgccaaccagtgaaccatgagaacgtctcaaagggctggggttgctc

SEQ ID NO: 242392 - DNA, 633 bp, Homo sapiens
cagtttattagtttttctatttttaaaaataaaccacagacaaattacaacacagaacatcatatcaaccctgacttaaggaaaaacataaacttagatttagagattggaaagtagagggagaaatggagggaagcgtaagagtgctaatgtttttatttaaaaaaaaaaatagcaggggagctccaagaaatagtcttctgtttaaaagaacaagaaatggaagtttaagtagatttttctgaggttggagaaatgattacttaaggaattgaaaaaagtgacaagacaatatgggtagaaacacaaggagggaataatgtgtgggagtaaatcctcgttgtagccagaaatcaatagataccgtctacatttcatagtggcataagcatatggtttttagaaataaaaaggtgacataccagaaaaaccaaaagtcagacagttaactaaagaggcatttggagagcaagactaagggtacggaggggtggaaaaggggactgtccttttcatgaagtggtcttccaaactcaaatatttaactgtaacatttcattattaagtcattcacatatattttttcaaaaaattttaaatattgagaaatatcatatacatgagagaacaaag

SEQ ID NO: 242393 - DNA, 480 bp, Homo sapiens
aagacagtgcttcaggatgcagaataaaggctggagggcagtggtgcagtcatgtaaccttaaaaccctgaggtgggcagattgcctgagctcaggagttagagaccagcctgggcagcatggtgaaaccccgtctctactaaaaatacaaaaaaaaaattagccggtgcgtgattgagcgcccttgtaatcccagctactggggaggctgaggcatgagaattgcttgaacctgggaaggaaaagattgcagtgagctgagatagtgccacttctctccagcctgggcaacagagcaagactgtctcctacccccgcccccaccaaaacaaaagaaaagaaaacaaaactttttgggccaggagccagtggctcttgcctgcaatcccagcactttgggaggccaaggtaggaggatggcttaagtttgagatcacctgaggcaacatagtgaaaccctgtatctagaataaattagag

SEQ ID NO: 242394 - DNA, 360 bp, Homo sapiens
tctgttcccctcactcccttcattgtgtttacccaaatttgtgagtatatatttttcctgtgataattttttaagaagtctgtctcagctgggtgcggtgtctcacgcctgtaatcccagcactttgggaggctgaggcgggcggatcacctcaggccaggagtttgagaccaacgtggtgaaactccttctctaaaaatacaaaaaaattagcctggcttgtggacaggcatctgtaatcccagctactcgggaggctgaggcaggagaattgcttgaacctgggaggcagaggctgcagtgagttgagattgcgccactgcactccagcctgggcaataaaagcaaaacttcatctca

SEQ ID NO: 242395 - DNA, 492 bp, Homo sapiens
ctaatttggttctcaaaagactgataggaaatagtggtcaggagtacttcagtcattggaagagatatttcataatctaaagtttctggtgttctcctgtaaatgttatcatcagattgtccctgaggactaaatagtttctgggagtaacttatagaaatgaattcagccatggccaagaggtcagagtcaaaaatagtctagagcagtagtcaccatagaactttctggggtcatggaaatgttctgaatctgtgcggcccaattcagtagcactagccctgtgtggctactgtgcacttgaaatacggctagggcagctgaggaagataatttccaattttattttactttaattgactcatgtttaagtatgtggctagtggctaccatattggaaagcataggtctagctagagggtactcgctcccatggacagggcacttcttagataagggataattgtgaggtagcactaagcaaaaaaaaaa

SEQ ID NO: 242396 - DNA, 567 bp, Homo sapiens
gttgtgcacatgtaccgtaaaacttaaaatatagtaaaaagaaaaaaaaaaagaatggaatgcctgattctgcatccctctagatgggatcaacaggatcaaaacatgaccttgatggccaagccaagttctctttttcccaaagggtttaaatctgccctatttaatatggtagccgtagccatatgtatttatattaaattcaaattaatcaaaatttaaaaattagttacttagtcacactagctacattttacatgctcagtagccacataaagccagtggctgctgtattgaacagtgctgattatggaatatttccatcactgcaaaaggttctgttggacagcagtaatccagatctcctttgtagaagaattggcacctggggctgcctgatcttcaaggggcacatcacagagcatggtgttgacccatctggataccatgtttgaagttgacatggcccagaaatttgacttccaccagttaaaaatgtacttcgacagttttgtatttaacctgtaaatccagaagcatgtcagggccttctggatggagcactgt

SEQ ID NO: 242397 - DNA, 480 bp, Homo sapiens
ggatattgttgtgaattccatattcctaaaatataagttggccgtccattgtggtccacctattaaaataaattaattaattaataaatagtactggtgcataagatccaaaacattgtggccgataatgtgaagaataaatgcgagttttctccattatgaggttacattgcacaatgcaactctgaacaaaaggtattccgaaataaaatcctatatctaaggtaatgtatgatgaagaaacaacacggaagccttaaaggatttgcccaagtttgcacgatttggcaaaggcattgctggctccagaacactggcttcagcttatttcttttttttttctattgcataataaaagcaatgttttccatcgtgtaaatggtggaacataattcctctggatattattatttaaaaaataaattgtaaaacatgccaaataagttcatgaaaagactacagtaaaaattaaaaaggaaa

SEQ ID NO: 242398 - DNA, 248 bp, Homo sapiens
gtcagtcatttcaggagaggggccaccttgtctgtaagacctgactcctgagtgatgatctgaattctcacccagaggctttctcaggccaaaggtatcatcagtcttcctcattcttgaggctggagcatctgagtaatacctattagtaccatagactgagctgtctcctagttaaaggagacaggaagacctacaggttgtttttcattagtgccatctaaagaggctggtaactgatggctggg

SEQ ID NO: 242399 - DNA, 294 bp, Homo sapiens
ccaggactcagacagtgccagaggaagcaggcctcccatggagcatctccccaggtaagacctagaacacggaggggcagaggagaacctgtgcacacgctgtgcctccacattgcttccccatgacacctccccggacagttccccttgatgtctaaaacctagcgactccccactctgttctctcatagcccctgttttgacctggtatccgcgttccatgctgtgtcacaatatgaccacacacttaacgacttaaaacaaaactgattgtctcacagtctctgtgtaatt

SEQ ID NO: 242400 - DNA, 413 bp, Homo sapiens
gcaggacacattccagcttctccagaagccttttcacttgctgctcgttgtgtcaccagcgtcaggtggtccttgccccaagctggtgcatgagattcttttccagggacttcagggaacctgtgctccaatgcctcaggagaggagagagtctggacagagcccaagatgaacgtcaccctgccagtccttgtgtctggagcatttgctctgctcagggtgggatgctggcacggaaggggacacagcagaggacgtagagaagggctacaggggctgaagactgagctctgtagtaggaggtgggaggccagagtactcctgacaccagcttgctgttctggtgccagctcgctatgcagacttaatttcattaactctctgagcctcagatgcctcacctgtaatgtgca

SEQ ID NO: 242401 - DNA, 570 bp, Homo sapiens
agatggaatctccctctgtcgcccaagctgaagggcaatggcatgatctcagctcactgcaacctccgcctccctgattcaagcaattctcctgcctcagcctcctgagtagctgagattacaggcacgcgccaccacgcctggctaatttttgtatttttagtagagatggggtttcaccattttggtcaggctggtctcgaactcctgacatggtgatccacccacctgggcctcccaaagtgttgggattacaggtgtgagccaccatgcccggcctggaagaataatcacttttctatctattacatttccagttaacaaggtttatgaaaaacttggctaagttaaaatgtcagaagaaataaaagtgttctgtcaaatgttttttctttcctttttattgtttcattttttgatgttcagttactttatttcctctgagctatctttttatgactccttataattttaagctaaaatgcaatacttttttgtcaattacatcatcccctttccatgtactatggttttgtgaagaaatgggtaaagtacacgttagttaactga

SEQ ID NO: 242402 - DNA, 473 bp, Homo sapiens
cttttcaccttccaccatgtgaggacacaggattcctcccctctggaggatgcggccctcaccagacaactgaacctactggcaccttgatcttgaacattccagcttccagaaatatgagaaataaatttctgttcataaattacagtgtcaggtattttgttataacaccacagaacagactaagacatataaatatcatggtttaaccccagttaacatcaccacaaaaaacaataccctttatcacttctactgaaaatactcattttataataatttaagcaattacttcttcagtttcaaataatgacacaaaatgtttataaacaaaagccctctcagtaacagtggctacctacagagaagaggctaggactggctgggaagagacttgaaggtactggaaatgtcctacattttcatctgggtagcagccacatggatatttagggaaaaaactcaccaaactg

SEQ ID NO: 242403 - DNA, 501 bp, Homo sapiens
aaacttgaactttaaatctctgataacctagttggagagaatagtttgtttccctaaagagtgtagagtgttctgcttcccctctgttggttggaatattcactagtggctaatcatctatttccattaaaaattaaaattcagtgaaaggagaaatcagaagtgttccagtaaccttataatcctagttatattatttggagaaatattttctcatacacctaaaggaaatttcaacaatgtcgcttattgtttctcttaactctgaagagttgtcaataacttttgttacttgaaaagagatttcaagtaaataatgaaagtaaatcagagttgaacattaaatagataattttcaatgtttgagaagtgtatataggatgcttcctttttaaagttattcaacaatttgtttactaaagttatctgagaacatttttgaacctgttctagagatcattataatattttctgcttttaaggaaaagttatacattactt

SEQ ID NO: 242404 - DNA, 400 bp, Homo sapiens
aggctccaggcttgtcccctaatccgttcttcacccagcaaccagggatcttttcaaattgcaaattagactgtgtcactcgccttcctaaaacctttcagtcacttaacaattgcactcagcctctgtacttccatttacaagacccttcatgagctggcccttcactcaccatgcacccctcctgctcctgccattctgaatgactttcgatttctagtatcactcaagttctctcacctctgagcctttgcacgtgttattccttctgcctggaacactgtctccctatttccccttttaccttgctgtctcctcataatctaggtctcagtttagagatcatctcttctagagaaacctcccctaatcccccaagtctgggctttacacacccctc

SEQ ID NO: 242405 - DNA, 373 bp, Homo sapiens
gaggtctccagctttccaactccaaatccagtcatggctaaaatagaagtgtttttcccccctaagaagtcgtatctctaataaggccagactcagtggctaacacctgtaatctcagcactttgggaggccaaggagggcagatcacccgaggtcaggagtttgagaccagcctggccaacatggtgaaatcccatctctaataaaaatacaaaaattagccaggcgtggtggtggacacctgtagtcccagatactcaggaggctgaggcaggagaatcacttgaacccgggaggtgaagtttgcagagagccgagatcatgctactgcactctaccctgggcaacagagcaaaactccatctcaaaaaaa

SEQ ID NO: 242406 - DNA, 530 bp, Homo sapiens
tgtagtcagtttgtacagattattatagcataataatcttaatatatgcttggggtaggttccattctccttactcttttcttctgaagtatcttggctattcttggccctttactctctatagattttagattcaatttagtagttccgtgtgttggggggcactatttgggatttcaaagagcatttcacagaatctgtagatacatttgggggagaattgccatcctcatgatattaatgtaacttaaaaaatggttatcctggccagatatggtagctcagccctgtagcatctgcacttcaggaggctgaagcaggattgcttacaatcaggagttcaagaccagcctgggcaacgtcgcaagaccctgtacacacacacacacgcacacacgcctgtagtctcagctacttgggaggctgaagtggtaggattgcttgagcccaggaattggaggctgcagtgagttcgtgccacatggcaacccagcctgggcgacagtgcaagatgctatctccaaaaaaaa

SEQ ID NO: 242407 - DNA, 663 bp, Homo sapiens
cacccagaagaatcctgtatttaattggctcatatggaaaattttagaaagagagagacatcggggctcagactatcttccgatcaggaaccaaaacgagctgggaggtaacagagttctttttcatagtaattgtgttccatatcatggtgaaatcgtgccagaacaagcttcagactctttctggtcttactccttctgaccgtgctgttccaaagaacttcccatacaggaaataacaatgatggcagtagctgtcaaattctaaagacggggatagactctggacctcctcaggcccctgagcccactgtagagcagggacgtgacttaactgaagttcaggactgcggccacagtcacatccacctgtgagcaatggaggactttcaacacagaaccctctgcatcccctgcattctgttactaagcagctcatagaacacgaagaggtattaaccttgttatttgcagagttacaaaaagctgagtcaggtattccaaagcaaacccagaccagaagccacctgagagttcgtgccggcaaggacagattcagaatgtacaaaaacgatgaaaataatattctgtgatcaccctataacctacttccttactgaccaaacacatgtctcattcccattaaaaagttatgctcagcca

SEQ ID NO: 242408 - DNA, 564 bp, Homo sapiens
ataaatatatcagtaatcaccagcagaaagatagaattagaggtgagtggagatcttgtttttcaaaaatatgtattccagtgcatattgtgaaagacctatttattctgtttcaggagaaataactttttgctaggaataactttgcaagttgcaaaagcataaagcaaatatatatttttaatgaaacattagtgtaatagctattgggcagcttatccagtaattatgacaatatagatattccctcacatgtaattcttttggagggagggcatctgcattattcagaaaatgttcgcatttttatattttgctcttctgttgattatttgagtatattcatcctttcattgtgtttccatttcggacaatctgcttgagttgaaggaatttactttattacagagatatctgtcacacaggataagtacatgctggagggagatatccttttatataagattacttatttgattgagttcaactgttgaatttgcatctgtgttctgaattcagtataaaatccacttcattacaaataaagacaaacattattatatg

SEQ ID NO: 242409 - DNA, 1016 bp, Homo sapiens
ccatgttcagttttgagattgctccaggatgatgaaagaagattagaggcggagtctagagcactgagacttagggttggatttccagtgtgtgcagtcaggaaagagaaggaatggaagtactgaggtcctcttgggattacaagccaagtgcagtgagagaggattcgagttggaaggtgaccattgagattaagaggcactgttaaaagtctcgaagactgccagagaaatccaaataaagtctgtcatttggttaatagcattctcccaaggtgagttttgataaatgtaccacggctgtataagatgttagcattagaagaagctaggtaaagaatatgccagaactctatactatctttgcaactcttttgtaaacctgaaatcatttcagaataaaaaatgttaaaagtcaaaaaaaaaaaaaaaaaaaaaaaaaaaaaaaaaaaaaaaaaaaaaaaaaaaaaaaaaaaaaaaaacgaaaaaagaggaaacgaggagacagcgaagagaaaaagaggaagaagagaggagaagtgaaggaaggacaagaaagaagaagaaggggggagaaggacaggggaggccggaggggagcgaggagaagggagaggaggggcggacgggaaggagaggagagaccaaaaggaagagaagagaggaaaagagaaaaggaggagaggcggagcgaggagagaacgggagggaagaagagagaggaagagaagagaaagggcagaaagagaaaaaaagaagaggaaagagaagaagaagagagggagcggaggagggaggaagagggaagcaagagaagaaagagaggggggggaaaaaaaggagaagaggacaagcggagagagaggaagaacacaagaaagaagacaaaagaggaggaagggaagaacacgaaggagaagaacggcgaggaagagagaggggaaaggaagagagaggaagaaagaaggaagaagaaaaggggggagagagaaggaaagaggaaagacaaggagact

SEQ ID NO: 242410 - DNA, 503 bp, Homo sapiens
tagagacagtgtttcaccaagttggccaggatggtcttgatctcttgacctcatgatctacctgcctcagtctcccaaagtgctgggattacaggcttgagccaccgcgtctggccaggatatgagttcttattaaaaagagcagattctagagatttcactctgtttgcatttctccttccatgcaagttctccttgagtttggctgaccacaagctcatcttcttccaggaagtgagaaaactggtatttgggaatgctcccagtagcacctgctttttccatatctgcactgatacctaattggaagccatccgcgttggagacagtggcgttatttatattgaagctgactcccaaggaaaccaggagggtaggaacaccgccactctggatcacagagatctcattggtcttcttggccagaccaccattgagcatgctggtgtcctggttccacaaaacagggcccatgttcactaaagtggccagaatttccctgg

SEQ ID NO: 242411 - DNA, 464 bp, Homo sapiens
tgcatttagatatctaatccattaggcatttattcttttatatggtgtgaggaatggttctaattttatccttttctgcttgtcccaacaccattattttaaagtccatatatgcctcagtatttagagataccactgttatcatacagtagatttctaggtacagttggggctatttctagactttgtatttcacagagtatttttaatgcccgtggttctagctgagttttcattaaacatttatgtatgtctcagaggctaccaggttcctgaatttacaatgcgaaggaatttttaggcctcttcccctttcgtgatagaagaacccttattatcttcttgtacttcctgaattttctaaattttctgaaatcagccgaactttttctagtctttaaaaaatcttcttaaaggtattaccagtttttaaacaggaaacttcagcatacatttttaacagc

SEQ ID NO: 242412 - DNA, 415 bp, Homo sapiens
cagaactttcttgaaaatggcaacgttctatattggcggtgtccaatacggcagccattagccataagtggctactgagcacttgaaatgaagctaatgtgacgaaggtgctgacttttttaagttatttgattttaacaaatttaaacagccacatatacagctagtggctacaatacactcaacacagggatagggtcagcaatgcacagaaagacaagcacagaatttgaaaccaggacaaatttgggtcccacttctgctacttgatgctttttattttaagcccgtatctaattctcagaagaaaacacctacccatgaactacaggtctattttgagaatcaaatgaaacggtatatgagaaagacctttgtaagctgcagaaactggtatatctgctctttcctttaa

SEQ ID NO: 242413 - DNA, 410 bp, Homo sapiens
ctcccctagtgcctttgaggttcctcaggccctggggccggctgggtgcccgggcaggctgcttctctaggcatccctggggccagaactgctgggattctcttgggtagaacctggttgtccctggggcgcaggggagagggcagccgtgcagggaggggcagatctctggcttctgatgaccagtgggatggaaagtgtcctgtccttggttgatgacttcatttttcattcatcccggcgcctggctcccaagcccttgtggcccgagagtttctcccgaggtccctcatctaccctgcggtaggtcaaagaaactccagcacccaccttctcgtttctaaattttgaaataattgttttcactcgatgattatgagtaatgctactataaacattcttgcatatga

SEQ ID NO: 242414 - DNA, 423 bp, Homo sapiens
ttaaagaaaggcaagagtacatcagggcttacatttaagaaaactggacaccattctcacttaacgtgagaattctcacttaacgtgatgaattagaaaagcatccaaattgtttatccctttaaaaatattttttatcagtgagttgcaaaactgtttcttaaaacgtatttctaggtaagtaatttctgaaaggctccaaccattaagatttagtatgaggggcgagggatagcattaggagatatacctaatgctaaatgacgagttaatgggtgcagcacaccaacatggcacatgtatacacatgtaacaaacctgcacggtgtgcacatgtaccctaaaacttaaagtataataataataaaataaaataaaataaaaaataaagggaactgcaagggagcagctacaagcaaaatg

SEQ ID NO: 242415 - DNA, 419 bp, Homo sapiens
cctaagctctctctctctctggtagtgacacaggcaggagggcagggtccctggtgagggctccaccctcaagcctggacctatggccctaaatgagaacaagtattcctatttttgtgcctgaatgttgcctttccaagaccagtctggcccactccaccccttatcctatgcctgtaagaaccccaaatcccaggctccatgagcagcagagcagcagagtggcacagcagaggagagaagaagcatctgaacgtggtgaggagtttggctatggacagtcagaaaggagttcatcctgggacggctgaactccaggggaagattatcttcccattgcatcccctttccagctccctatgccactgaaagccaccctgtcactcaataaaaactccgcattcatcacctttcaaact

SEQ ID NO: 242416 - DNA, 349 bp, Homo sapiens
aaggaatgggacttttatctatggaatgagaatatttatatagtagggacaaaaaggtacttatcttgttttgcctcaaggctgtgttgtatttgctcacctatctgatatagtcttggtcagtgcttctcaaattttgacgtgcatatgaattatctgtgactcctattaaactgaagattcagattcagtggtgctggggagtgagcagagctgtggcctgactatcatcttaatcctttataccagggttgtctaatcttttggcttccctgggacacactggaagaagaattgtcttgggtcatacataaaatacactaacactaacaaaagctgctgagctaaa

SEQ ID NO: 242417 - DNA, 452 bp, Homo sapiens
gacctggagatgtgaggctccgcggctgcaaggatagcgtctcaggggcaggaggagcccttccttatggtgccagccggagggtgccctccaagttcacaccccagagagtgaggcttcaaacagattaggtctggatatcttaaaattataaaaatattagcagaaacaaaggaaagctgtccctgtagcctcggggtggagaacatcctcctgcaaagctgctgaagataaacaggtcagattccacacatgggcacttagagctcttggatgtgagaagacacacgcacaacgttagaagctggcaacacacacagcaagcgtgtgtgcggcgcccaggctgaggcgagccctgatgcgcaggggcgctcggcagtcctacctcagcggagaaagcatagtccttgcatggggatttagaggaaaaattaaaactgcgagtagatacg

SEQ ID NO: 242418 - DNA, 532 bp, Homo sapiens
gttcagttcatttccttctcaggacctctggttggctggtcatcctacgatcttcacatggcagtgtcaggcctcccaggctacagcttcagtgtcacctaagggaggccccccgaccaatgtggctaaagagcatcctgtcccatcagacctcctcttgtttcctgttggccatctgtccccctccacgaggcataccctctatggtgcaaagagctcaactaccctggtgatcagtgggcccaaggataagcacagatgtatccattggacacatgagttagtacctggtcccctggctctgcagaacactgaagaaaagccacttgattgggacatagagctgtcactgaactgagaaccactgagggcacaggctgaggtccagtggccatgagcagccgcagttggtcagtgttctgtgagaacagggaaatcaccctgcttgcctgcctgtcggaatgggcactgggctttcaggattcaacttgaactagaatagaaactacattctgacatcaaaaaaaaaaaa

SEQ ID NO: 242419 - DNA, 448 bp, Homo sapiens
acgaagtgttctgtgtgagtgtagaaacagtgtggtttcccagatatggggaaatagattatatttagtagaaatgtatccaattatgaaagttgagaaatgggctgggtgctgtggctcatacctataatcccagcactttgggaggctgagaggggtggatcacttgaggtcaggagttcaaggccagcctggccagcatgatgaaaccccatctctactaaaaatgcaaaaattagctgggtgtggtggtggttgcctgtagtcccagcttgttctttataaaaaccagtaacatgaatgaaatgtattgtgagttacagctgggaaacaagaaatagccaaggtctgaaagactgggaatgagaaaggagatacaaccacagatataggagtgattaaaacaaaaataaattaaattatgtgaaattctacagcaacaagtagt

SEQ ID NO: 242420 - DNA, 1037 bp, Homo sapiens
gtaggctaaggaccctgttaagacagtttgtgttttactaccatgtagaaatttccaactacttttttttgtcctttactaggctgcaggttctggaggttccagcatagttctgacacatggtaggccttccataaaggcttgtggaacatttaccatctagggctaggtggtaaggagcaccagagagagaggcatagtttgaaatccacagatacagggaggaagaggcatttttattgtatcaggcctaaggctaggcaatttatggttaccattttattcaggtaggtaatttttaaaaggaagagttctagctgtccctctatgtaaatttaatatcttaatgttagcgagtcacttggaacactttgctttgcatcatgcggcctctgcttattagtcgtagagaagttatttaaactctaaggcagttttcacacctgtaaaacagggacagttcttactgtgcctgtttcaccacattttaaaaaatatcaaatgaaaatatacttaagtaaatacagaacaaacacgcattaagtggaaagtctgcactgttttctcccttaattcatcctctctgcagcttctcaaggttcctctagtccttcgctggctggagaccaaatggaaaagataggtctctgtctacttcaaggctaaccttaggtagctctgtaaattttggggtttacatctttaatgcctccaatatattgagaatgcgccatgaattctcagtaagatttatagcttataaggcttttagaaagtttgctatttactaaaaacctgaaagaaaatgttattttagtcaattattgaaaattacaacatttattggttcaacgataatcaatagtatacttttcctacttctactgaaacttaacagaacatttcttatctatgatgcaatttttaactaaattgtctatacaaatggaaaaaaaaaccaccccaaaccataaataccacagaaactttttaaatttacacagtgatttcccctgaaaccactgcacaaccaagca

SEQ ID NO: 242421 - DNA, 484 bp, Homo sapiens
gcaacgctctgcttcctggaaatctgtgtttacagccaacacagttgctgcctgagacagccccacctgaagaccccagagctgccccagcttgccaggtttcccctcctcctgttatcaccccatgctgctgagaacctgcctggcaggcttcccagccaaggctggggcctaatctcaagtgaaactgacatgtccctgtgaggactgaggaacatcctctctccccacagagcctcactcaggttctcatctacttccttggggtctgccccgcctccctcagaagtttggaaccacatactgttctggaggggacctctcactgctgcagaacctgtcctccaggataccgacaagtgttcatctcggtcgtggctaattaacttaccatatggtagtgaactcccttctggggccccaatattttgtttatttttaaaaaataaaattagtaccattgtttattttctgaatgtacaga

SEQ ID NO: 242422 - DNA, 470 bp, Homo sapiens
aaaaaaaaaaaggcagtttgaccctgcctttactttctgaaaatgacagaagctttcagatatatttcaagatatgggtcataagcatgacccatagtttatgtcaccttaaatagagcagctgattagaactggccattggttataaaataaaagagtacgtgtaggtttgtgggagcaggatcctaactgctttagcaatactaagccactccttgccgtgtgatttcagtgtctttccttccagttggaactcctctctgccctttagcctgattttcttgtgtgtaacatggcaaattatttcatggctaatccttcttacagacctgaaattgttctttttaaaaaaaactttggtgggttttgagatcccctcctttgattctcagatgtggctgttagtagtttaatttctgtatgtggtttctgagtagcttccaacaacctatttttgttaacagttcttt

SEQ ID NO: 242423 - DNA, 194 bp, Homo sapiens
aaagtatcagccgttagaatgaaaactaacttcatctttgcttgctctgaaactcccccttttccacctactctcctagatctttgtcaggaagcagagcgcttctttaggggagaggaaatcccttcgacttgaagcaaccggtgaggacagcagagttttggaccaggctttattctgaggctgcagcagat

SEQ ID NO: 242424 - DNA, 612 bp, Homo sapiens
tacaattcattaatttattgcatgactcagggaagggtattcagctgccttttattaggtggtaattgtgaagggggacagtatcttacaggattatagatttttgaaaatcaaggctgtatttctttttaaggcttacttgtacttacaaattaggtaactcaatccagtgtggtgctacaccaatcatattgtatgaaatgctgttaaaaacacgcacaaagttggcttcctttgtcttcttaaaatttgaacagactaccaagcatatttgaatactatttgattaaaatagaagcaattatgaaagcctctcttcatattatcagagtgtaacattggtctttgtctttttttatttatctattttccttcatagtacctttaaaatatgagctataatttgaattacttaacagattttcttatgctgatatgtagaagcctaccttttagtatcaaataattgaaaaaaagttcatcttaatttagttgtcaatatctctttgatcacagtagataaattctgaattgtgaagggaaatgaatacccttcatagatagagccaatttgtgtgccagttggtgctcataattggcctgatgttattt

SEQ ID NO: 242425 - DNA, 206 bp, Homo sapiens
cagacgctggcgcccgcagccgagaagccagagagaaagttcccggggagagctcgcccctgggagggccgacgtcgagcctgctcgccgcgagggtctcaggtaccgcgcgtccagccagccttcccgcggcgcgcactcggccgcccgggctcggctcgtcgggaagcaggggaacatcgccggctggcagccggggcggccgc

SEQ ID NO: 242426 - DNA, 444 bp, Homo sapiens
ccatccctagatgattttgcagtctttgcacaccagtgtggccataggcttgttttctcctggactgagcctgcagatcctatgagcaagcatatgtcctgtgctccactagtcctagctggatcgtggacatattaccatcattacaaatatcaatagtttgtgattacttcaaacaatctgaagttgaaggaccccagatatccttcaaaacaggaatctgcaggcagatgctgaaaccatgaatacagagggacaactatgtaagcacgctgacatagttttatgaatgcaaacagccaaggagagcagatgttgagtggttgccagagtgaaatgaggaagccctgctgccagcttcccaccaaaaagcaggtgcttagaccattttatttaaaaccagctctttgaatgcactatgtgctgaataaatatcactaaaat

SEQ ID NO: 242427 - DNA, 609 bp, Homo sapiens
ccatccctagatgattttgcagtctttgcacaccagtgtggccataggcttgttttctcctggactgagcctgcagatcctatgagcaagcatatgtcctgtgctccactagtcctagctggatcgtggacatattaccatcattacaaatatcaatagtttgtgattacttcaaacaatctgaagttgaaggaccccagatatccttcaaaacaggaatctgcaggcagatgctgaaaccatgaatacagagggacaactatgtaagcgtccacaagatataatgctgagaaaggctaataaatcaagccaatctaatgtctaaatacagaatagaaaaatgtgtcttctaatttactttaaaatgatgactggatgaatacgtaaccactgctctgaatggaagacttcgactggaagactttttcacatgacccagggaaaggcacaaagaaacaaagcttgtgatgctctaaaataatcaattcatttggccaacaccatgcacagaatggaaagcttttgcctcatttttcttccccccgccttcagattttcaaagtgttttataaaagcaagtgctaataaactgtggcattaactagagaa

SEQ ID NO: 242428 - DNA, 405 bp, Homo sapiens
ctttgaatttgctgatgctgaacctggagcttatctgaggctttcttggaaagaacctggcttgtctttggtgttctgagatgcaattttttctcttttgatttttctggaaattcaaacctatctgtgtttttctttccacatagttatcaacatttctgatatattgatgatactctaattgttttccactgttatgtgtctgtgcttttaaaaaaaattgtcttggttatttaatgtgacttttaacgcttaaaaaagtggagatgtatacatttgttaacaatgccatgaaagcattttctttctcctgaggaaaagtgaatttcttaccagaatatctggctgatcctgtaatttaaattaaaataaaattttggagaaacagcaaaacaaatcaacaaa

SEQ ID NO: 242429 - DNA, 361 bp, Homo sapiens
atcagagctgcccacagaggagagtcacccggtcacattcagctcactgtggtgaagcaccccacaggggcgaggagtttactttttaaatttttttttttgtgtgtgtgtgtgtgtgtgtgtgtgtgtgtgtgtgtgtgtttcactctgccctgttctgaagtttgctttttataactaatggttatatatttggggaggaagagttacaaagggacagttcctatatggtaatgaatgcaaccttgttgtctgtgtaaaaatcctgattttggagtatattcacagaatagtaactttgaaggattttcaagtatgtgttaattgttggctgaaatataaaatgttaaagaacttggca

SEQ ID NO: 242430 - DNA, 306 bp, Homo sapiens
tagcatgcttgttcctgctggagagccatggctctcggttaggagatagagctaggaaatatgtatattttgaaataacaagtttattttatttgattttagagaaaagaactcacttggtacccgggctgtagtgcagtggcatgatctcacctcactgcaacctcgacctcctgagctcaagtgatcctgctgtctcagctacttttggaaggctgaggcaggagaatcactagaacctgggaggcagaggttgcaatgagctgagattgcgccactgcaccccagccttggtgacacgtctca

SEQ ID NO: 242431 - DNA, 413 bp, Homo sapiens
cctcctctcaactcccaaatcttccttcaatgagcattcttcccgcaaagtctggagtcagggaaatcaaaagtctggtttccttcctaatcctcgctggagcattccccgtgctgctgaccgaagagttgtactatctgccctgaggacgcacagtaggactcacttcctggcttcccagtgcctgggtggggtcatgtgactactctggccaatgagacgtgagctgtcccggcgtaggggagcagcagcatctgctcccagcgccctgacatcccacagcaagtgaagacgggctgctcctccggcagcctaggtccaggggagggaggcagggagcagagcccatggccaggtgcgatggacactcagattgagcaaggaataaaccttgttattttaagccaaaaaaa

SEQ ID NO: 242432 - DNA, 323 bp, Homo sapiens
gcgcgtagcctatcctgcatatttaaagttaattgtgtttaataaaaatagagcagagatagagaagtgattgccagcccagcagctctgagctatctcatataaggcttagtagggaatcctgacccacactccaatctccaagctctagacatctcaccaacaaaacaggaagccaacacattctggatcttctttccaagataaagtcgaccattcgtaatatttttttcagagacaacggaagctgaaaaataagagctgagaaaggaagaacttttctataagaacttaaatccaaaaggctatgggatagtaatgga

SEQ ID NO: 242433 - DNA, 627 bp, Homo sapiens
acctctgtactagctgcaatttttctgtaaatttaaaactttttaagttcatttttaacaatgttttaaaaaattaatactttcttgataataatgagttagaaaataaaatgaactacaaaagtctaattatgcaaataagtactcaggaataaatatagctaaaattagtgacctaagcaaaaaaagcaaacaaaaaacaacaacaacaaaaatccccagaactgtactgatacataaaactagaaactacaaacaaatgttcttttataagaaaagttaagaacttgacagaaagtactagtgatatattttcatgttcttaaaaaaggtcaaagttattcaatgctttcttatctctcatataactgcagttgggaagtgagggctgcccaagatatgtggaaattattctaatgcactgatcatgcaagcacagaggtaccaataatgagatgatatgcacagaaatcattttaaagtaaggttagttgtttatcattttcaactagaaacagctttgtccttgagatgaaaaactgcatctctatatcagtaattccagaaaatatacattatcataaaagagacaaattatatcatatctttatttaaagcatatttccc

SEQ ID NO: 242434 - DNA, 411 bp, Homo sapiens
cagtgttcagcttggtttgtatagaacttagttgaaatttagcattgagaattattttggggcttttcaaattcttttcaatggcattttagtccataatttcattaactttattgaaagtgatattatttggccaggaacattagctcactcctgtaatcccagtactttgggaggctgaggcgggtggattgcaaggtcaagagattgagaccatcctggccaacatggtgaaaccccatctctactaaaaatacaaaaattagctgggcgtggtggcatgtgcctgtagtcccagctactcgggaggctgaggcaggagaatcgcttgaacctgggagctggaggttgtggtgagctgagatcacgccactggactccagcctggcaacagagcaagactctgtctca

SEQ ID NO: 242435 - DNA, 408 bp, Homo sapiens
ccataaagtttttcatgtctggtccttacttaatagaagacagtagcttattggaacttctgtccagttccaagcagaggaagaagggcacagtgagtggaacaaagccatgatcagcccttcaggaaaaaaaaaccctggccgggcacagtggctcacgcctgtaatcccatcactttgggaggcaggcgaatcacttgaagccaggagttcgagaccagcctggccaacatggtgaaaccctgtctcctaaaaatacaaaagttagccaggtgtggtagtgcaggcctgtagtcccagctactcaggaggctgaggcaggagaattgcttgagcctggaaggcagagattgcagtgagccaagatcccaccactgccctccaggctgggcgacagactctgactca

SEQ ID NO: 242436 - DNA, 476 bp, Homo sapiens
accaatctttgattttcagcaatgcataatgtaaagctaggcaactaatttaaatttgttaaatattgattttatcctggtagtaaggtaataagccaaagacacaaagagttaatttcaaaaagcaaacttcaattcaatttaccaaagtatcccaagctcttggcaatctgacaaatgaaagctgaaattgtttacaagaaaaaaaaatccagcatccttgaaagtttttcatggtttatctgaggaaaaatatttttctgaaatccacatttttcttctgtaatggaaacaatttggacccagctatatatgaccacggtgcatctgtcaggaataaaatgttatggaaaatttttgcaaatatgtgttacaaatatagtagaaattaaaaggcagctggcttcatacaatggagaatataaagaaaagcaatgacatttggattattcaataaactctcctacccattcata

SEQ ID NO: 242437 - DNA, 255 bp, Homo sapiens
tgggattacaggcgtgagccaccacgcctggcctgaaactcttaactcttataaaaaaaattatagaggcatatattgtatatcatataatctaccattttcaagtgcataattcaatttttagtaaacttaccaagttttacaaccatcactgtaaatcaatattggaacattttatcatcccaataagatgtgatgcccatttactgttaaccctcgcccttaaatatactttttgtctctctctgtgacaga

SEQ ID NO: 242438 - DNA, 273 bp, Homo sapiens
ggtgctgggaaaactggatttccacatgcaaaagaataaaattagatccctatcttacacatgcatagaagtcaactcaaaatgaatgaaagacttaaaatataagacctgaaactgtaaaactactagaaaataacataagggaaaggcttcatgacattggtctgggcaaggatttctttggataggaccccaaatgttcaggcaacaaaagcaaagacagacaagattgcatcaaactaaaaagcttctgcacaagaaaacaactagcaa

SEQ ID NO: 242439 - DNA, 256 bp, Homo sapiens
aattgaggaaaatcccagaagatagagccaaaagacaagagatgtaaaaatgcacaaggaaaaagaaaatagagtaaaggaaaaatgagattatcagtctaggaagacctgtgtctgaataataagtgtataagaaagagaacacaaagacatggaaggaagattattgtaagaaaacttcccagaactgaaggggacatacatctctaagtttaaaaggatcgacagttatcagtttatgcaattaaaaaaaaaa

SEQ ID NO: 242440 - DNA, 314 bp, Homo sapiens
agaaggagaaggaggagagagcttatttgtagaaataatggctgaaaacatcccaaactttcctttttttgaggaaagaaataggcatacaagttcaagaaactcaaggaactccagagaggacaattctaaagacaccccctctaacatacattataatcaaattgtcaaaagtaaaatacaaagagaatcttttaaattgacaagagaaaagcagctggtcacgttcaagggagttctataagaatttcagcagatttctcagcagaaaccttgcaggccaacaggcagtgggatgatacattcaaagtgca

SEQ ID NO: 242441 - DNA, 462 bp, Homo sapiens
acccagactggagcacagtggcaccatcttggctcactgcaacctccacctgggcaacacaggaagactccgtctgaagacaaaaaaaaaaaaagaaacttcagatagcaaaattgagagaagacattgacattcaagccatcaccacacatgttcccaattttcattgaagataaaatgtggaaggaggtcactgtactgcgcaaaaccgggggctgggccaaaccctggatcactgaagtcactgatgaaactcaagactgggggtttgtttctggggcctttcatggatggtgcatgttaaattcaattaaatttggcctaaagcagcctccctacataacaaattgtaatgtaactcaacatgtaaacaaacttgagagtatattcttgtaacaagtaaccttggacaatcagggcagccaagcttcagccagtcacaggctacaagctgcccagaca

SEQ ID NO: 242442 - DNA, 170 bp, Homo sapiens
tttatgcaacttttagatgggtctataaatgtgtcttcagaaggaatgtcagtaaagtgaaaaatccagttgctggataacagggacgcatcgtatttccaaacaaacaggaagaccctcaagccccctccccaggtccccctctagtgagcctgggtgagggtagactc

SEQ ID NO: 242443 - DNA, 418 bp, Homo sapiens
agagcgggtactcaacaaacatttgctaggtgaagaattaatattaaagaagcttacttacttaatctgaagagagtttgctaacaactagttctcaattctccattaatctgtatgagatcaaaggagaacctgaatttccactgacctgagaggaacaacaccccaggtcccacaactatgactctcattccaccctgatgctggaagggaagtgattcagtgctgtgctgcttcacctgcggtcacacagctagtgagtggctgggccactggagaggtcagaaggtgatccaggaaagactcagaatttaatgactggataaaaagccaaaagaggccggtgtggtggctcacacctgtaatcccagcattctgcaaggccaaggtggacggatcacttgaactcaggagttcg

SEQ ID NO: 242444 - DNA, 528 bp, Homo sapiens
cactcgacattagctgtgattatcgacgcagtgtttgatctgcgtatcactggaatctttttcatgcaccttctacatacaaaagcatttgcaaaactgttaaatcaataattgctcctgatttgtttctgacttgagtttttctttaggaagcgctgaatgaccaacccatagtgataacatgatcctactagctttacgaaggtcaaacacacctccgtgtccacaacgagcaaaatcgggaagtaaattatctttttatttatgcttcaatatggaaagctaaatttaaagtgaaaccttttgtcagaaccagaagggttatcaccctgacaggtaaggcagagcccagctgcctaatcacaaacgcctgagaaatacatcaggacaggttactgagttcaagcccagcgaaagtcttaagtcaggagactctgcaggcgacatgatttaatgaataaccacacacatggaccctggggtccaagttcattagaatggctcttttgcagcagaaggtccaaaaaa

SEQ ID NO: 242445 - DNA, 395 bp, Homo sapiens
ttgtgttagaataaaatcggttagactaaaaatagatgatcttcatttccagatttggatgctccatgtgttgggttgaagatcgctgtggtgtcgatcagatggctggattaactgccatgccctcattaaattagatcatgtgtgaaagttctttgcaaaccatttagtgccatgcatttctaaggtattattaatataaactagaggaaaggagcttgtgattcttatgtccaccagaaacttttttgcacaaatctcctctgcagcagggaaagtggcttttgaagctgtgaagtgcgctgcagtctcacaggtgctcgttatcagagaaaagtgaagatcatcagccttggctataggaggtcttctttatcttggatgatctggcaaga

SEQ ID NO: 242446 - DNA, 387 bp, Homo sapiens
taagtctaaacagaaagctcttgcttcctgggaatgaaaatctaatattataatgcaacataaaccgggtgaagatgggcagtgttaggtaattttattaggtttctcttagttctctctgaaactggggatatgttaggaagaggcaatggccataaaaatacattttataaagttcaacatatcaaagagaatttagaagtaattaatctgtaagattactgccacaaatcctatattaattatcaactaattaatgatgtgctagaacccaggattctggtaatattagctctgctctaaaacaaatgccaaatggtttcaaaggacttactacttatgacaggaataacacatattaaaaagaaaagcaaaaggatattttac

SEQ ID NO: 242447 - DNA, 389 bp, Homo sapiens
actttctaacatccatgaacattgtggtccccacctgaagtttcactttgcatgttcagtgatatggtttggctctgtgttcccacccaatcttatctcaaattgtaatccccatgtgtccagggagggacctgtaatccccacctagtgacggagggaggtgattgatgatgggtgtggtgtaccccatgctgttctcgtgatagtgagtgggttctcatgagatctgatggttttataagtgtttgaaagttccctcttcactcgctgtcttgcctgctgccatgtaaaatgtgcctacttcaccctctgccatgattgtaagtttcctgaggcctccccagccatgcagaactttgacacaattaaatgtcttttctttataaatt

SEQ ID NO: 242448 - DNA, 733 bp, Homo sapiens
tatggaggctggaattctgagatcaaagttgaagccacttcattttctggtgaggacactcttcctggtttacagatggccaccttcttgcttgttctcacatggcatttctttggtatgtgcctggtgggggagagagaaaataggctctcatgtctcttcttacagcaacactaattgtattggatcagggtcccactcttatggagacccaggaaagctggtggtataacaacttggttcaagtccaaatgcctaagaacctggggaggggcatggggaatgctggtataagtcccagagtctgaatgcccaggaacaagcaggagctgtgatgtccaaggacaggagggcaggatctttgtaatgaatttttaatgtcaaccttagcactcaggggatatggcctggtcatcagaacatctggaatctaatcctctttctacttctcaccagatgagggatcaagacaggttatttagcatccctgcacttgcggtcctggggatcttatttatattcatttaaaaaataaattacaaacaaacagccaggcgcagtggctcatgcctataattccatcactttgggaggccgaggtgggtagatcacctgaggtcaggagttctagaccagcctggccaacatggtgaaaccccgtctctactaaaaatacaaaaaattagccaggtgtggtattgtgtgcctgtaatcccagctacacaggaggctg

SEQ ID NO: 242449 - DNA, 302 bp, Homo sapiens
tatggaggctggaattctgagatcaaagttgaagccacttcattttctggtgaggacactcttcctggtttacagatggccaccttcttgcttgttctcacatggcatttctttggtatgtgcctggtgggggagagagaaaataggctctcatgtctcttcttacagcaacactaattgtattggatcagggtcccactcttatggagacccaggaaagctggtggctatgattgctccactgcactccagcctgggcaatagagtgagaccctatcaatcaatcaccacccccccccccc

SEQ ID NO: 242450 - DNA, 1531 bp, Homo sapiens
tactgtgaaaaggaaatgatacccttttcaacctaacaaaagagttgatttgccaagaaaatgggctcaactggaagaagctgactaagaagaaatacacagtcagtgcttttgttcccattcattctacctttgcagataagaatttttaaaaaatctctcctatgattcccacaaatacacagcattgctatttgaaaaataacaaagcacaatttgagtttcatatttgctgtttggctggagtgatggctattcatcttctctttacccaggccattgttcctgcccacataatcacagcttgaagagctcgcttgtgagttccttcctttgcaactgtggtccacactagctactcaattagttcatttcttggttgtaagaataaatagaatgtgtacatttccttcttgtttaccaatgcaacctgaaggggatccaaaaatttggcctggcttgagaagtaaaaaaggtttaggctcacaacagataaaacgtatcccaagccgggacaccacggtgctgcggaaaaacccacccttgattttcccctcgtcttgtcttcagttcagcatgatgagctggaaagctgcaaacgctgtagtgatgatctgagaagtgaaacagaaagcaagtgaggggaagcaggagtctgtacacatgtgccctgaagaatcctttgctttcgtctttcctttttcggctttaagtgctcccgtcacaccagtgattcgaacatttcagagaaacacaacggagggaaggagcccggccctgccttgtcagcgccctggaagacctggcttcctccctgacactcactctggggagggaagacacccgtgcgcctcgctccctcgtggccagtggcttccccggtgggctagggcgtgtcagcagggcgtgcccaccgagggagcaacagcgattcccaggcctaaggcttttcaaatcaaaagcgcctgacgctttttacaaccgagcagaagagggctgttccaggtggctgacgcttcccgtggcggggagggggttatggagaacgtggatgaagctcatcgtgtaagacgggaaatgccactgcaagtgagcgtccctgcaccaggccgcgtcccgcccagagtgaggcacggccgccccctcgctcagaacctgcagcccggccgggctgatgcgggaagccggccccgcctgtgagcgcgcagttctccctggagacgggccaccctcaccctgtgcctgcgtcccctcccagccctcgtccctgctctctacccacgacccggcctggggtgcctcggacggatctcctgccatttcctgcattctgcaggagcactcattgaaaatttgggtggccttgcttatttattttcctggaatgcagtgggttctatttccgtggtattttctcagcagtgcagcgtttccatttcaaactacaagaagaagaagaaaagccagtccccgtcagcacgcaaacacacaacagaaaaaaacgtcccgggtttgactcgcagtcctgcct

SEQ ID NO: 242451 - DNA, 459 bp, Homo sapiens
aggtctactgcattaatctaagggactaatgatgaaggtgtgacctaagacaacagaatagagaggacggactagatttcagatatattcagaaggtgaaatcaaaaagacttaatgacagattgaatgaattgtaagaatggaaagaaggaaaaataaatgattctcagctttttgatttaagaattgggtagacgccaggtgttgtggctcaagcctgtaatcccagaactttgggaggccaaggtgggtggatcacgaggtcaagagattaagaccatctttgccaacatggtgaaaccccgtctctactaaaaatacaaaaattagctgggcaccgtggcgcacgcctgtagtcccagctactcaggaagctgaggcaggagaattgctggaacccaggaggcagaggttgcagtgagccaagattgcaccactgcactccagcctgacaacaga

SEQ ID NO: 242452 - DNA, 750 bp, Homo sapiens
agcggtggggaccgggccgcttcttgttcggcgtgggcggctcctggcagacccatcccgcggtgcagccgccggcccggtaggcgccaggaccccgagcctcggcggcggcggcggcggcggcagcgctgccttcactcacctcgtcctcgctcccgtcctaccccgttccgcgctgggtggagtccaagtctgattgcgagagtccggaacgccgcctcgggggcttgactccagccccggggatcgagaacggcgcccaggggtccctacgtctgccttgggggctcgagtcccgccctgggcgtccgtgacgtcgcccaggggtctccacgtctgccctggaacctggagagccgccgtgggggccccggaagctgccccggagtccccacgtctgccctgggggctcgagtccagctctgagggtcctgaagtcagctttgggggttcgaacccatccatcccaggggtccctgagtctacattaggggctggagtccagccttgagggtctccatgtctgccttgggggccttgatgggatccagcggttctgagtccagcctcaggagcccctgcggtggagctctgagtggggcaggggcctgggagatgccagaaggatgagagcagggcccccctggtccaggggacagtaagaggtagccagtcccagagaagcgcccccacaaactgttacccgtggtgtgcaaagcgtcctgcaaccccagccctcaccaggacttc

SEQ ID NO: 242453 - DNA, 695 bp, Homo sapiens
  misc_feature (1)..(1): n is a, c, g, or t
  misc_feature (54)..(54): n is a, c, g, or t
  misc_feature (60)..(60): n is a, c, g, or t
  misc_feature (113)..(113): n is a, c, g, or t
ngcactctagtatagcacacttccatgatctaccagggaatataaggtctcttnggctcnttatagggcactatctcactcatagatctatgattaccctcatgcctatcacntcctgaggagacacaaatattcagaccatagtaggcagattagaaaaggaagaaggaagagagaaagacccagcatatggtgttcaagaataaaagcaaaggaattttgggtacaaaatgttacattctgtgtaatataaccagctgccatacttcccctgggaaatcttccataaaatatgcagggcttatgaatgcttttggtaaggcagatctgtctttggggagttcaaagaaaagaatgaggggacagaagaccttataaataattaaatgaatgaactttttaaaagtaaataaatctatatcccacgaaacagacggacactaagcaactaagattatcttccctttcacatttagcaggggaaatggtgtcctctcattatagcatttccctgatcagcaggatttaaaggtaatgaataaggtgccactcttttctctgcttagataattcacctaataaaattaatttctgaagttaaaagtaaaacattaaaaaaattaaaccttttacaaataacgtatataaaatgttatcaggtaagtaaactttggttttgtttgtgactcgtagac

SEQ ID NO: 242454 - DNA, 649 bp, Homo sapiens
  misc_feature (114)..(114): n is a, c, g, or t
  misc_feature (145)..(145): n is a, c, g, or t
catcgttgtagcctcagtatcacctcatgatctccaggaaatagtctctgctcttatagcatatccccatagtctatatactcatgctatactcccagcccatcctatcatccntgtggtagattcataatgatttgaggagccnaatatcagacatagtagcagatagaattttgggtacaaaatgttacattctgtgtaatataaccagctgccatacttcccctgggaaatcttccataaaatatgcagggcttatgaatgcttttggtaaggcagatctgtctttggggagttcaaagaaaagaatgaggggacagaagaccttataaataattaaatgaatgaactttttaaaagtaaataaatctatatcccacgaaacagacggacactaagcaactaagattatcttccctttcacatttagcaggggaaatggtgtcctctcattatagcatttccctgatcagcaggatttaaaggtaatgaataaggtgccactcttttctctgcttagataattcacctaataaaattaatttctgaagttaaaagtaaaacattaaaaaaattaaaccttttacaaataacgtatataaaatgttatcaggtaagtaaactttggttttgtttgtgactcgtagac

SEQ ID NO: 242455 - DNA, 339 bp, Homo sapiens
tcgggttaatttatgatgtaatgtgtttcataagaaagtcctactcaccatgaagtcacttaattcagaaattacagagaacaataaaaaccaagctgattgttggcaaacttgaatgaaaaatttatacctggaggttttcctttctaataggcaaccatatattttatggagctgaaacttttaggtttgctgcttttgtcgttgtcttcaccatttctcctttccttaaaagaaacaatagttttatatattaattttgatgtgctaagtatgtacaacttaattttttaaagaacgtttttcagatatatacatgtatataaattcatgctatac

SEQ ID NO: 242456 - DNA, 682 bp, Homo sapiens
gctactcgggaggctgaggcaggagaatggcgtgaacccaggaggcggagatcgtgccactgcactccatcctgggagacagagcgagactccgtctcaaaaaaaaaaaaaaaaagaaagaaagttctgttttgtagaatacaacattgtcatttttatgtttcttccttttatgtactattagcatttgtcttaactcatgtctcttccagcacatcctatgtatggatgcagttttccttccactatcatatatttcttgtgttctatattttcagtttgatcttcagtatcaagaggggtcttattataacagaataaaaattttcattttttcagccaagtgtaaattttttcgggttttctaaattgtagctttttcctgtatttatttcttaactataaaacaaagcagacatgatatatgtcctccccttactattttaactcttgaaaacttcaatacttttgaaagtttgcttaccttataagtggtctaagatattttcactgtggatcttgaatttctgctgagttttaggctacagctaaatagtctcatgttcctcacctatttccttaatgggtggtaacccctcaaaggagatgaccccttctaattcctttcttcgtgtgcctcaatttttgcttaaaattttaggattgcattcctagtgcaaaa

SEQ ID NO: 242457 - DNA, 631 bp, Homo sapiens
ataattcatactggagagaaaccctacaaatgtgaagaatgtggcaaagcttttaacctatcttcacaccttactacacataagataattcatactggagagaaaccctacaaatgtgaagaatgtggcaaagcttttaaccagtcctcaactctttctaaacataaggtaattcatactggagagaaaccctacaaatgtggagaatgtggcaaagcctttaaccagtcctcacaccttactacacataagataattcatactggagagaaaccctacaagtgtgaagaatgtggcaaagcctttaacaactcctctattcttaacagacataagatgattcatactggagagaaattctacaaacctgaaagttgtgacaatgcttgtgacaacatctcaaacatttccaaacataaaagaaattgtgctggtgagaaaacatagaaatatgaataatgtgacaaagcctttaaatggttatcacacttgtttgtaagtagggtaattcatactggagaaaacatcacgagtgtgaacagtgtggcaagacttaaacaatgctcacaccttattgcacaggaaagcctttatacttgagaacaaatgtgcaaatataaagaaagtaaaa

SEQ ID NO: 242458 - DNA, 394 bp, Homo sapiens
ctagcaaacatttatagaacgctcaacccaacaatagcaaaatattcttctcaagtgcatataaaactttctccaggatagatcatatgctaggtctttaaaaaagatattgaaaccctcatacattgctggtggaaatgtaaaatggtgcagccattttgcaggacagtttgagggttcctcaaaatgttaaacatagacttaccctgacccatcatttcaacagctggatgtatactcaagaaaaataaaaacctgtgtccacacaaaaacatatacaaagatgttcatggaagtgtatttataataccaaaaagtggaaataacccaaatgtcaatctactgatgaataaacaaaatctatcaataaatttattccaaccaaaaaagaaaa

SEQ ID NO: 242459 - DNA, 667 bp, Homo sapiens
cccattggtattgcccatccacagcagtcgtagcccatcacgagtggataaagtaggtggttagctggacttgcacatgacttgtttcgtgaacagtagtgcttagagttgtgatctagggacccagcgaacagtgtgtgagggacttcaaccctgcctctctccggtatgtgctgtgcctgctgtgccccccactccagtgttctccttggggctcctgaggcagctcccagtaggaggcctatcgttgttggcaccccaagggtgtccctgatccctaagtagaaacttaagcaggtatttggacaaataaatgagtgaaacaccttgtgacgttgaggcctgtggcacttccccaatagtgtgttagtgtaaaaccaccgtgtatgatgcctgttggtcccagcactttgggaggccaaggcatgtggatctcttgggcccaggaatttgagaccaccctaggcaacatggcgagacctcgtctctacaaaaagtacaaaaattagccaggtgtggtggtgcgtgcctttagtcccagctactcaggaagttgaggtgggaggattgcttgagccctggaggttgaggctgcagtgagtcatgattgtggctctgcactccagcctggacaacagagtgagacctcgtcccttaaaaaaaaaaa

SEQ ID NO: 242460 - DNA, 292 bp, Homo sapiens
gtagaatcaggaatatctctccatttttatacatataatcagaacaaatatggtatatgaagaaaataatttccaaaagactatatatttttattaagagtatacacatagccattaatattgagaattgctaatatactatttgtctttctacaatctcagctaaacaaaatgtataagtgaaatgtgatttcattcaatgaaaacttatatgcacactttgagaatactttgtataaacacatttaaagattttgatatgaataaatgcaaacagttcatttcttccgtt

SEQ ID NO: 242461 - DNA, 595 bp, Homo sapiens
ggggactttgggccatattgttggattttctgatttttctacagatgccagaaagcactcttgtaagtagtaagagtggtcttcaaattccttggagatttgttcatttcatccattgggactccactgagtgaaaggggaaggaagggagggaggccagtgtgtggaattcatttcattttctgggaacaccagctgattttgtcagcaactgaaaagctatcaaacaataacatttcactgcagttgacttgggagggaggcaggcacacctgctctgtgaccatcaaaggatgacaggtcttgaccaaagcagcatcctcggtaaaaaaatgtatgccttgtccctccaagttcaaccctctcaaatattaaaatacaacaagagcctcctttgggggtcagtaagcctgaatctcatcatttatcccagagaaaataaaattatgtctagaaactcattcattattttgccagttccaaattgtccctatcttgccttgctggctctttgagttgccacgtcattagaaaataaggtatcattgtacgtgaatcacctggttttctaggttgttacctataaacatagctg

SEQ ID NO: 242462 - DNA, 609 bp, Homo sapiens
taaacagccaatcaattttatgctttaattcaattcccccacattttgactttctcatgtctatttttaaattggctatattttatgatgctgctatagttacttttcatagacttgcatcttactcctcgtattatggatataagaggcttacacaaaacaagcgtattaatttattctgcatttgcctatgtatttgcattggccactgagttttgtaatgtcaaactttttctctttggacgttagcataattttcttcaggataaagaacttagcatttcttgaatgacgagtctagtgatgaattctcaccatgtttccttttctttttgtaaacgatgttatctctcaatctttcaaggaaatcttttgtgggtacagtattgttggttaacttttttcctttagcactttatgtcacttcactccctcctggtatgtacaatttctgatcagaagtctgttaacaaacaaattggaagtatataatgttatttgcttttctcttgctggtttcaggggcctttctctttgtagtatgtttttgagatgattatatatatatatatatatatatatatatatacacacaccacacaccttggg

SEQ ID NO: 242463 - DNA, 584 bp, Homo sapiens
taaacagccaatcaattttatgctttaattcaattcccccacattttgactttctcatgtctatttttaaattggctatattttatgatgctgctatagttacttttcatagacttgcatcttactcctcgtattatggatataagaggcttacacaaaacaagcgtattaatttattctgcatttgcctatgtatttgcattggccactgagttttgtaatgtcaaactttttctctttggacgttagcataattttcttcaggataaagaacttagcatttcttgaatgacgagtctagtgatgaattctcaccatgtttccttttctttttgtaaacgatgttatctctcaatctttcaaggaaatcttttgtgggtacagtattgttggttaacttttttcctttagcactttatgtcacttcactccctcctggtatgtacaatttctgatcagaagtctgttaacaaacaaattggaagtatataatgttatttgcttttctctctttgctttaaaagagcttttctttggccccgataataaaaaattttttgtcccccccacccgttctttttttt

SEQ ID NO: 242464 - DNA, 533 bp, Homo sapiens
agccaattagtaattgtgtaattagaaggatgtggacaggcactttaccaaaggagatatgtgggtggcaaataaatacatcaaaagctatttaacagcattattatactgggcagaataatggtctccaaaagatttccaccccttagttcctggagcctgtgaatacgttgtcttacttagcaaaagagactttagagatgtgattgaggttaagatgatcccagtctaatcatatgagtccttaaaaggtgacaacttttcctggctgcagtcagacatatgtgaaaacagaagaagggtcacagagatgtgatattgctggctttgaagatggacgaaggggagccacaaagcaaggaatgctgggagcctctagaagctagaaaaggcaaggaaagattttcccctagatactccagaaaaaaacacagccttgcctatgctgtgatatcatcacagtgagacttgtatcagacttctgacctacagaactgtaaaataataaatctgtgctcctttaaactgctaaa

SEQ ID NO: 242465 - DNA, 145 bp, Homo sapiens
ctggaagcccctactgcccacctgcactgggttcagggcccctctgggagatcctgttagagcgctcatgatggtaatcatctgttccttccctttgagacggggcacaggagggcactcaccacaggtgtcttgtgcaccactg

SEQ ID NO: 242466 - DNA, 459 bp, Homo sapiens
actcttcagggatctgatttatttggtcacacacatgcctgccgttaaaatgaatcagatctccatccttttcagcattcctagaaagggctcaactcagattcttcagaggtccttgagaacttgtcttagacaatgatgctcgctgatggagcagagggcacaatgacgatttgataataagtactctttctcttctcccaactgacctcctgaccatggctcatccattgacctaagtttgttcccatgaactgagagttgcctcaacattactgctcctttaccaccactggagaaatcctggacaaagactttctttatgaaagtggagatattcatgtgacatgactggggtagatcagtggctcccagcctccctctctattagaaaacataattgtgtgtcagtgatggcaacagagagaaatgccatctggtgtgctcaaaaaaaaaaaa

SEQ ID NO: 242467 - DNA, 590 bp, Homo sapiens
tatggagtttctgtgtcgccaggctggaatgcagtggctcgctctcggctcactgcaacctctgcctcctgggttcaagcgattttcctgcctcagcctcccaagtagctaggatgacaggtgtgtgccatcatgcctggctcactttttttttttttaattttagtagagacagggtttcaccatgttggccaggatggtctcgatctcctgaccttgtgatctgcccgccttggcctcccaaagtgctgggattacaggcatgagccaccgtgcccggcctattacatagttttaaatagcttgaaggagaatattgaatgttcccaacacagagaaatgataaatgtttgagatgatgggtatgctaactaccctgatctgacatttatatacactatgtaccccatgaaaatagacagttatcatttatcaatttaaaaaatacataaaataaaaacataaaggaaaaaaaagacagcaagaaagaagtatctggagaggaatctggtgccttagaaaggtaagggaagatgagtctgaccctgaaaaagaggagaggggaagagcagtgtggtgttcatgatttt

SEQ ID NO: 242468 - DNA, 536 bp, Homo sapiens
tatggagtttctgtgtcgccaggctggaatgcagtggctcgctctcggctcactgcaacctctgcctcctgggttcaagcgattttcctgcctcagcctcccaagtagctaggatgacaggtgtgtgccatcatgcctggctcactttttttttttttaattttagtagagacagggtttcaccatgttggccaggatggtctcgatctcctgaccttgtgatctgcccgccttggcctcccaaatagcttgaaggagaatattgaatgttcccaacacagagaaatgataaatgtttgagatgatgggtatgctaactaccctgatctgacatttatatacactatgtaccccatgaaaatagacagttatcatttatcaatttaaaaaatacataaaataaaaacataaaggaaaaaaaagacagcaagaaagaagtatctggagaggaatctggtgccttagaaaggtaagggaagatgagtctgaccctgaaaaagaggagaggggaagagcagtgtggtgttcatgatttt

SEQ ID NO: 242469 - DNA, 201 bp, Homo sapiens
aattatgctctaaatccttctttgagcagtggcttacagacctaaatttatcaaaggtggtggcagtaatagtaataattaccatcttcatttaaaggcacgtatctaaaccaaaggacctaaataaaatattaatttttcatagtgtttaatatgtgccagtatatataaattcaaggtaaggtagacagctgtaaactg

SEQ ID NO: 242470 - DNA, 199 bp, Homo sapiens
agaaatgctgattatgtgagttctatagcatgtttattttacaaattcctgtcgcatagcagaagcctctgccaactcccatacatggctaattgcataacgctgcttctgtgagctaaaaaggtgtttgctttaaaatgtttatggagaatgctcttatcttgcctatctgattaaaattcattcatgacatgagcaa

SEQ ID NO: 242471 - DNA, 227 bp, Homo sapiens
caaacagttctacgactcactacaatcttcatccatgaaaagaaaaattgataaattatacctcatcaaaatgaggtaaaaaaatgaaaattggggtaaatatttgcaagccactttttcaccaagtgaccggtatctacaatgtagaaaaaagatctcaaaactttaaaacagtaaaatgaataaatatataacttttattcaatatattactgggaattccagtc

SEQ ID NO: 242472 - DNA, 263 bp, Homo sapiens
ggaacaggatctggcatatagcagaacctcagtaatttcatatgctctctctcagttcatatactatagtacatagtatctatctatagatgtatgtgtacagatatcatacataatattttacttttttcatagataaatggacagcaaatctaattcactttattttgcatatttactattgtatttatttaaaagatttagcctttttactttaacttctacttatgactacctagaataaaaatgtaagacataataaa

SEQ ID NO: 242473 - DNA, 421 bp, Homo sapiens
gacgaatggacggattcgagcgaagcttatttcccttctcctaacgcatctacctataaatagcgctcaccgcgctgagtcaccaaaaccccgagtttccccaaatagcgcgtaacgactgctgggatcgcgtccctcggggctctgtgacagactccaaccacacacccgctgggctggactgcgggcccacacggcccagcgggtctctcaccacccggcgccccagggacgcgggcgaggccgcggtgtccggaccgagtcgacagcgtcggacttcccgcgcgcggacggcgctctggggaaggaggagccggcgggcggctggacctggccttgactgcgcggggtccgcccccgccccctcgggagcgcagagttgcggggggccggcaccagcctccgccctgcgccgcccgct

SEQ ID NO: 242474 - DNA, 594 bp, Homo sapiens
agcttaatagtagtttttaatagtcattgactggttttaacagtctaatatttttgttcagggaaaaagtttgaattctgcaataaaattaagaaaattttaattgaaataataaaaccatctcagtttattatttggagtatgccaagaaaagcccagggaataaatagaggcaggtgtagagaaccaaaaaataagaaaaaaaattttttaatctacataaaacagaaatattaaacaaatgattaaaaagtgcctaaatacagaaatgtggggaattctggcagagtatcctgtgagacttcttatgttgtctctcacttggaagatgttatggtgagacgaatcatgtgattcaggaaaaaaaaaattgtggagcaggagcttctaaattaaacataatcatcttgagttttgtgctgtgaagaaacattcatattgggatagtacaaagaggctggacctgcaatgaggatgcctgaattcttgactgaactccaccattaattaagctaacaacattcattgagtccaataatcacaaagtatcagactatttcacttctttcattgattagaaaaaacataaaatta

SEQ ID NO: 242475 - DNA, 466 bp, Homo sapiens
gagaataattgaaggagctggctcctagtctgttcccctgcccactagcaggtgacctggggcaaatgtcataaaagcttagcttctttatgagtaagatggggatagtaattcctgccttgcctagatcactgggtgttggtgagcatccagtgaatttatctgaaaacacaaagtgttcttgaaatgtaagatataatgagccactgcacccggccttgtgttccttctttacttcactttttcttccttgtaagtgttcaggtcaattcctcttgattgtaaaacaaaacaaagcaacaataaaaaaacacaaaacaatcaggaaaccactaaacttctgagatatctttctgacagcccaaaagatggtaggaagagaaaagtttgcttgtagattttagtgtgcattttttttgtccccaaggtgactgtcagtctgataaaggttaaagcaatggtatga

SEQ ID NO: 242476 - DNA, 530 bp, Homo sapiens
caaccaatgctatatttttggagaaatctcacgagcaatatggaacattagtgagtgttgccttttttagtagctttcagcagactccttcaagagaagggcaactctacgttggaaataactgatttgaaagcagagattaaagaaagtaacgactaggtaagagaggatctctttacctgcaaccaggagtctcataacttggaaccttgctgaaataccccatttactttgtgtactcaggttgaaactagtacaagtagagacagagaggtggctttatcaggagataggacggccatcccaagataccagaatggcctctaggtggcatctctttcctcagctgttttgaattgtctcaagacaatgttttacctatgtaggggattccagagtggatgagaataggggtgaaaataagatttcaatttacaccttttagtattgctttgatgttgtaaactacatattacttatttggaaaaataaatagaaaaatattgaataaaaacaatttaaagactcta

SEQ ID NO: 242477 - DNA, 430 bp, Homo sapiens
catgttttaaatctctttatattggagattagtaatgatattatttggatgataggagaaatttgaatatggactgaatattagatattgtattgtatcaagtttaagtttctgggtgaaataactatgttgtggtcatgtagagaacagccttgttcttaggagacacatgctgaagtatttggtggtgaagtgtcgtgatgcttacaaccaattctcaaacagttcagaaaattatacacaggtgcacatttgtctctttatctatttatctgcctatctatacacaaaatgtgtatacacaaatatttattaaaatatataccctctttttctgtgtactatatggaaggggtatatgaataattgctatactattcttgcaacttttctaaattattgatatttgtcaaaataaaacatttgtgag

SEQ ID NO: 242478 - DNA, 391 bp, Homo sapiens
caaatacatcattacccagcctcaggaattgttttatggcagtttcaaacagattaatacaatcccagttggccaaatcagcaaaatcaacccaagcagccaaatatctcatgttgaaatggtactaaaatttagtttttctgatgtagggcttggttctaagtttgagataatgaatatcttgagtcatatgtatgaatacatattggtatagacacattgtacaaatataacatttgattttatattttaaatctttgttgatttgtgtatacaacattttttagtatgtgaaaaaatttgacatatacgaaatgaaacttgcatgtgccaatgagtgctaaaaatacaagactttttaaataaaagtgtatctttcaggaacagtata

SEQ ID NO: 242479 - DNA, 337 bp, Homo sapiens
ggccgggtgcggtggctcatgcctgtaatcccagcactttgggaggccgaggcgggcggatcacgaggtcaggagatcgagaccatcctgcctaagatggtgaaaccctgtctctactaaaaaatacaaaaaattagctgggtgtattggtgggtgcctgtagtcccagctacttggatgcattccagtctgggcgacagagcaagactctgcctcaaaaaaaaaaaaaaaaagaaatacactaacactaacaacggctgatgagaaagaaagaaagaaagaaagaaagaaagaaagaaagaaagaaagaaagaaagagaaagggaaggaaagaaag

SEQ ID NO: 242480 - DNA, 241 bp, Homo sapiens
acacatgactgtaatggaatactattcttttccttcctttttattttttgtggagacagggtctctacatgttggtgcccaggctggtctcacactcctgagcttaagggatctgcctgctttgacctcccaaagtgctgggattacaagtgtgagccaccatatctgaacccctgtcccccactttttttttctttctttttttccatacacagtccaggctggagtgcagaggtgtcat

SEQ ID NO: 242481 - DNA, 400 bp, Homo sapiens
cctttcagttgctgtcctaattctaacgcttgtctcctcttcacggtcaaagacctagaaacagttgtctacactggtctccatttcctacctaccttccctctcctcaacccagtaccttcatgtgtcatttaacaaagaaagagctctgagaaatgcgaaggcaatctcatctttgtgcaaccatcacagtgcacttacacaaaccgagatggtgtggcctcctacacatccaggctctacggtacagcctattgcccctaggctacacacctgtccagcacaagactgtcctgaatactgcaggcaactggaatgctgcagtaagcatgtgtgtatctacgcacagttagacacagaaaaactacacagtaaaagtatggtacaaaagattttaaaa

SEQ ID NO: 242482 - DNA, 472 bp, Homo sapiens
tatctatctatctatctatctatctatctaaagcaaattcatgcccttctcctatttattgaatcgagaccatagacaggggtgagagaaagaatttggcaggaatggggatgtgtattatctgtggcataaggaaactttacagaactaggttcaaaagtatactttctagttctttcccatggcttttcactttgatgtagtccttatcaggtaactgaggttttatataagtcccctgattcttagaacatgaaggtgtagtagtcaaggttggtcccttgaaaccacaaattttgtgaaaaaaaattaagaaaattgaataatttcctcagcaaatacatattgatcatctgttatacagccatgagaagtggttctgttgcacacgtttattttatcagatcctaatcccaaaccaggcataaaatggaaaccatgaagataggatgaaataacttctgaatgtttg

SEQ ID NO: 242483 - DNA, 607 bp, Homo sapiens
caagtgtactgactaacctcaaccaaatgaatttctaatagaactatataatcagaaattttatcctgattttctttttgcataagtaaatgaaattatttgaagaaagaaaacttcatctacaattccaccacctaataccacgtcacatctttttttcattattcaacattcccttcaaatccatatctaagcataaacagaattttcactcaaagacatgacccaggtcctatttctcacttaatttagacaaagattttctcaaactaagtcctatagggccctagtgctcctggatgtgcctcaggagccaccacaaaggaaacctgccagtaggcagccaagtgataaggcttccttctcccatccctgactttcctatccctattcccaattcaaccagaacagttatatttttatctgttttagattttgatgctctgcatacaattttaaaataaaataaaataaaataaaaatggtgtattactactaagcatttaaaaataaaagaatgttcccagcaccttgggtggccaaggcaggaggattgcttgaggccagtagtttgagactaacctcagacatagtggaccatgtctcc

SEQ ID NO: 242484 - DNA, 635 bp, Homo sapiens
tttagtagagatggtgtttcaccacattcgtcaggccggtctcaaactcctgacctcaggtgatccacccgcctcggcctccgaaaacatttggattacaggcataagctaccgggtctggccacaactttctagtctcagtgtcatcacaaccagtttccagcttctctgacttttcttagctaccctgttgtcctatcactccctgcctcttctccagggttcaacctctggtccacttcccttctcacacttcataggaaaataccactcaagatcattgcctcccctctcaccacaacctacatctctatccaaaaactcttgatattttagttcagactgtttttagctattttactgcagagttggaatttaagagtctggagcttgcaaatacaaactttcattgcacttgattgctgctgttctgtgaactctcattaccttttccctgggtggctgctatatatcctgactggtttctctatccctagtctcatttcagatccattctcaacactcctttagaatactttctaaaatatggaaatctgagtttccacttctgctactggcagaatagttcctataagaccaacccttccacaaataaaaacagtagactattgaaa

SEQ ID NO: 242485 - DNA, 782 bp, Homo sapiens
aagacagggtctcactgtgttgcccaggctggtctcaaactcttgggctcaggtgatcccccacgcacggcagctttgacacttacttgaccctttcctcctaagctctaccctgacgctggctgtgtgtcccagagacttaatcagaagctggaagaagggctgtgacgtgtgtgacagcaggaactgctggtcaacccacagccggccagcctgccgggacgccatcttggccccaatcttggcagggagaggggagtgtatcggactctggggagagcagctgcctgcacgggcagggtcctcccgtctcaggattaacgttctcaactgtatttgatttctcctcagccagagggggtaaggtggccttcccagaagcacaggtgggccgcgtgtcagaggccctggacagcctgtgcctctcccaggcctcccagcaggggtggctctcgcccctctggaggggagaccccaggaaccggcccccgccctcagccatagcctcacagggtccttgtttctcggggcctggctctgtgggtgcacaaggcatggtcgggctcccgtccttctggaagtctccagagtggcatgtgggcagctgtgtgaagcggccccccagatcttcatccagcctggcctgcagcagctccctacgccctctgctacctcccctgcctacctttgggtagacgttctcttgacccttccttctgtgataaagcaaaagcgtgtgatctcttttctcaccaaggaataaaacgtctctgaataccaaa

SEQ ID NO: 242486 - DNA, 342 bp, Homo sapiens
aggtgaatggtttgtgagttggtcagttggatggagggatggatggatggatggaagtttggatggatgggtttagaagccatgaccccaatcggaccacccaaatgcaatatgtttactgagcacccctcctatgcaaggcactattggaaaatgcaagcttgaattagcagctggatgcctgatactaatgatataataacagctgagatttattgatttctcaccaaagcaggcactgcgccaactgcattgcatgaccgatctcatttactccttatatcaaccccaggaggtagatactctcgtaattcctgctttgcaattgtgaaaaccaagcct

SEQ ID NO: 242487 - DNA, 741 bp, Homo sapiens
taagtgtgggttttcccaagcataaataatttatgggactgtaagtggttacagccactttggaatgcaattagatagtatctttctgaatttaaagtgcatgtatccaacaattctacttctaggaatggattgttcaggaaataaaaataaaactaagtgcctagagatacatatttggggatattccaattgtctcttgtgtaccacaagagtaggtgctgtggtttgtcaaaccctgccttagaatgctatgcagtagttaagaaacaggcagatttctattggctggcagaagagaaccaggataaattgttgaggaagagagccagttgcagaactgtacatataacatgccatttttatttcacctcctccacccactcaatgaacttgccagtctgtgaacaataatatgtaatgtttataaaatttgtgtgggcatagaaagagttctgggcggggcacggtggctcatgcctctaatcccagcactttgggaggcccaggcatgtggattgcttgagcccagtagtttgagatcagcctgggcaacgtggcaagacccgtctctatataaaatacagaaatgtagttgggcatggtggtgtgcgcctatagtcccatctcctcaggaggttaaagctgaaggattgcttgagcttgggaggcgaaggttgtagtgagcccaggttgtgccactgcactccagcctgggtgacagagcaagaccctgtctca

SEQ ID NO: 242488 - DNA, 769 bp, Homo sapiens
caaagctcctggctccaacccctccttcctcctctgccccattgtcatcttgatcccccagaggtatctgctggtcagagcaggtgcaggcaggggtgggggtggattccctggagtggaatcccagagccttgtgctgttttaccccttccaactttgacatcctgcccaagaaaacctggggcaaggggtaggggctagaccccagactggtcctttaccagctcatcctagagaggcagagagcaaaagttcccaagaagactgtagtcctagctacttgggaggctgaggtaggaggattgcttgagcctgggacatcaaggctgcagtgacccatgattgtaccactgcacttcagcttgggcaacagaatgagactcttgtcttagaaaaaaaaaaagttttccagaagagaccttgagagtgcccctacacctcccatttgttgcataagtaaatgtgtatgagaccctatacagggtaatggttaagagcctgggctctgggttcaggcagatctgagttcaaatcctggctctgctgtcatactacctgcatgaccgtgagccaggttacttaacctctctgtgctttagtttcccttctgtaaagtggggaactagtgcctaccaaagtgttaatagtaaggattaaatgaggtaatgatgtcaagtgtctaacgcagacctggcacatccttgatgctcagtaaacatggcggtggcctagaaagactcagtggtttgccttaggggcccagctccct

SEQ ID NO: 242489 - DNA, 468 bp, Homo sapiens
cggccattgtgatttttagggtcagaaaattatttggaaatattttttattctgcaaatattttctatacattttttcttgagtgttttcccttagtatttagtaaaacttcttttgaaaatgctggcctgctgcacctgttctcagaggggcatgagaaaagaggattctcttcctagggctgtgggaagccccttgagatgttggaagcagggcagggcaggagaacccagggagggcacagagctgtggacgagggctgggaaagccatcccgcctccccagggggtctccgaggagtgctgctgtggccaaaccaggggggccactttgtgctttctgtttaggtgatgggatgcttctatctcctcagcaccccacaccaaatcccctgttattgccagatgatgtgcctaatgatcaaattgcttggaactcctaataataaaactttaaatctatccattc

SEQ ID NO: 242490 - DNA, 377 bp, Homo sapiens
tgtgattccttgcagcataataatccttataatttgagaaagaatactgtatttagatggtttaagtaggatgttaaacattttcagaaaatagtgtcaatacagtatttgtttctaacgtagagagttatagttttatgagctttacttattagttagagctatgcctctggaataagccaattagaggtttgttcaagatcagtgttacttcagtagagttctgtagatacacacacctccccctccatcaatcaccctaacaccctacatacctagagagaacattgagatgaaagactcttagtaactgatctctaagcttgcttcaggttgttggttttctttgttttgtttgtttgttttcctgagtcctt

SEQ ID NO: 242491 - DNA, 516 bp, Homo sapiens
cactccagcctgggtgacagagcaagactctgtctcaaaaaaaaaaaaaaaaaagtgtaagtggattaaaagagaaacttggtctagttcataatatttttaatagggctttccctggctgctggaaaacttaggccagtaagcatctctttgtttaaagtcctacaagacaatttgaaataattcattgttcatgccaaaattctaagtactgtttttcttagcaagtgtaacataatcaggaacaatgggtacgagtaaaacattctttggatgatattcagagccttattagcactgcatctgaataataggtcattttgcctcactcatttgccaaagtagccatttctaagttaaggaagtttttagataggctcatagccttgtatttcgttttagattgtaagctcaatggtagggatactatattggtaattatgttttcatatagcaaccaccacagtatattcttggtgcttaataaatgtttataattgttaacaataacctgtt

SEQ ID NO: 242492 - DNA, 427 bp, Homo sapiens
ctctaggctctttaatttctccattgagcattgtgtgagctccgctgagcattgtatggagggtcagctgccctggctggagatggttttgaggcttgttccttcgtggaaacatctggatgcagaagttaggctgtacaactatccaggggagctttaagtgagccaagtggaccctcagcaccacctcagagtgttctaagctaccgtctggtgtttgggactcagggaagtccttttggtatgatcagactagccctttatgtgactatccttgtgtgttactctcattaaaatattgatttttgccatgtaaggaagattggaatagcacaggcagccgaataaggattttaatgaaacattggagaatggcttcaagttaatctgtgaatgctttgtcattgtcccatccctggacacatta

SEQ ID NO: 242493 - DNA, 322 bp, Homo sapiens
tgagaccattgcaatgggagacttaaaagtggtataaaatgtactttgggccaggcgcagtggctcacgcctgtaatcccagcactttgggaggccaaggtgggcggatcacgaggtcaagagatcgagagcatcctggccaacatggtgaaaccccgtctctattaaaaatacaaaaaaattagctgggcatggtggcgcatacctgtaatcccagctactcgggaagctgaggcaggagaatcgcttgaaaccagaaggcggaggttgcagtgagccaggatcacgccactgcactccagcctgggcaacaagagcgaaa

SEQ ID NO: 242494 - DNA, 503 bp, Homo sapiens
tcggcacagaagacccagcagccattgtacatggggacagttccacaccctggtctccagttgcggtgctaggatggtattgttctgtgctaggaagtctcctgggaacccagaatgagttggtggggaagacagcgggtcactgtggacccatccaggaggggccaggataggcttggcctcatttctggggacatcattggagacttgaacacagagacacgtccctatcactctggcaaggccagagggaacatgtccccttatggtagagtctatgttgtgtgatttttgtgctcttgtttataatttatgcaaaccaccaagaaacccaaaccagtctgatgagtgaaaattatgcagatgctgtatggccccacaggtttctgtggtaaagaccagttggagaatgtaggagatactatgtgagtgaaaatgaatagagatccttattccactccttaatggcataccaagatgaaattaaaatctcttacaaatga

SEQ ID NO: 242495 - DNA, 367 bp, Homo sapiens
tttttaatagattactgacagaaatttctcactgctctgaacgagtttctgaagagcaggaaagacatgctgctgaagtggcagttcatttttgaagttcacaataatccactattaagaatttctacaagtaccctgaggtggtaaaaggtcaaagcacaggagttgagattactttctgatagtcacatacctcattccaaaatgtaaatccaccaatcaaaaacagaagagaacaatggtagacatgggaattccaagatggtctagagcagtgctctttaaactacaggtttgcaaagaaataaggagcttataccagaacagaaagcaacacattactttgaaaaaggcctactatcagaac

SEQ ID NO: 242496 - DNA, 691 bp, Homo sapiens
tggactccagcctgggcgacagtgtgagactccgtctcagaaaaaaaaaaaaaaaaaaaaaaaaaaaaagaaggcttgataacatttgtgcattgtgcgtagagtggttgcaagtgcagaggaaaggaatgaagatcgagggaggacgtaggagggcaattaatacactaggctctcctcaagcaggagagataggatagggtaaccatacatgcaattgcccagggcagtgctagttcacaccagtttatttacggtataatatctggatacaggatacaggataaaagtggataataatgcccaattttaatcttaaaagagagcctatttttgaataattgaattgattaccctaatcatgatgcaaataaagaagttacttgtgggaaaatatggcaaaatataaagaaataaaagatagcctggttggaaaggaagaaataaacctttgtttgaagatgacatgattgtttatgtagaaaactgaaagactcaacaacaacaaaaaaacctcctggaactaataagcaattacagcagggttgtaagagacaaggctagtatatgaaagttcatcacttttctatataccaggaattaacaagtggaatttgaaattaaaaacaatctcatttacattagcacctcagacaaaacaaaatacttagatatacatctaacaaaatat

SEQ ID NO: 242497 - DNA, 485 bp, Homo sapiens
attgagaaccaaggactttatatctggccaatctgtcattcaagtatagacgttattttaaaaagtttcaaatatgcaacaattgaggaaataacagtaactttcctaaattaaaaaagtttaaaataaaagagaatcatatacagaaacaaagcaaatatagtcaaatacacataaaacttacaacaagggttttcacattatctcacaaagcaaagacagactcaatttatgctacacagggaagacaaacaaaaacagattcagaaaggtgaaaaatagaatgatggcagcagcatggcaggcaaatgccatttccatatggaaactaaggaatacatttaaagcaaggataagaagcaaattcatggcttcaaaagctttatcaataaaaatgaaagagtgaaaataaatgaattaaatccttgacttaaaaatctaaataaagaataacgaaataaagcaaaaaaagtacacgaaaggaa

SEQ ID NO: 242498 - DNA, 310 bp, Homo sapiens
ctccagcaggacgatgcagtggtagagggtcatgcggcggcggctgcggccctccttgacgttgaaccagcagaagatgtagatgatgcccacgaccatgttgtagatgatctcctcccacttggacatgcagaagtccgtctccccttggatgacccagaaggtcatgacgcaccagtgggccacgatgaagatgccaaaatagagcttgtagacgctggcgaagagcgcgaaggccaggccgcgggcggcaatgctgaacaggtgccacagcacctgtgccacggcgcccttgtaggacagcggccgc

SEQ ID NO: 242499 - DNA, 483 bp, Homo sapiens
gcatcaaaataccagcttttcatcttttctttgagactcaggagggccaaagcaacagccttttgcttttttttttttttcttcccttatcaagggttgaaggaagggagcttactgttcagagacaccaaccccctcccctaactcaggctgagaaggaaccagccagctctcaacctcctcctggttgtttttctttgccccccaagtttatttttgttttctcccggcccccaacctctgaagccattttatcatctgtcatgtgccacctgaacctccagtgaaaacaaaaacaggctttcctgtggtcttggaaaaaaaatacaaaaaaattagctgggcattgtggcatgtgcctgtaatcccagctactcaggaggctgaggcagaagaattgcttgaacctgggatgcggaggttgcagtgagccgagatcccactgctgcactccagtctgggcaacagagcaagactccatct

SEQ ID NO: 242500 - DNA, 562 bp, Homo sapiens
ccgacaccagctgcctccaccatgctgccgaagttcgacccgaacgagatcaaagtcgtatacctgaggtgcaccggaggtgaagtcggtgccacttctgccctggcccccaagatcggccccctgggtctgtctccaaaaaaggttggtgatgacattgccaaggcaatgggtgactggaagggcctgaggattacagtgaaactaaccattcagaacagacaggcccagattgaggtggtgccttctgcctctgccatgatcatcaaagccctcaaggaaccaccaagagacagaaagaaacagaaaaacattaaacacagtgggaatatcacttttgatgagatcgtcaacattgctcgacagatgcggcaccaatccttagccagagaactctctggaaccactaaagagatcctggggactgcccagtctgtgggctgtaatgttgatggccgccaccctcatgacatcatagatgacatcaacagtggtgctgtagaatgcccagctagttaagcacaaaggaaaatatttcaataaaggatcatttgacaaaaaa

SEQ ID NO: 242501 - DNA, 394 bp, Homo sapiens
ctttggggtgatggatatgttcattatctagattggttttacaggtgtgtatatgtatatatacatatatcaaaatgtatcaaattgtatattttaaatatgtacagttaattgtattttagtagatttcaataaagttgttaactttttttattgaatttatgattttttatagaggcttgatgtatttgtgatattaagatttctagacccagaacataacctggttttttttttgttgttgttttttgttttttttgcctttgggcccttcaataagttaggtgtttttgttttttaaggtataggtcctgtcttttttaacctatttttttactattatgttttatgtgaatctgcttttttccatttctatttctagtgtttattacca

SEQ ID NO: 242502 - DNA, 780 bp, Homo sapiens
gaactggatcctgcggaccgcttctcagcggcttcacccccacaccactcgaatgcacagatcgggacacctcagctgggtgacttccctcgttgcaatcggcctcgggagcggtgcggcgtgtaccgagcggcgcccctgggctcagcgcgctgcaggcgccccgggcggatccttcaccgaggcaggactggggctggcgccagagccggtgcggagcggtgttggttcaggcgctggcgacagtgctatggccacggcaggggccgcgtgcgtctcagcggtggcgccttcggaccctattggcgcccgggacttaagcggggccgccgctgctggaccaggacgaactggagaaggagacgcgggccgccacggtgacctcgggcgtagggccggcggcggcgggcacgctggtggaagcgcgggccgcggcaggggaggacatcgggccgcagagaaagtgccgatggcctggggcagcggtgcgagggtgggaaaaacgcaggatattgcatcatagagacgcggccaccttcgcccctggagagcgccagtctcaggagcgccgcaccggtcacgggtggaggtcagccaggcctccgtaagcgcggtccccttccaggagtagccttcgcctgggctcttgagtagatgccaagtaattccgcatcgtctctctagatatctgcgctaaaggccacccggtctccttatcagaggggcaaaactctcctcgtgggtcttcatacctaataaaagtcggcatcaaaccacttt

SEQ ID NO: 242503 - DNA, 377 bp, Homo sapiens
aaaagcccctccatcaactctaaggattattatatccttagtagaaataattgcacgtgcccacactgatagtggaatgcatttcctggagtgctgcattgagatagattctgaggcaatatcaacattcataggaaaaagccctatgatcaattgttcacatgtgtatatacgtgcatgtgtgtgttgctgggggcagaggggattgtgaaccatgtgctgcatttctgccatctctcaatcagaaaaataatgaatgggtggccacaataacttgggaagcctgatcaccttattttttaataattataccccatccatacccacattgtattttcatcaaattaataaaagatgattttgcagtgtcctttttt

SEQ ID NO: 242504 - DNA, 993 bp, Homo sapiens
aaccaatgaaagtaaatagcctaagggtacaaacataagtaaatctataaattaaagcaaaagaatgataagcacaaattcaaggcagtgatttcctctagctacagagggaagggaatgaagtaaggaaaaggtgaacaaggagcttaaaagtatgataattatatgtgttggtttggccaaacagtcctggtttacctagcacagttctggtttgctgattgcctggtgtaatgattaatagcactgtcactccccaaattgtcattgtttggataatgaattatatgcatcctttttagagtaaaagtaacttttttctccttaaactggatggagggcatgtgggtctttatcattcttccttatacatgtatttttaaaatataatttaaaactagtcagtattttaaaatataatttaaaactttagtcagtgttagtcactgtgttagtgacaacacagtaaaaaaaaaaaatttgtaagataaataaatataaataggatccaaatgaaactcttttcatctgggtggatacagggataaataacatactatatgcctggcattgtattaagcttgttactgatattacttcatattcatagcaagacatttaggtaggcattattatctccattttacacatgaagaatctaagacacaaagactatacataatttaaccaaagtcatattatatgtgacagcgcagaatttgaacccaagcagtgtgacatcagactacatgctcttaactaccatgccagagcccataacagattttcttaaccttttttatgccacagatccctttgacagtctggtgaagcctatagagtcctttttagagtaatgtcttttgtacatcaaatataatgcacaggattataaataaaatcaattatactaaaatatggtaatcaaaatatttaacaaatgtatactatacctgtactttttattaatgcattaaataaataataaaatct

SEQ ID NO: 242505 - DNA, 375 bp, Homo sapiens
tgcacctgctgtgggctgtcacctgtcccctgcggggtctcataagcctcccagccgcccagccaaagagggccgagcctcgttgtaccgaggaaaccgagccgaagagcttgagtgtcagcgatgagtgggcgcgataccccagccccgaagggtggccgggcgctacctgcgcccacagggcctggggaaaccttgagtacgaatgccacgccgcggcttgtgggcgacaccaccgctgtcaccatgccccagggccacctggcaatgctgctcttttcccgtgacgttcagaatcacagggcctggggaagcagaaacgtccagctctgttaggattaataaacctggtgaatgggccacacaaatttgaaa

SEQ ID NO: 242506 - DNA, 400 bp, Homo sapiens
aggaaagaatcttaagagctgtgagacagaagcaccaggtaacctatgaggaaaacctgtcagattaatggcagatttctcagcagaaaccttacaagctagaagggattggggacctatcttcagcctcctcaaacaaagcaattatcagccaagaattttgtatccagcgaaactaagcatcatatatgacagaaagatacagttgttttcagacaaacacatgctgaaagaatttgccattaccaatggcaaactactaaaaggagctgtaagtcttgtggtggctctaaattttgaaacaaatcctggaaacacatcaaaacacatcaaaacagaacctctttaaagcataaatcacataggacctataaaacaaaatacaagttaaaaagcaaaa

SEQ ID NO: 242507 - DNA, 361 bp, Homo sapiens
acatttcagttgccaaaaagctaagtggagcctgatgagctagaaagagaaaggcatgaaacaaaactggggaggtttgcaggggatagatgaggtgggtcagtaaggaatttggattgcatttgaagcacaatgcagattcattaaagggcttttttaaaatttattttcatttttttatttttttagattgagtctggctgtgtccctcaggctgaaatgcaatagcatgatctcaggtcattgcaacctccacctcgctgaggcaggagaatggtgtgaacccgggaggcggagcttgcagtgagccgagagcgtgacactgcactccagcctgggtgacagagcgagactccatctc

SEQ ID NO: 242508 - DNA, 375 bp, Homo sapiens
gtgagaagctgcctttcatctggtttccaatggtgttaactagaaaaagagaaactaaaaagtttgcgttgagcagaaatatgtagtcaaggtattaaagcactaacagtgaacctaaaaaaggtatttgaagaaagaaggattcctggagagaagtttcactaaaaaatagcctacactgtaggacattgcgaacaaagagagttggctaaaatctggattatttgcaatggtacaaagtttttctatttgaacttcaatgaaaagttttttgtcaatttatccttgcactgaaactgtccacttaaatctaatgcatcaaagatctggcattgttaaggaagaaatccttgaactctaagcaggcctggcaaa

SEQ ID NO: 242509 - DNA, 436 bp, Homo sapiens
ccatgattgtaagtttccggagacctttgcagccatgtggaatggaatcatgtttttcccgggatgtcaaagataaactggagtttcaatcttgctatcttaacaagaacagagggagaacaaagaataaaacaagaaccaggggaagagatgcatggggcagaatccaagaaggttccaaaccaggagctttcagttacccttcctcacggagtcatggacagcgctgcttttctggcaatgacatgtgacaatacacaatctaggcatatactaggctgtaacgagatttgctctgaggacacatgctgtctgtgaaacatcttctgcttcactctgggaagaatgattgaatttctttagccacagttttgttttctgtctcaaggcgttcactgccaaggtagaagggattcagcatgttctaggtcaggtt

SEQ ID NO: 242510 - DNA, 341 bp, Homo sapiens
gtaaagaagttgcttgcttccccttcagcttctgccatgattgaatcatgtttttcccgggatgtcaaagataaactggagtttcaatcttgctatcttaacaagaacagagggagaacaaagaataaaacaagaaaataaagctgactatattaaaagaacagagactatggaaatgatgttagacaaaaaacaaattccagcaattttcttatttgagttcaaaatgggtcataaagcagtgaagacaacttgccacatcaacaacacatttggctcaggaactgctaacaaatgtacagtgcagtggtggttcaaattttgcaaaggagacaagagcc

SEQ ID NO: 242511 - DNA, 372 bp, Homo sapiens
ggtgattacagctaaaccgaattctgaaaataaaaggaaccctatgtctttgtctgctcaggctgcttctacaaacaactgtagactgagtggcttaaacagcacatactgtttctcacagttgtgggaattcaaagattaaaatctgggccagcagaaccagtgtctggtgaaggccctcttactggtttgcaggtgttcttgttgtatgttcacatggctgagagaagagggctctagtctcctactcttcttattaggatgctaaccccattgtgggaactccatcctcatctttcaacatgtgcatttgttgatgcaaacatgcagtgcacagcatcttatctaatcaagtcagttgtcccttgaata

SEQ ID NO: 242512 - DNA, 349 bp, Homo sapiens
agaatttgagggaaactttgaagcaggtgaggaaggtctgagtcagacttgaaaggcccctgaaggctgggcatggaggtgtacacctgtaatcccagccctttgggaggtaggggcaggtggattgcctgaacccagaagtttgggactagcctgggaaacatggcgagacatcatctctccaaaaaatacaaaaattagctggccatggtagcatgcacctgtagtcccagctatttgggaggctgaggtgggaggatcacttgaacctgggaagttgaggctgcagtgagccatgatcgcatcactgcacttcagcctgagtgatggaatgagaccctgtctcaag

SEQ ID NO: 242513 - DNA, 427 bp, Homo sapiens
agacttcatagactttaaccctctgtattttcttttgtaaatgtcagcaggaagaagagctaaatgtcagtgaccagctgaaattatgatcctattctctatttagtattcctaaaattacatataactacctagtcctgaaaggatatggatatgaatatttgactaaattttgggtatttggggttctcttttcagcaaaaaggtgctcctgagaatttcattttgtttcttgtttggttttctggctttcaggagcttaaaacttccttcagaggaggaagaaattcatgaaatccttccctactccctacctgtggttattgcattttctgagtgttttctgtaagccaggccctgtgataagcccataatcaaaaaaattaacttcagtttataaagtgactggaactagggaaataagtaa

SEQ ID NO: 242514 - DNA, 456 bp, Homo sapiens
taccatcaatgaaagagagggtcactacaggtcctaagaagagaagtgacacgctcttttatgtaaaaaggatgactgtggatattgtgttggtaactgactgtaagaggacacttttaggaaaagtcccctctttagatattgactttatccaagaggaaaacagtagtaattcacacctcagtagacatggtgagaagtagttgattctacatattataaagtctttgggtttaagcaaccagaggaaggacttgccatcaaatgaaatggataagcataaacaggtttggtagtagctgggagatggaaatcaacaatttctcttgagtcatactttctttgagatttccattaggtatctgaagtaatcagaaactagccaggaaaactgaaatcattgagaatttaaaacaaagggaattgatacaggtaattgatggtagaaataacttt

SEQ ID NO: 242515 - DNA, 230 bp, Homo sapiens
gggaaatacttatatttaccagtttatcataaaggatattacaaaggatacaaatgaagagatgcggaggatgagatatagaaggaaagggtgtggagcttccatgccctccctgggcgcaccaccctccaggaacctgcacatgttcagctatctggaagctctctgaaccctgttctcttgtttttttgtggaagcttcatgatgtcagcattccttcctccaggtta

SEQ ID NO: 242516 - DNA, 389 bp, Homo sapiens
tgacagctgattttttttaactctccatagttttgacttttccaaaatgccatataattggattcatacagcctgtagtcttttcagattgacttttttcacttagtaatattcatctaaggttccttcgtgtcttttcacggcttgataatgcattctgtttagtacttaataatattccattgtcaagatgtaccacagcttacttatccactcacctactaatgggcattttggttgctcccaagtttgggtaattatgaataaagctgctataaacatttgtgtgcaggtttttgtgtgtagacatacattttcaacttatttgggtacagttgctgtattgtatgatcagagtattattagtttcgtaagaaactaccaaactg

SEQ ID NO: 242517 - DNA, 300 bp, Homo sapiens
acatcaaacatatcaaatgtttttccttctactcattgagctcaattacttcaattttgaatcaaattacactttttctagagacacattataggaaaagagctttgttatatttgaaattggttaggaatttaacaaggtgaggaactttaaaattgcttaagagtctaatagctgggggtattgatacatagaaagtgctcaatatatttttattgaattaatttgcatatgctttgtattcatgggcactgaatacaaattagccaattcaataataaatgcattggttgtctttta

SEQ ID NO: 242518 - DNA, 482 bp, Homo sapiens
tcatgaatctgtctccttcactgatggagggctctttgcggacatcttggtgtctccagcatctaacacagagttggacctcagggtcccaggcctgaccctgccgttcactggctccagtggccactctcagttatctgaggttagtgtgtgaaacaaaatccctacctgatgcaaggcaaaatgaggtacaaggccgggcatggtggctcatgcctataatcccagcactttgggaggccgagggtggtggatcacctaaagtcaggagtttgagaccagcctggccaacatcgtgaaaccccatctctactaaaaatacaaaaattagctgggtgtggcagcacgtgcctgtagccccagctacttgggaggctgaggcaggagaattgcttgaactcaggaggcagatgttgcagtgagccaagagtgcaccactgcactccagcctgggtgacagagcaaactccatctcaaaaaac

SEQ ID NO: 242519 - DNA, 614 bp, Homo sapiens
taaataaaatgcaacaaattcgtgggtggaagacatgaacatgacttttttctattttaaaaaccatttgatgtattctaaaaaaagaaaaagaaaagaaaaacagaagagaaccaactaaaagagcttcccagatgtccaatagatgctgcccgaagtaaaacgcatactctaatatttgttattcaaatttgcatgtaagggtttttaacctccctttattttatacttgtacagggtaacgtattgtaactgaaacactcctcctaatttattctggctgtgaaaagcctatggaaacattcacttccataggagtaatatgtatctaaacagtatatttagggaaagcactaatagaacacaaacaactaattactgatgcttttaaggaggaaccgcaacaataattgtgcactgtcttagataaaattaatatagaatttaatatttgtagaccacaaaaaagccctaatcgtggaccgcagattagaaagaacaggctttagcacactgtgtatctttgtagtattcagactcagctgccactgcgatttccatcagctgctgttaagtaaataatatactatggaaatatgactgagtaggaattg

SEQ ID NO: 242520 - DNA, 324 bp, Homo sapiens
gtctctgtcatctccccgagcctttttcctcatctgtaaaactgagacgagaacccctatgaagggctagttttatgactgtggtcaaggtcaacctgggtctgggtgtgggaaggggttactgatatctcacagtctatcttctggtctagctgcacaggtgatagccacaggtccccaccagttagatgtagtgttggagataatcaggcaggtcagggccctcggatgccccaaatttgctttatggtttatgacattctcccttggtttgtactgacaatgctggctgggaaggaataaaaacagccaaacttcttaagg

SEQ ID NO: 242521 - DNA, 370 bp, Homo sapiens
gcaatctttagcttcttattgttttaagtctcacaatctcaaagatgactagcaaataaaggctttatattaagaagaatttataggccaggtgcagtggctcacgcctataatcctagcactttgggaggccaagaagggcagattagctgagatcagagttcaaggccagcctggccaacattgtgcaaaccccgtctctactaaaaatacaaaaattagctgggcgtggtggtgcatggctgtaatcccagctattcaggaggctgcggcaggagaattgcttgaacccaggaggcagaggttgcagtgagctaaggttgtgcagttgcaccccagcctgggtgacagagtgagactccatctcagg

SEQ ID NO: 242522 - DNA, 504 bp, Homo sapiens
tatctatctctgttcaagaaaggtgtgagggtggggagaagtctgtatttctttggaatttaatttatatccagcaactgacaggtaaataagatgtagtacatccatataatagaatatttggccatagaaaagaatgaagtactgacacgtgctacaacatgaatgaatcttgaagacattacgctaagtaaaagaagccagacacaaaagactccatactgtgtggttccatttatataaaatgtccaggatagggaaatccctagatacagaagattagtggttgcccagggatacacgggatgggaggcttaggggtgatggctaaagagtacgagtgttctttctggggtgataaaatgttttaaaattgattgtggtgacatacaactctgtaaatatactaaaaattattcactgtaccctttaaatgagtaaattgtctggcacacgaagtacatcccaataaagctgttaccaaaaaacccacaaaaattgtaa

SEQ ID NO: 242523 - DNA, 417 bp, Homo sapiens
ggaaggggctatgtgctctgtggtagccccacaagaacctacactttggtcttcactggcctgggctcaaaacccatctcttctgatgcccagctgtgtgccgggtgcagacaagtggtttcacttctgtacccttcaattctcatcagtaaacatgaggcttttagtctcttaagaagttcttgaacaaaaatgaggcaatgggctaatattttctcatacccaggccaatgcttagcacacaataggtattcaataaaagccatttttactgtgtttcttctttcattgaataaagcgtatggttgtatatctatacattgtggtaattactattatcatcacaactaataataataccccaggatttgttggccttcatacaatcataggtagctaagccaaaaaataaatgta

SEQ ID NO: 242524 - DNA, 396 bp, Homo sapiens
aagtgagcacttgggatctgtccatactaaaatattattcagtatggctgggcactgtggctcacacctgtaatcccagtgctttggaagaccaaggtaggaagatcacttgaggccaggcgtttgagaccaacacgtgcgacatcgcaagactctatctctacaaaaaataaaaaacagctgggcatggttgcatgtaccagtagtcttgctatttgggaggctgagatgggaggactggttgagcctaggaatttgagattgaagtgagctgtgatcatgctgctgcactccagcctgggcaacagagtgagaccctgtttcaaaaaaaaaattcattgtgtatctcatattcaggcataaatgactttgagtttcctgtataactgtgtttga

SEQ ID NO: 242525 - DNA, 487 bp, Homo sapiens
tctgaacagactgatgttgagtagcaagattgaagcagtaataaagcctcccatcaaagaaaattcaaggacctgatggtttcactgctgaattctagaaaacatttgaagaactaatacaaattattcacaaaatattctaagaaactgaaaatgaaggaactctttcaaacccattttatgagaccagcattgtcttgatttgaaaaccaatcaaagacacaacaaaagagaaaactacagactggttttcctgatgagtatagttgtaaaaaaaataaaatactagcaataaagattcaaaagcccattaaaaaggtaattcaccattatctagaaggattcaacccaggaatgtaaagatggtttaacataagcaaatcagtaaatgtgatacatcacattaacagattgaaggataaaactatgtggtcatttcaattgatacagagagagcatgtgacagacttcatctttttgtgataaa

SEQ ID NO: 242526 - DNA, 379 bp, Homo sapiens
ctgcctgcctcagctgggctctgacccagccagcagactggagtcctcttctgcatgaaccaaaagaactatttcagaatgtcagctgaaaagcacgatattccagatagcttagaaaccttggcatagtgccttcctggaaatcctggattgcatctaaaaccatgtggcagagggagaaacaacagacaggacatcctgagaagactcaggctgggacgaaagctctgctctccagggacaaagcagcaggggaccagccatgctcagaaatactccactggccagtgcacatttttttgagcaatttcacttgcttcctcaccacctgtccccctaacacttctattaaagtggcaaataaatctgatacccaaaa

SEQ ID NO: 242527 - DNA, 471 bp, Homo sapiens
caggtaaggaaactgaggcttagaggagttatgaaattgcccaaggtttcacagctgaaatgtataaggacctggacttgcaaatttggcacaaagttcttctaataagaggccataaaataaccaaatgattttttatgtgcctatagaaccaaaagaactatttcagaatgtcagctgaaaagcacgatattccagatagcttagaaaccttggcatagtgccttcctggaaatcctggattgcatctaaaaccatgtggcagagggagaaacaacagacaggacatcctgagaagactcaggctgggacgaaagctctgctctccagggacaaagcagcaggggaccagccatgctcagaaatactccactggccagtgcacatttttttgagcaatttcacttgcttcctcaccacctgtccccctaacacttctattaaagtggcaaataaatctgatacccaaaa

SEQ ID NO: 242528 - DNA, 1447 bp, Homo sapiens
aatggaccaatcagctctctgcaaatgggccaatcagcaggatgtgggtggggtcagaaaagggaataaaagcaggctgcctgcgctagtagtggcaactggctcaggttctcttccacgctcacgctatgggagttttgtttttttgatctttgagataacttgctgctgctcattctttgggtacacactgagtttatgagctgtaacactcttcgtgaagctctgcagcctcaatcctgaggccaccgagaccatgaacccatgggaggaatgagtaactccagacgcgctgccttaagaggtgtaatactcactgtgaaagtctgcagcttcactcctgaagccagtgagaccacaaatccaccagaaggaagaaactccaaacacgtctgacatcagaaagaacaaactccggacataccatctttaagaactgtagcactcatcatgagagtctggggcttcattcttcaagtcagtgagaccaagaacccaccaattccagatacaccacagttatcattgtactacacggctctcagcaccactgaccttggtatgggaaaaagcacaagtgtgcataccatcttattctccttttagaatatttcaccggcgggggaggggggaggtcacacctgtaatcccagcactttgggagattgaggcgggtggattgtctgaagtcaggagttcgagaccagcctggccaatatagtgaaaccccatctctactgaaattacaaaaaattagctggatgtggtggtgggtgcttgtaattccagctacccaggaggctaaggcaggtcttgaattgcttcaacccatgaggcagaggttgcagtgagctaagatcgtgccattgcactccagcctgggcaacaagagtgaaactccatctcaaagaaaaaaaaagaatatttctccaggagaactccacacttgcacaatatcttctccaaggacagaagagggacaatatttgtccttcctactggattttgaaaccctttgcactgagtgtagactgtagttctgtgacataccatgaagagtgtgtgtgtgttttaagggagctactgtcttacccaaaacctgtgaatataaagtgttttttcatgaattgctcattattcagccagtcgttaatgaattcattcaacaagtgtctctgagatgctagacactggggattaaaagaggaacaacagagacaagatctctgccctccagaaactgacagtctattgaatgagacagttgtctaacaatcacaatcaagtgtgatcaatctctggtgacaggactctaacctagaggcatgtgcctaatctggggtgactggttagggaaaacttccaaaaaagttgtgacttttaggctaaaaccagactgctaataaacataaagtgttacaggaagtaagtggcaaagctactgtca

SEQ ID NO: 242529 - DNA, 136 bp, Homo sapiens
agaattcctggaatctgactgggaccctcgcagtgaaagctgggactgttgaaaacccaatttcagtgtttgctactcaagttgagagtgcagggccaagataactagatcccaggacaggcagtttgacagtgag

SEQ ID NO: 242530 - DNA, 271 bp, Homo sapiens
agactaagaagcttcaggagagccctaaaatcctactgattctctgcaagatattggtggattcttagttatgcatgcaataaaaccaacagaaaccagcatctgggaggaaaagaattgagcagattttcgtatctgcctactgctaaggaatgagattggagttcaagttctatcaactcagaggaacttgtaagtacacagagcttttcaccgagctctcagaagggccatgccagaataatgacaaaatagaaacataaaaaccttt

SEQ ID NO: 242531 - DNA, 289 bp, Homo sapiens
gaaatcattctcaaacattctgaagcgacttaatagcattctcccacccccaccttttaaatttttaagtaatttctacaaaaatgtctgtttacgctgatttatgcaaagtgtttgtgtttctttataaatatcatcagaatagatttatgtaagatttatgaatcacaagggtcctgaattgcaaagatgtgcaatcttgatcagtatcatgtctgtaacaccatcacacaattcgatttactgagagggaaggaaatgtactaaaaagccctcactgcttctgtct

SEQ ID NO: 242532 - DNA, 512 bp, Homo sapiens
agaacagcatcactgaggaggtgacacaggagccagccatgccacgatcttgtgaccaagacactccaggtagctggaacaacaaatgcaaaggctctgagatgggctgagtatggaacactgggaagaaggcttagaaggcaggctggtgtggcaaggcttctgggagctggggtgtccgcagctggcctgtgagcactttttggcacgggagcttcaatggacagcggcggagcacaggctttggcttccaaaggtctgagctcgattcttgctctgaaactggctagccatgtgagtttggacaaggccctgcacctctttgaccctccgcttccataaccgtacacacaaacctaactcgctggactgttgtgaggacccataagggaagcatgtgactcatggaagcaacaaaatattagctcccttctcactcgcccctctcacctctgctggaatatccccacccgcacccaccaccattaaggaaaacctacaattttgcaaga

SEQ ID NO: 242533 - DNA, 340 bp, Homo sapiens
taaaaaaaaaaaaaaaaaaaaaaaaaagactagaaaagtaaaatcatctataccattaacagccagagatggaaattctcttcatgtcttgatagattttcttgtcttatcatatacatatatatgtacatacagttcttaataatttgataccacagtgtgtatagaatgttttatactctatttactgttactttataagcctataccatttttatgcccttagttgttctttaaaaacttgatttttaatgaacttatatatatatgcactattaagtagaggtactgtaatctgtttattcagcctgggtgacacagtgagactgtgtctaaaaaa

SEQ ID NO: 242534 - DNA, 409 bp, Homo sapiens
tgccagccagtctgagggattgtgcaaaggtgttcattgctagcctgcaaactaggtggtaagcaaaacttcctacagctgccactcaacttgagctaatgaaaatgcgcccagattagttaactagtctatcagaggcctgtttctctctacattatgcagaataatcttttgcaaggttaaaacagatattatgagactttctgagaatagtcgtgagaatttatggatggagggtgggctgcagggaaaatgataaatgcataatttacactgttttttcactggctagtaataatgactataatatcatgaaacattgtttttaacaaatgaattattatgccaagtagtatagatgtgaggataaaattaataaatacatgtctcagatattccttatttatga

SEQ ID NO: 242535 - DNA, 426 bp, Homo sapiens
taaaaaaacattttctgacacttcgttctgctggtaactgtagtagttttctgggtctacaattacaacatgccacaaactgagtggcttcagcaacataaatctattgtcaaacatttctggaggttagcagtttgagaattaggtgtccaatagggccatactccttctgaaggctctgcagaagaatttgttccatgcctctctcctagtgtcaggtagttttccagcaatctctagtgcttgttggcttatggcagcataatttcagtcttcatatggccacctctctccatgcacgtccaacctctctctgtataaggacaccagttatacaggactaggaaccaccatataccaatatgacctcatcttagtaattacatctgaaatgaccctatgatcctatttccaattaagataaga

SEQ ID NO: 242536 - DNA, 691 bp, Homo sapiens
gtttctagagtctgggaactccaaatggtaccatatcacggcctccttttacggcgcactctgtgtaaagcatggcggtaagcaccttccatggatagtctcccttaattccacttctgggagtagaagatgatcattttaccttacagcagtaggtctcatcagggggttctgattttgttggtctgggcaagccctgggtatttggacttttaaacactcccccagtgattttaatgtgcagccaaggtcaggacctcttttacagtcaagggaattgaggcttcagaggtcaaagtcactggcccggggtcaccaagctgtgtggggaggcacagttaaagcacaggcctgtgtgactgcattgtttgaccctggggccctcctgctgctgccaatcagaaaatggtcaggaccaggcacggtggctcaggcctgtaatcccaagactttgggaggccgaggtaggcagatcacttgaggccatgagttcgagattagcctgggcaacgtagcaataccccatctctactaaaaatgtaaaaattagctgggcatggtggcacatgcctgtaatcccagctactcaggaggctgaggcatgagagtcacttgaacccaggaggtggctgcagtgagccaagattgtatcactgcactctagcctgggtgacagaaagagactgtctca

SEQ ID NO: 242537 - DNA, 369 bp, Homo sapiens
tgattttagataaagtagtcatggaagcttggtcattactatagtcttaatgttattttttttaaaaaggggatttagttgggctgatttcctcccctaaaggtcctctgtcaccttatttaaatttaaaactggttttaccagaaaataggtaaacaaacaccactggttgtctccagtctcttttcttgctcttcctctccctcttctttaaaaatgtggctgatgagaacctgtttccaggagccctttaatcactctgaaacacacagacactgaaaatgttgaagcataaaaataaaccttgcgttacagggagattgcctgtgtgctgtccacttcgcttataacagtgaaagtaggagatta

SEQ ID NO: 242538 - DNA, 519 bp, Homo sapiens
tttttttttctttttgagacagagtcttgccctgtcgcccaggttggagtgcagtggcgcaatctcggctcactgcaacctccacctcctggattcaagcaattctcctgtctcagcctccctagtagctgggattacagtcacacgcccagctaatttttgtatctttagtagagacggggtttcaccatattagtcaggctggtctcaaactcctgacctcaggtgatccacatgcctcagcctcccaaagtgctgggattacaggtgtgagccatcacaacccacctcaaaatatcatggcatgagccaccgtgcctggccatttttctttttctctagcagttattgaataagcactggccttgagataagcaatattgaaaacagttgcagctcattcaccaccaaatgctaacctactgattcctgttccacaagccgtaactacagctttgactggacaagagagctatttcagtagctatcaacaagttagtggtctcctgataagaagac

SEQ ID NO: 242539 - DNA, 353 bp, Homo sapiens
ccaggttgtagcctgtgtcaggatttccttccatctgaaggccgaagaatcgcccattgtgttcacatactgccttttgtttagccattcacgcaccaatggacacctgggccgctcccatcttctgcagccatcctttcctgaatgtgcagtgtgcctcgccaacctggccccgtctgcctcagccacccagcggccttcctccctgcaccagtcacctaccttgaaggatttttcttttttatcaggctagagggcagtggcgtgatcatatctcactgcagcctcaacctcctgggctcaagtgatccacccacctcagcctcccaagtagcaggaactatggacatgca

SEQ ID NO: 242540 - DNA, 396 bp, Homo sapiens
ctcttgcctacttccagtcccagagaatggggtgcagggaggagggtggaggagggtagaagaggggacagaggagggatgcgaggtcaagggtgtgggggagaagagcaggaccgataatgcagagcagctaattcctgaaaactataaagtgggtggctttgaaggcctgaagggctgtgcccaggtgtgcaatggagaaaggggtttgccagctctttgctgggcaccagggatctagggttctgagaggagtcccttatccaaggtggacccggacaaggagataacgaaaacataggtagcatccaacagcatgcagcactatggcatgccagcagccgtgctgggcgttttacagatctctttcaggctcagaacaaccttgcacatgag

SEQ ID NO: 242541 - DNA, 471 bp, Homo sapiens
caaagaagtgctcacagtctttctggccggccagtaagtgaatgatttcaggcctggtgggcaatacttgtgtccatgcgtaacacagcccaaccacagtagtaggcagctgcatgtaattttgaactccactcattgaactgtaataaaacaatataagcactgcttggggggaagattggatgcagttatccttacacaaggctcaggcatatgaaagcagtgctggctgacaagaggattttgagatttgattttgattgaattgcagaattgaacaggccaggaatgtcagtggaaggctaaacgcctgtagtgccataaagttttattcatgtgaggctttccaatatcaagtagatggattattggaaaaggtgtcaagggacatgaaatggaagtgcccaaaacataaaatgtaggcaggagggagaaattacttcttgcttagtatatataattaggtcttca

SEQ ID NO: 242542 - DNA, 413 bp, Homo sapiens
tgacaaaactaaaattgagctaaagattaacaaactattctcagtctgaacgaacaaaatacaaaagaaacaggatttaaataacagaattaataaatgttagataatagatacatagcaagaaatataggcctggtgccctggctcacacctgtaatcccaacagtttgagaggccaaggcaggaggatcacttgaggccaggagtttgagaccagcctgggcaacctacggagacccttgtctttacaaaaaatttttaaaaattggccaggcatggtggtgagtgcctgtggtcccagctactcgggaggctgaggcaggaggatcacctgagcctgggaaatggaggctgcagtgagccatgcactaccactgcactctagccagggtgacagaacaagaccttgtctc

SEQ ID NO: 242543 - DNA, 797 bp, Homo sapiens
tctgtaccgtcttcattatactacccttgagacagagttttgttctgtcatccaggctggagtgcagtggcatgatcatgactcactgcagcctcagcctggtgggctcaagtgatcctcccacctaagccttcctagtagctgggactacaggtgcatgccacggagctaatttttgtattttttgtagagatggggttttgccatttgtccaggctggtcttgaactcctgggctcaagcagtccgcccaccttggcctcccaaagtgctgggattacaggcatgagccactgtgcctggcccatcttctttgagttgttcagtgtttgtttctttgtggatgttattttagtgtttgtagccttagaatgtataaggtttgggggattcctttgttgagatgaggtagtggtgaagattttgaaaacagttaggaattaactaatttgaattagctaataacgtaataatagttaggtaataactaatttgaattagttacaataccctgaaaacagtttgtgtcttacagaagaagcccttagggcaagagtaaagtagagcagtaagaaacaaaacaataacaaaagtgtgtttagtaaatccttataactggagtacatatttagaaattcgctatctgtagcatttaaaagttactattttggctgggcgtggtggctcacgcctgcaatcccagcactttgggaggccgagatgggttggatcatctgaggttaggcgtttgagaccagcctggccgacatggtgaaaccctgtctctactgaaaatac

SEQ ID NO: 242544 - DNA, 590 bp, Homo sapiens
aaaatgtaaaaagtaatatcagtggttgagtctatgacatttacactggttagtatggtaatgttatttctcaagtattggtaactgagcaaattctgtcttgatatatgtcagtgcagtgacataatcatggctcactgcagccttgaactcctgggctcaggagatcctcccacctcagccttctgagtagctgggacaggtgtgtgtcaccacatccagctaaattttttaaaaatttttttgtagagatggggtcttgctttgttgcctaggctggtttcgaactcctggcctcaggtgatcctcttgcctaagcctgtagaagtgctagattataggcatgagtcaccaggcctggcccttttaataagctagaataagagaactataaatgttatgattcattgtatttatataaactattatatttatgataaggaatagcattaacttttttggaagcaaaatttgtttataaaagtttttaatgtcatcattgaaatactttgcaaggcttttgaaaatgttctctttggtttttgaatgttatgtattttaaatgtatgtgatgtacttgaaacaaaaaa

SEQ ID NO: 242545 - DNA, 547 bp, Homo sapiens
taatatgtatgcgttcatcaactttttttgagacagggtctctgttgcccgggttggagtgcatggtgcaatctcagctcactgcaacctccatctcctaagctcaggtgatcctctcatctcagcctcctgagtagctagaactacaggcgcacaccaccacgcccaactaatttttaaattttttatagacatggggtctcgccatgttgcccaggctggtcctgatcttctgggctcaggcaatccacccacctcagcttcccaatgtgctgggattagagacgtgagctactgtgcctaggcccaaattatttttcaccagatgaatggataaacaagatgtggtgtacacaaaaaattgaatattattcctccatatggaatattatatgtaaataatatgctatataaaaatattccaatagattattcctccgtatgcttacaatatggatgagccttgaaaacattatgctaagtgaaataagccagacaaaaaaggaaaaacattgtgtaatcccacttatatgaagtatctagagta

SEQ ID NO: 242546 - DNA, 346 bp, Homo sapiens
tctttccttggctggaaacaagtgcaggaagctcccctcccaatttcttatgctcccttcccccttacactcctctccttcgactgctcccttcccccttcttatgcccctctcagaccacccagcggatgcctattcccgccccccacccctcccctgcgtctccttgtaaagttccatgagatgctcgaggagcacctgctggtggggcacccagcactctgctgggcatcaccctccgcacccctgacatttctctccacctccagaggcttggaagggaacagggcagatgaggcccttcacccaccatctacgccatatacccatcaccatcccatgagga

SEQ ID NO: 242547 - DNA, 175 bp, Homo sapiens
caagtcagttgcaaaggctggtatttgtttcttctcctccaatggttttgaccccatcccaccctagccactgaaatcctaaaaactcacaatttctaataattgcaaaccatgcataatctaatttttagttatctaatttccatcttccatctgctgtttccagctttcttac

SEQ ID NO: 242548 - DNA, 431 bp, Homo sapiens
cagtactaaaaagtatcaaggacctgaaaaaacaaggaaagtctgagaagcttttacagaacagagaagactaaggagacatgacaactaaatacaatgtgatatcccagattgacagtgaaaaaaggacatgagtggaaaaaaattggctaaatctaaacaaagtctggaattttgttaatagtattattccaatattaatttcttggttgtgacaaatgtactgtagttatgtaagatgttaacattgggggatgttgggtaaaggacatacgagtattctctgtactatctttgtaacttttatgtaaatctgaatttattccagaataatgagtttttttaatacagcagaatacaaattgttaagtaaaacatatctcaaactgataattgatgaaataagaaataaaggttatttactatttgta

SEQ ID NO: 242549 - DNA, 370 bp, Homo sapiens
agaccatattgaaatacgcagagaattccatggagactctgatggctagggcaccgttgagctgttgcaactgttctgctgatttctatcatggaaaatatccctgcaagcagtaaccactatttgaatggtgaaatcagcagcacagcaaacatggttcttaatgagattgttttgcatttaaaaattttatgcaccaggcattttacaatgcaaatgatcttgctttttaagccaatattatccttttaagataattttgataatgtagatatcgttcatcgtgttttgatataagttttaatcaggcaatatttcaattagatagaagtatgtacaaaagtaataaactatatctctgaatgaacaa

SEQ ID NO: 242550 - DNA, 495 bp, Homo sapiens
actattttttttaccttgcagagctgtaatgtagataagatcctgattaagtgttaatcacaatgtggttttaccttcataaaatcagggtttctccccgtaggaggtgtgaatataattctcgctaatagaagagagtcttattgttggagttcttcggtgaaatgtcagcagcaggtctccttgaccagctgagccccagaagaggagtgaagtctttgttccagcttgagtctggatttccttgaggtatttgggcctcactttccccagcttttcaaatggggatgaggctgtcaggcatagcatgcagccaaagaggagagttgtgttggtagtccatgcattccttgaggacagatgtgtatcaggtacctattctgagccgggtgctgctctctgagctccacatacagcagtgaacagactccttgtgctggggagaggcagacagtaaacagactagtaagtgaacacgataattatagtttatgg

SEQ ID NO: 242551 - DNA, 587 bp, Homo sapiens
agaggctgcttcctgctgtggacttgattagcagccccatggacagtcactggactgttagcgaggcaggagtccagaggagccagggtgacaccattttaaaatcagcaccgtcttaaactagcaaggcacactccttgccacacacaagccatggtcctaagatgtttacagctaaggaagcagcttggtgatgcctgcaaagcaaactccaagaacagaaagtccagacgtccaatacccataattaggtctatgctttcaagatagtaagagtcatgctatgatgactgacacactaaaatgtcaaggatggttttctttaaaccaatagaatgataaaccttgtcatgctctctgctcagctgcacatatgcacagcttcacttcgctttgcagacaagacttctgtgtaagaaaaatggaaaaagaagttggtgtgtcctctgcttgctttctgctctgtaacagagtcatttctaataaacgtgcctctttcactgtgctctgtgactggccttgaattccctcttgtgtgagatctgagaagcctctcttggggtagagaccccctcttccaggaacag

SEQ ID NO: 242552 - DNA, 296 bp, Homo sapiens
atgtggctagagaggccttacaatcatggcagaaggtgaaaggcacatcttaggtggcagcaggcagagagaatgagagccaagtgaaaggggaaacctcttacaaaatcatcagatcttgtgagacgtattcactaccaagagaacagtataggggaaactgcccccatgattcaattatttcccactgggtccctcccacaacatgggggaattatgggagctacaattcaagaggagatttgggtggggacacagccaaaccatatcgttggtgatatgaatggtagtttgga

SEQ ID NO: 242553 - DNA, 366 bp, Homo sapiens
aatggttggtaaaaggttttgggcgttcgtttaattctgtcagctttgctataagattgaaaatttttaaaattgaaagttggagagaaagccaacaacattaaacaatatatcatttaaagatgcatatttatgtgacaaaaactaaagaaagtttttaaaacaaagtataaacacacaatttaggagagtggtttactttgggtgaagcagggacttaagatagggaaaggaccacataggtggttcagtgtgttggcagtgctctgatttgtatcatggattcatgagtgttgatttagttctactgtgctttgtgattttcatatatgtgacttatttgtatatatcaaacattatattaaa

SEQ ID NO: 242554 - DNA, 792 bp, Homo sapiens
cctgttcccactttttgttgttgttgttgttctgaactgttaggccacagaatgattgtggacctcataatgtgcaatctacagaacgtcagccacagaatgatttttggccaggattttgcttccctgggtaaagcagagaaactctcctgtgggatcctacctctccagtgcagtctgtgggcacggctttcctagttagtaaaaaaaataaagtaactagcatgatgatagactttaactctatcaataattgcattaaatatacataatctaaacacatcaattaagagaccaagattgtcacattgaataaaaaagcgagacacaactagcagaaaacctacatatatgtgtgtgtgtgtatatatataaagacatagacaatattttatatatagatagatagatagatagacatagacaagttaaaaataaaaggatggaaaagatattaccatgtaaacactaaccaaaagaaccgtgaaagggctgtgttaatttggacaaagtaaacttcagaacaagcactattactgggaataaagggggatattacataaatatagaggggttaatttagatacacaaaaataacaactcgaaatatgcatgcatctaacaatggagcttccgaatacttgaagcaaatatacccttagggcatgggattttaagaatggagtaaggagctcaatggaccacctcaacagacagtactttaactaatgagaattattttttaaaaagttattaaagttgcaggaaattattcattcaaaaaaatgttgt

SEQ ID NO: 242555 - DNA, 350 bp, Homo sapiens
tctccagcatcaggcttctataatgatgcattttcttatccaccctgtgataatctacccgaacattttatttttcaccttctttctagtcgaggtatgatttatataatttgttcctctaaagcagggtataaaaaaaacaatccaagtgattttcttggtgccatgatgtcaagtagaactcagatccacctagaaacattcaagtgttcatggaccacagtgtattctctagaggctgaaggtacacaagaatatgacacacctccttggcaaaaaacggtgcaatggtctacaaagggctcttccagcccctctcgtttcttctgaacgaggcgctcagatttaaa

SEQ ID NO: 242556 - DNA, 329 bp, Homo sapiens
cggcacgagggctagagggctctgcttgcttgttttgatgaacaagtgatcactcggaggcccacatagacaggaactgatggcagcctccagccaacagtcagtaaaaaaagtgaggcccacagtccaacaggcacaggaaactgaatcctgccaacaaccatgtgagcttagaggtggatacttaccactcagctttcagacgagacctcagccctggttgacactttgattgcagcctcatgaaagaccttgaagcaccacccccagttaagtcctgcctggatccctgacccacagactgtgagataataaatgtgtgttgttta

SEQ ID NO: 242557 - DNA, 505 bp, Homo sapiens
aggggcagtgctaagagggaagtttatagcattaaatgcttacagccaaagaacagaaaaatcaaattaacaacctaacatcacacctcaaggaactagaaaaaaaagaacaaagaaaactcaaagctaacagaaaacaaataacaaatcagggaagaagtaaatgaaattgtgaacaaaagaacattataaagggtcaaagaaacagaaagttggttcgttgataaaataaagttgacaaactgctagctagactaatcaagaaaagaagacagaagatccaataaacaatcagaaatttaaaaggagacattagaactgataccacaatacaagtgatcatcaaagactaccatgaacatctctacactcacaaactagaaaatctagaagacatataaattcctggaaacataaaaccacccgagattgaacacatagaaatcctaagcagaccaataacaagtagtgacacttaatcagtaacaaaaaagtctcctaagga

SEQ ID NO: 242558 - DNA, 1121 bp, Homo sapiens
  misc_feature (286)..(286): n is a, c, g, or t
  misc_feature (746)..(746): n is a, c, g, or t
tttctgataaatattccatctgctggtgttacctattgcccaaagataggtatgaatcagtcttaggattttgaaaaatctttatattggtagctaactcatttttaatgttgtgtaattttttatatttgttctcttttttcttaacttttgcacaattcatttgtcctggtgtattttatacttatgtattgatttcaaacattttcaatctatattttataattattatgtttcctgttgctttcttcattttgtataatgcttatcttgatttacaagtttnacttaaccagtaaaataaatattttaaaatttgagttaaatgatttttatactgtttcattataagaaggatttatattttaaaactttattaacattattatactctgttttaataataaaataaagttataaatattaatctattttattccattattttgctcattttgaaatttatatctttaattttcaccatttttaggtaatctgcaatcttaattttgattttccttttgatgcaaaatgaattttaaacatttatctttactctcaaattttagggtattacataatctttctttctcaccatctgttacttttacttaaataccattgtattctgataattcagcctatacaactgtggtttttatttattgagatttaatttttatgataatatgtgaaggaaatttgaaaggttttatggacattataaaaaagatccttctcttgcngagaattacaggctttgaaaaatatatcaagaaaaagaaacagagagatctatgtgaatatatacacaaatattattaaaactactgataggtcggccgggtgcgctggctcatgcctgtaatcccagcactttgggaggctgagatgggtggatcacaaggtcaggagatcaagaccatcctggctaacacagtgaaaccctgtctctactaaaaatacaaaaaattagccaggcgtggtggctggcgcctgtagtcccagctactcgggtggctgaggcaggagaacaacgtgaacccaggaggcagagcttgcagtgagcggagatggcgccactgcactccagcctggacgagagtgctagatgccatctc

SEQ ID NO: 242559 - DNA, 447 bp, Homo sapiens
tacagttaactgatcttcaacaaaagtgccaagatcatacaactgagaaaggacagtctcttcaataaatggtgctggaaaaacttgatatccacatgcagaagaatgaaattggacccttatttcatcccatatacaaaaatcaacataaaatggattaaagacttaaatgtaagaccagaaactataaaactattagaagaaaacctagagacattgacattggtcttggcaaagattttttggatatgaccccaaaagcacaggcagcaaaagcaaaactagacaaatggaattacatcaaaccaaaaaaatagcttcacagcaaaagaagcaatcaacagagtgaagagaaaacctatgcaatgggagaaaatatatgtaaatcatacatgaaataaggaactaatatccaaaatatataagaaattcaaacatctgaacagc

SEQ ID NO: 242560 - DNA, 531 bp, Homo sapiens
cttggtctcaaaataaacaaaaaaaggtgggggagggtacctgcctaattcccacctaacttgacatttaaatttgtttgaatacttaggcttccaagtattttggttacaagatattttcctgtgtactggaatcctcaatagagtaaaaatacttttttgaagcctgtaaccttcctttctgtcttctcaagaagttgtggtaagcgagagagttcaagtcctggctctactactagttaggtggtgaccaaatatcaagtcacttacccttctcagcctcagcttctacaactgtaaaatggggatgataaccaggcagagttggtgtgacgagttaacataatactatgccaaaggactgtataaatgtcaagagattttcattacctactccagcactttacaaatagtaggtgttaagttaatgtttgtttaactgaattgtataatgatcttgggaatataaagctaattttactttgcattgattgaattaaaccaggctctttctctgggaaattatgtctc

SEQ ID NO: 242561 - DNA, 1843 bp, Homo sapiens
  misc_feature (163)..(163): n is a, c, g, or t
  misc_feature (786)..(786): n is a, c, g, or t
  misc_feature (807)..(807): n is a, c, g, or t
  misc_feature (1790)..(1790): n is a, c, g, or t
  misc_feature (1840)..(1840): n is a, c, g, or t
gatgtgaggacacatagagcatgccatctatgagaaacgggctctcatcagacactgaatctgctggcacgttgaccttggactttccagcctccagaactgttcccatagaagaaatggtttccagaatgcagaagtggtccatgatgccagatgttgcagnaagagcaaataaggagaaaaagaatcctgcccaggaggcctcccaccccgacataggagggcaccacccacatggcatcagcctgcagctgatttcatattccatgctcatgacatagtaccttataggacatgtcacaactcacgccttccccttatccgccatcggggatagaacagaaagacataagcaccggcatgggcctattccacagccaaggcaggcaatgagctctcaggtacttgcaacaaactcgagtgtgcattcggtccaggaggaagagcccgcacccttttttgttgctgttcagtgttaatccttcggtggaacccaccaggacagcagtctcagtgctgttgtttttgacagggagaacatcccagggcagaaaggaaagcctaaagctacagcctgttcctctagttcttagaacagctggttactgagctctcaggccagacactggatcccggagagcttgtccactgcaacagtgcaacacgctaagggctgtgtggcggcacaggggctctgagctcctgacctgagtcatggggacctgaaggctgacacccagccctatacctacaagctgggtgagacccctggcagttgcctacacncctgctgagacccagtacctncctgtaaaatgggggaaataatgcctgcctcacagggtttcgatgaagggaaacatttggaaaccccttggaggagatctgccacatggcctccagtgaactgtagactcctgcatagccttccaaagttcttcatttggtgaatattatgagaaatgacacgtatgactttctcccaaatacgtggcttaaacccaaagtacagtgaaatcagaactgaccacacagagtaattggggcaagggagtatttgtgacacaaagccctcatcactttataaaagtacttgctactgattacattgaaaaccagtcttcctgagtaaaacatgttttttgttttgtatcgtttttgtttttgtttttttgagacagagtctcactctttgacccaggctggagtgcagtggtgcgaacttggctctccgcaacctctgccttctgggttcaagcgattctcttgcctcagcctcctgagtagctgggattacaggtgcccgtcaccacgccagtctaatttttttgtatttttagtagaggcgaggttttgccatgttggccaggttgatcttgaactcctgacctcagatgatccacatgcctcggcctcccaaagtgctggggttagaggcattaagggaggagaccacccctcatattgtcttatgcccaatttctgcctccaaagaaagaaaaagtaaaaactgaaaggcagaaatgaaatccacaagcagacagcccggtgccacaccctgggcagatcgacccctgacctaatcggttatgttatcgattacagacattggatagaaaagcactgtgaaaatccctatcctgttttgttcagatcgaattaccggtgcatgcagcccccagacacgtaccctctgcttgctcaatcgatcacgaccctctcacacgcacccccttagagttgtgagcccttaaaagggacaggaattgctcactcggggagcttggctnttgagacaggagtcttgccaatgcccccagccgaataaaccccttccttnttt

SEQ ID NO: 242562 - DNA, 1368 bp, Homo sapiens
  misc_feature (163)..(163): n is a, c, g, or t
  misc_feature (786)..(786): n is a, c, g, or t
  misc_feature (807)..(807): n is a, c, g, or t
gatgtgaggacacatagagcatgccatctatgagaaacgggctctcatcagacactgaatctgctggcacgttgaccttggactttccagcctccagaactgttcccatagaagaaatggtttccagaatgcagaagtggtccatgatgccagatgttgcagnaagagcaaataaggagaaaaagaatcctgcccaggaggcctcccaccccgacataggagggcaccacccacatggcatcagcctgcagctgatttcatattccatgctcatgacatagtaccttataggacatgtcacaactcacgccttccccttatccgccatcggggatagaacagaaagacataagcaccggcatgggcctattccacagccaaggcaggcaatgagctctcaggtacttgcaacaaactcgagtgtgcattcggtccaggaggaagagcccgcacccttttttgttgctgttcagtgttaatccttcggtggaacccaccaggacagcagtctcagtgctgttgtttttgacagggagaacatcccagggcagaaaggaaagcctaaagctacagcctgttcctctagttcttagaacagctggttactgagctctcaggccagacactggatcccggagagcttgtccactgcaacagtgcaacacgctaagggctgtgtggcggcacaggggctctgagctcctgacctgagtcatggggacctgaaggctgacacccagccctatacctacaagctgggtgagacccctggcagttgcctacacncctgctgagacccagtacctncctgtaaaatgggggaaataatgcctgcctcacagggtttcgatgaagggaaacatttggaaaccccttggaggagatctgccacatggcctccagtgaactgtagactcctgcatagccttccaaagttcttcatttggtgaatattatgagaaatgacaccgaggtgactggcacatggtcgaggcagctgcttaggcagcttaagcatgccctgtgaaacatccctgtgggggactccgaccagcccaggcaacgcggatcctgagaacgctcccgggtaggcatctgcccctgtgggatgcctcaccagagcagtgtgtggcaggcccccgtggaggaccaacacagtggctgaacaccgggaaggaacaggatcttggagtctggacatctaaaacttgcacatgtaccacccctagaatttctggtaaaccagcaccagcctgaagatcacgttctcatcaaacggtggaaagaagaaaaactcgagccaacctaggaaggaccccaccttgtgctgctaaccaccaagactgctgtttgtacagaaaaaaaaaa

SEQ ID NO: 242563 - DNA, 1350 bp, Homo sapiens
  misc_feature (163)..(163): n is a, c, g, or t
  misc_feature (786)..(786): n is a, c, g, or t
  misc_feature (807)..(807): n is a, c, g, or t
gatgtgaggacacatagagcatgccatctatgagaaacgggctctcatcagacactgaatctgctggcacgttgaccttggactttccagcctccagaactgttcccatagaagaaatggtttccagaatgcagaagtggtccatgatgccagatgttgcagnaagagcaaataaggagaaaaagaatcctgcccaggaggcctcccaccccgacataggagggcaccacccacatggcatcagcctgcagctgatttcatattccatgctcatgacatagtaccttataggacatgtcacaactcacgccttccccttatccgccatcggggatagaacagaaagacataagcaccggcatgggcctattccacagccaaggcaggcaatgagctctcaggtacttgcaacaaactcgagtgtgcattcggtccaggaggaagagcccgcacccttttttgttgctgttcagtgttaatccttcggtggaacccaccaggacagcagtctcagtgctgttgtttttgacagggagaacatcccagggcagaaaggaaagcctaaagctacagcctgttcctctagttcttagaacagctggttactgagctctcaggccagacactggatcccggagagcttgtccactgcaacagtgcaacacgctaagggctgtgtggcggcacaggggctctgagctcctgacctgagtcatggggacctgaaggctgacacccagccctatacctacaagctgggtgagacccctggcagttgcctacacncctgctgagacccagtacctncctgtaaaatgggggaaataatgcctgcctcacagggtttcgatgaagggaaacatttggaaaccccttggaggagatctgccacatggcctccagtgaactgtagactcctgcatagccttccaaagttcttcatttggtgaatattatgagaaatgacaccgaggtgactggcacatggtcgaggcagctgcttaggcagcttaagcatgccctgtgaaacatccctgtgggggactccgaccagcccaggcaacgcggatcctgagaacgctcccgggtaggcatctgcccctgtgggatgcctcaccagagcagtgtgtggcaggcccccgtggaggaccaacacagtggctgaacaccgggaaggaacaggatcttggagtctggacatctaaaacttgaatttctggtaaaccagcaccagcctgaagatcacgttctcatcaaacggtggaaagaagaaaaactcgagccaacctaggaaggaccccaccttgtgctgctaaccaccaagactgctgtttgtacagaaaaaaaaaa

SEQ ID NO: 242564 - DNA, 397 bp, Homo sapiens
ggaattgcaaatgcatgaaatggcacccattctagactagtcacggcagtgttggtgatggtcacagaccgggaacgaccctgacgtttatccatagagaactgggtcatgagccatgatccacatcatggatactggtcagctgtggcaaagaatgaggtatccttctgtctgtgcactggggaaggtttccaagatacaccgcacagtgagaaaaacaagaagcagaacagtgcacggtgtgctacctcttacattacaaaggaggaaatgtaaaattaatttacaaatggccaataagcacatgaaaacatgctcaacatcactaatcattaggaaaataaaaatcacaactacagtgagataccaccttacatccattacgatggttgttctc

SEQ ID NO: 242565 - DNA, 424 bp, Homo sapiens
tctgcagagcttcgatggtgagaggaggaactcgatttctcgttttctggagttgggatgtagacatagagagatctgttacatctgagatgaaaaccctgcacaattcacgttagggttggccaattgtttgcttgaccttaaatggttagtgtggtttaagcttccccaaaatgcgctgtgagctgagcttccacttttggaatgattgcagaattcggtgcttaagagatgagaaacttcgttctaccagtaatggaagaaacgcttcaccttaatcaccctccttgtctttcccctccctttgactatgtaggactcgataacacaacatttgaaagattctactctatgaaataagcacagattgaaattcagtatttgccaaggaatattaaacatgaattactgggattgaggaaag

SEQ ID NO: 242566 - DNA, 481 bp, Homo sapiens
aaaaagacggcttcatggcaacctttatcctgcacctgggcatttctccctccctgacccacatgcaggcgggaaataggcagaccctggagaaggctgctttgagaacaaattacggatgcctggtcattgggcagagtgaggtcagagcttggaatgtgtggacttctccaatgaccagttgtgttcctgtgggcgcttgtgctgtaggctctgggaaagaggccatggggactgagcattcttagccataactgtttccacatctgtttctgaaataaagcagagatgagaggagggaggagaggacgggagagagagaatatttcactttgctataacactttgcattgctcaccaagcgcagtggctcatgcctgtaatccaaacacttcaggaggctgaggctggaggatgggttgagcctaggagtttgagaccagcctgggcaacatagagagaaccctgtctctaccaaaaa

SEQ ID NO: 242567 - DNA, 350 bp, Homo sapiens
tcattgagactgagtctcgctttgtggcccaggctggaatgcagtggcacgatctcagctcaccacaacctcctcctcctgggttcatgcgattctcctgcctcagcttccgagtagctggatttacgggcaccagcaccatgcccagctaatttttgtatttttagtagagatggggtttcatcatgttgaccaggctggtcccaaactcctgacctcaagtgatccacccgcttgagcatcccaaagtgctgggattacaggcatgagccaccacactcagcctaagaaagctttctcttaagcctgcccccaagaattagatgtctcatctctgtgttctcaccgga

SEQ ID NO: 242568 - DNA, 484 bp, Homo sapiens
agtcctccctcctcagcctcccatagtgctgggatgacaggcatgagccaccaggcctggcctgatttgtacttttaatatggtagtgtctttttccctaaaagtgggtgtggtgaatatcggttgtttttctgcccaacacctccccctttttgaggggaacgtctcctctctctgctcaaaccatgggtttctagtggtgctctctaaagtaatattctggccaggcacggtggcttaagtctgtaatcccaacactttgggaggccgaggtggggagtttgcttgagctcaagagtttgagacgagcctggacaacacagtgggacctgagaaggcatctgtttactgccttctttttaagtggtggtggtgttcttgttgttttgagacagtttcactctgttgcccaggcttgagtgcagtgagccgagatcacgccactgctctccagcctggacaacaagagcgaaactccatctca

SEQ ID NO: 242569 - DNA, 411 bp, Homo sapiens
gtttttgtttctgttcacttttcctgagaagtccatcttgccctgacaacatgactaaacgttttggaaagaccacatactattaaactttcattgaatgccaacagttacattgcatcgggaagtatctgttgaaaagtctatccaaatttccctctcattcatgttctgaaagtttctaattacagggcagggaaaggaaaaaaagaaaggaagaaaaaaaccctgtgagtttcacatctcttacttcagacttaagagactttgtacactcactaagactggttatttagcttagttataagaaacaaaggaatagaaaccctgctattttatgagtattcatgagagtggttgtgccaactagttgcagtaaggtttccagaactgagctaattctgggacaaaaaa

SEQ ID NO: 242570 - DNA, 528 bp, Homo sapiens
agagttacaacttcacacgcagcgtcgacgtccacatccaattctgtgtcttagccaaatgacataaaaatcaacttgagaaaaatacaaagtaatgtccttctgggagtttatttgcagtagtgtctggtttgtggctaaaattctggacttgaaattaggagagctgagtagaaacagaaatggaaatgtctgtgttcctttctcattttgaccaggcactgcctcagaacttttgacagttcaactttgttgggcctcagtttcctcatatttgattgggaagagagggaggctggaggtggagacaatgaagaaagggattgactattcaatgacttctagacattttatctaaagtgttacctgcatttccccaggccatgcccaatgagctatcaagaacagcaatgagatgctaatcctacagattggatgaaatagagggagctagaaccacatgcatcctgctccccacaacttctcccaactaatgcagaaggttcccaaggtttgtcagacagcgat

SEQ ID NO: 242571 - DNA, 348 bp, Homo sapiens
gcaacaagcttctcccaaagggcccaggcactgttcccacatggaaaagactctgctcttactgctggtgcctcttccacacctgatcccactatcaagaggaggcattttctgagtgcagcccactcacatgcaacactcattcctgctcaacccatttatttctacacaaatggatattcgggactttcaaatagttcatccagctgagcgtggtggctcacgcctgtaatcccagcacttcgggaggccgaggcaggtggatcatctgaggttgggagtttgaggccagcctggccaacatggtgaaaccccgtttctactaaaaatacaaaaattagctgggtg

SEQ ID NO: 242572 - DNA, 524 bp, Homo sapiens
gtccaattagtatggtgtcaccaatatatggatccatgcgattgattatctgtggagtgtccggatggtccaggacccttcagattatattacgaaggagaacaggaaaattaaccaaaacctgggcaagactgcgaatgtgtgctactatccatcccagttctggaggccggagttggaaatcagtttcactgggcacacatggaggtgtttgaagggctgcccgtgccagaggctctcagggagaatcccttccttgtctgctccagctctacctcctcctctgctgtgtggggctgagctgttgttctagaagaaaaaaggatgtcttgtcctgtgtgaactggaacagcgcttagaaatcgaggagcgtggccctgggaacaaaggctgtgtgctgttgtttttgcttcctcattaatgagcatgggccttcagtgagctcctttcccttgctggccttcatttgtaaaatgttggctgacggctaagggtgtttattcctctaaaatcccctaattaga

SEQ ID NO: 242573 - DNA, 539 bp, Homo sapiens
gcaatgtttattacttactgacttatattcatggcagaccacatcacattctttttgaatattcatattgagcctgttatgaagcatttcacataggaaaagcaatgtgtgaatcaatgaggaaatgaaactatgtatttattgacggtatttgtgagatatgcaagtgtgcagagtcttctgataacctcagaatgctgatacatttagcaaacctcattcttaaagttggccagataatgacttattttgctgaagtctccaaaaaagctgagttgtgaagcctttgaaaaagtatcaatgaactttttctttcaggtggggctgagctgttgttctagaagaaaaaaggatgtcttgtcctgtgtgaactggaacagcgcttagaaatcgaggagcgtggccctgggaacaaaggctgtgtgctgttgtttttgcttcctcattaatgagcatgggccttcagtgagctcctttcccttgctggccttcatttgtaaaatgttggctgacggctaagggtgtttattcctctaaaa

SEQ ID NO: 242574 - DNA, 383 bp, Homo sapiens
ggttttgctgaagatagcggtatataggctgagcaagatgtggggagatggaaatcataggtgtattttcaggtgatggtaactttgaggccttcaggttgctgtggtctgaaagcaagtgagacagccaagataaggcctgagctggagatgcctgttcggagtgtccccagcatagaggcagcaatggaagccatgaacgtgatcggatcacccagagtccacgtgaagtgggaggagggatggggtctagggctgagcacagggtgcccaccaggcttcttgctcaagtcccctactctggacagatctccatctgcatccaccacaccaacttctattaacactaggccaacagcggcagaaatcctgtctgcccttct

SEQ ID NO: 242575 - DNA, 511 bp, Homo sapiens
ccccgtggctccaattatatcaatagtctttttggataagggggcgactggggtggttactactgaatgttcagcaccagtatcgacaagaattatctgtcgataattgagcctggcccctgtgcttaagagccttggcagcaactgccctgctagcactagaggcagataagctacctcttgccctaactttatgtttagggcaaaacctaaacataaaggccccctagctgggcacggtggttcacgcttgtaataccagcactttgggaggctgaggcgggcgggtcatgaggtcaggagatcgagatcatcctggctaacacggtgaaaccccatctctactaaaaatacagaaaaattagccgggcatggtggcgggcgcctgtagtcccagctactcgggaggctgaggcaggagaatggcgtgatcccgggaggcagagcttgcagtgagccaagatcgcaccactgcactccagcctgggcaacagagtgagactccatctca

SEQ ID NO: 242576 - DNA, 713 bp, Homo sapiens
acataaaggaaatgcaaaatataaatatactaaaacattaagatatataaacactcaaactatcattacaaaatctatgtgaaatataaatcaggcaattgacagtaaataatatgaaacttgtactttgtttgctttagaaatattattttattttccaatatctttacctcggtcaggtggccaaactgtctgattagaaatatcttagcataaagatgaaaaatgcattctatgaactactatagcataaaggcttttgaatttcttctgagttgccattgatctgcacgcattcatttctgaattagaaaacagctaatattttgtgaaaagaggatacatatttctttaaattgagaaactaaatttcatgttaatatagtatcagtttattgtacttcagattttagcacaagcatttcagaacactgaaaaactatatttagagtgagatctacatattccatacagatggaatcagtccatgaatatatattggtatcattcttgccagtcctaataaaactctgtctttagtgtgtttgaacaaggcttaagttatacatgaaaactgaaacatcaaaccattatataccatttaagtgtagataaaataattttacatccgtacaatatttttaaatgttgactttagcaaaaacttaaaaattctctgaaatttgaaatgaaaattcatgatgcacaaaatt

SEQ ID NO: 242577 - DNA, 581 bp, Homo sapiens
aaatgaagttaatatctgtcctgctaacagtagtgttgtcagaatcaaatgaaataatatttggtaaactataaagtgaagaccaaatttgaaggactatttgtttttgttgtaatagagttgtatatagtccagatgtcaaccaggcctcttcagcatttttatagtcaaagatgtacaagatagctcctaatgctcttttatggctgctcctgttgccagggcaacagcctgcctagtaacaatctaacagacaccccccaaaaaccaaaaaataaaggttattctagcatcttctccttttaaaaatctttaaaataagagaattcagttcttcccaaagcagtgtttaaaaaaaaaaagtatttaaataaaatcaaggataccatcccacccacctatcttacattttgtgtggtatgagtggcaccattgtgtgacccaggtaggatagtggatgtacagtttagatacccattttaaagcagttagaaagatgtaacttgacaaggaaagcagtctcttttgtcattctacatttagtgcttcaggagtacttgatatatggaaggattttttta

SEQ ID NO: 242578 - DNA, 331 bp, Homo sapiens
aacatctgaaggaactagctccagacacaccatctttaaaaactgtcacactcactgtgaaggtctgcggctttattcttttagtcagtgagaccaattccagacacaagaccatctcatctcaagagaccaggacgtccgggcacccctagaatgtagctgctggcagagcctgaagtctatccagctcatgctcttccctgatatccttgacagattgtgggatggttcagcctctgcaaggacatggccaatgatggggggctggttttgggggcagcactctaggcaagggaagaaataaagtgtctgggaactggcgtggtgaagg

SEQ ID NO: 242579 - DNA, 520 bp, Homo sapiens
ttcatgtaaggaaaagtgaaattgaagcttataaattagaaatggatgagactaaggcaagagaagggaaggaagacaggaaggagatgcattcttatctttcccccaaggtcaaagtgatgcacattttctattctgtggaaactcaagactggacttttgaatcaaccaattccctctgacatcaagtgaggagggcaaggcacagctgtcagtgatttcaattccagtcctttacaatttcatttttggaggaggggctctcagtaaaccctgtgactcctatttaaacagaagcaaatgcactttagtatttaccctcttaagtttcagaacaagtcagggaaagaggagaaaaaaaggaatatgagacaaaatatttataatatcaggaaaaagcttaaatctttgcatgaaacaaaactgtactgcaagggattgtatttattcttccacaacactaaagaatatataaatatattattaaatttatgacaaaccatattttcatttcagtaaa

SEQ ID NO: 242580 - DNA, 812 bp, Homo sapiens
  misc_feature (145)..(145): n is a, c, g, or t
  misc_feature (156)..(157): n is a, c, g, or t
  misc_feature (161)..(161): n is a, c, g, or t
  misc_feature (165)..(165): n is a, c, g, or t
  misc_feature (167)..(167): n is a, c, g, or t
  misc_feature (170)..(170): n is a, c, g, or t
aacttatgctggtacgaggctggtttagctccgggaggcgctccgccgtttgtgtgctccgcgggaagatggggaaagtgagggggttgcgcgcccgagtgcaccaggctgccgtgaggccgaaaggggaggccgcccccggccncgcgcccctgnncggnggcnanccntccgccggctcggcgggggggactgggcgttcatcaacaccaacatctttgccaggaccaagatagaccccagcgccttggtgcagaagctggagctggacgtgaggagtgtcacttccgtcaggagaggtgcagaggccaagaccgttttgcccaagaaggagaaaatgaagctgaggcgtgagcaatggttgcagaaaatcgaagccataaaactggctgagcagaagcacagggaggagcggaggcggagggccacggtggtggtgggggacctgcaccctctcagggatgccctgcccgagctgctggggctcgaggctggcagccggcgccaagcccgcagcagggagagcaacaagccccggccctcagagctcagccggatgagcgcagcccagagacagcagcttctcgaggaagaaaggacccggtttcaggagctgctggccagtccggcctacagagccagccccctggtggccatcgggcagacgctggcccggcagatgcagctggaagatggcggccagctctgaccagggcagcaggcatgccacaactcctcaggacacatgtgtgggccaagtagagagcgccggcccctcaaggaccatggcctgagcctggtggacgcccttc

SEQ ID NO: 242581 - DNA, 796 bp, Homo sapiens
gctccttctcaaatatagaattttaaaaaggccatctcgactgccgcgggggtcgcgtcctctccatccccgacttggacgcaaaccccgggcttgggtcccccacgatctagacagaaactcgttgtttctcgtgctccgcgccacccgcgtcctccggtctgtttctcccaggactgggcgttcatcaacaccaacatctttgccaggaccaagatagaccccagcgccttggtgcagaagctggagctggacgtgaggagtgtcacttccgtcaggagaggtgcagaggccaagaccgttttgcccaagaaggagaaaatgaagctgaggcgtgagcaatggttgcagaaaatcgaagccataaaactggctgagcagaagcacagggaggagcggaggcggagggccacggtggtggtgggggacctgcaccctctcagggatgccctgcccgagctgctggggctcgaggctggcagccggcgccaagcccgcagcagggagagcaacaagccccggccctcagagctcagccggatgagcgcagcccagagacagcagcttctcgaggaagaaaggacccggtttcaggagctgctggccagtccggcctacagagccagccccctggtggccatcgggcagacgctggcccggcagatgcagctggaagatggcggccagctctgaccagggcagcaggcatgccacaactcctcaggacacatgtgtgggccaagtagagagcgccggcccctcaaggaccatggcctgagcctggtggacgcccttc

SEQ ID NO: 242582 - DNA, 459 bp, Homo sapiens
cctcatcgccctgctttgccctgtgctgccttgggactctgcagagtccccaccagcaagaaggcctttgcaaagtacaaccccctggccttggacttctcagcctccataactgtaagaaatacattccttttctttataaattacccagtttcagctattctgttgtaagcaacattaagcagactacgccatgcacacattacctttaatagaaacttaaggtccttttcaacacttattaaagttacatcttcccacccacctcccgagacagagtttcactcttttcacctacgctggagtgcagtggtacaatctgggctcaatgcaacctccacctcccaggttcaagtgattctcctgcatcagctacttgtgaggctgaggcaagagaatcgcttgaacctgagaggtggaggttcctgtgagccgagatcatgccactgccctccagcc

SEQ ID NO: 242583 - DNA, 700 bp, Homo sapiens
cctgtaatcccagcattttaggaggctgaggcaggtggatcatgaggtcaggagatcaagaccatcctgaccaacatggtgaaaccctgtctaaaattaattagctgggcgtggtggcatgcgcctgtagtcccagctacttgggaagctgaggcaggagaatcacttgaacccaggaggcagaggttgcagtgagccgagatagcgccactgcactccagcctggcaacagagcaagactctgtctcaaaaacaaaaaaaaagggctcaaattcctggcctcaagggatcctccagtctcagccttccaaaacactaggtttacaggcatgagccaccatgcctgtccttggactatatttttaattctgcttttgcccagtcacttgagtatgcttttaatcagcagccaatacatttcttatcagaatgttctgataggggctagaggtcatagcaacaaattcaaagtgcctatcctttagtaaccttaagtggattaatgttttagaaaagatagtcaagactgggcacagtggctcacaagccctgtcatcccagcacttcgggaggcctagacaggaagatcacttgaggccaagagttcaaggtcagcctggacaaagtagcctgagacccccgtctctataaaaatatatatattttttaattttaaaagatagtcatgaatacaaaacag

SEQ ID NO: 242584 - DNA, 558 bp, Homo sapiens
atgtgacagctttcccttaaaattgatgcttgagtcttcagtgagatacaattagctttccctgcacagatgacttcttcggcaaattgttccttttccctctcttcacccacccatatatcttatttcttcactaatttaaaatatgagtgagctgtaggatgcctggacctatgttaacttctgaaacaaacatgttaagttccaattttagccttaaatattttcgacatttagccttaaatgttttcttctttatatgagtgttcatacggaatttcaacatgagaataatgatgctgaggcaggagaatcacttgaacccaggaggcagaggttgcagtgagccgagatagcgccactgcactccagcctggcaacagagcaagactctgtctcaaaaacaaaaaaaaagggctgagcacagtggcttacgcctgtaatcccagcactttgcgaagctgaggtgggcggatcacctgaggtcaggagtttgagaccagcctgaccaacatggagaaaccccatctctactaaaaatacaaaaaaaaaaaaaaa

SEQ ID NO: 242585 - DNA, 990 bp, Homo sapiens
atgtgacagctttcccttaaaattgatgcttgagtcttcagtgagatacaattagctttccctgcacagatgacttcttcggcaaattgttccttttccctctcttcacccacccatatatcttatttcttcactaatttaaaatatgagtgagctgtaggatgcctggacctatgttaacttctgaaacaaacatgttaagttccaattttagccttaaatattttcgacatttagccttaaatgttttcttctttatatgagtgttcatacggaatttcaacatgagaataatgatgctgaggcaggagaatcacttgaacccaggaggcagaggttgcagtgagccgagatagcgccactgcactccagcctggcaacagagcaagactctgtctcaaaaacaaaaaaaaagggctcaaattcctggcctcaagggatcctccagtctcagccttccaaaacactaggtttacaggcatgagccaccatgcctgtccttggactatatttttaattctgcttttgcccagtcacttgagtatgcttttaatcagcagccaatacatttcttatcagaatgttctgataggggctagaggtcatagcaacaaattcaaagtgcctatcctttagtaaccttaagtggattaatgttttagaaaagatagtcaagactgggcacagtggctcacaagccctataatcccagcactttgggaggccgaggcaagtgcatcacctggggtcgggagttcaagaccagcctggccaacatggtgaaaccccatctctactaaaaatacaaaaaaaacccacaagaatattggccgggcatgggggtggtggcatgtgcctgtggtcttagctattggagaggctgaggtgggaggatcgcttgagcgcaggcatggaggtcacgatgagccatgatcacaccactgcactcccacctgtgtgacagagcgagactctgtctcaaaccaaaaa

SEQ ID NO: 242586 - DNA, 616 bp, Homo sapiens
gatttcattatctaaaacgccctcttcacatgtgttgagtcacatctattaggtcctctgacaaaaacaagtcttaacaacagcgttagcaccacggaaaccagaagttcatgaatcacggagggatgctctgtcagccaattcctaactgccaaaccttcacccaggacatagggtggaagtgcactctctcaacagcgtctataattatgtagaaaaaggtccggcataatgactatttggacattccttacgcctgctctcttctgcttccaaacgtagaccaatctttaacctatcccaggctcacgaactctgatttgactctttacccacaaggaacttggtctggaggaaaagcccgggtggtataggtgacctcaaaagacatccaagtcaaatgaagcacagaaaggagatggaagaagactctgatgaggcgcagagaggatgccaattctttggctgtagaggggacaaagcacagtatttgggagtccaggaccaagtcggaggagaaaagcagggaagagaatgggttctaaggcagtggatgaggctcataacaaacaagaagcgtcttttaaatgtggagaaccctgatgggagcaagatg

SEQ ID NO: 242587 - DNA, 329 bp, Homo sapiens
tgcactcaagaaaaagttgggagctgtcagtgcagtgatcaggcatctccagagaccatggcaaaggcaggctgtaagaaattgccccttttccatatgttggttgcagacattatggaaacctgaaatctagttgcgacatgtcacacttgctttttcttgcaccttcctctgatattttggtggggggtggggggtggggggcagatttgggagaggtaaattacttggagaagatgatgctcaacagaatgagggaatacttgatgtgaaacataaatcaaatttgatcattaactaccattgtcgttatcaacagatcaagagag

SEQ ID NO: 242588 - DNA, 518 bp, Homo sapiens
tttgcaaactccagaccaaccaaaagtcacctgaataaatcagaaattcataggactgcaattcgggcccatgcaaaaactgagacttaacccaaaggtgtctgacaatcttttaaagagcattctcgggagaagctatttgactaatcctggaaccgccactcaaaaaaatcattttttaaaaaaaacggtagaatgggaacgggggaagtggagtccatttgtaaggttccggggaactgactcaacatggttctccaactcgaggttggagacaccgggattccaaaatgggaatccactcacttcgcttttataggacaaacgcgtgcacaacttggcttcgggctgcattcaggtagtgccgggaaccccgagctcccgggccgcccccacccagctctggccgctccattaaggacgagggccggctcctgtcacctcgcgacccacgcgcacacacccgccctaggcccgccgtgctcgatgccgcgggcctgcaaagtttccgcggccgc

SEQ ID NO: 242589 - DNA, 438 bp, Homo sapiens
ttaaattattgagagatgggggttaaaattgccaacttttatttggtgaatttgtcttatccccttggttatttatttatttatttatttttgagatgagatgtcactctgtcacccaggctggagtgcagtggcgtggccacctgagcctcccaagtagctgggaccacaggcatgtgccatcatacctcgccaatttttaaaattatttgtagagacaaggtctcaccgtattgcccaagctgatctcgagctcctgcgctcaagcgatcatcccatcttggcctctcaaagtgctgagattacaggtatgtgctaccatgcctaacctcaatttttgtttcatggattttgaggccctcatgagagcatacactttacatttattctatggctccatagtgatttgtccttttaatattattaagtgtcctttta

SEQ ID NO: 242590 - DNA, 260 bp, Homo sapiens
tgatatgagttggagtctcactctgtttccaggctggagtgcagtggcgtgatctcagctcacagcaacctccgcctcctgcgctcaagcgatcatcccatcttggcctctcaaagtgctgagattacaggtatgtgctaccatgcctaacctcaatttttgtttcatggattttgaggccctcatgagagcatacactttacatttattctatggctccatagtgatttgtccttttaatattattaagtgtcctttta

SEQ ID NO: 242591 - DNA, 382 bp, Homo sapiens
gatatcccatagtaacatctgagaaggagagacagacagggtgtggtataagatgtcctcctctgtggaggggaagcattcaaggcccctttcttcttgtgggttcttggcatcttggcaccttttggtgagccctgttcctaaccccagggagctcagatgggccatagcactccttcaacttagtgcggagttcacctgcatccagtttatgttcccttccccaatgttagcccataaaatatggcaaatgagaaagtacaggtagagtagaggcgaaggattgcatctctagctatgttcccatcaccaaaggagcctgggaaaattccgagactaaagtgattgcaaaatgccaccaggttgcacctaccccttagta

SEQ ID NO: 242592 - DNA, 241 bp, Homo sapiens
tcagaggcctgacacttttgttacaattaatgagccaatataattactttattattaaccaaatgctgggattacaagcatgagccacagcgcctggctggtaatggtattttcaaaaattaggtactgtagaattgtttcatacctggaagttaggttccaatattaaaaaatattgaatttagtaaaaattattcttaaaaaatctgttgacaccaataaaatatatgtataaaaatat

SEQ ID NO: 242593 - DNA, 458 bp, Homo sapiens
aaatttaacaatctttcataatacaaacacacaaaaactaagaatagaagggaacttcctccacctgatcaagggaatctacaaacaaaccacacctaacattacacatgtggtaaaagacagaatgtttttgccctaaggaagtccactctcaccacttctattcaacattgcaatggaggatcaagccaggacaattagacaagaaagaaaagtgaaagacatcagatgggaaagaaagaagtaaaactatctctgtttgtagatgacatgatctaatattaaaaattctaagcatgccacaaaataaactattaggcatataaaattagttcattaaggttgctgggtagcagatcaatatacaaaagtcggttggttctatacactagcaatgaacaatttgaaaataaaagtaagaaaatagttccatttataatagtatcaaaaagaataaa

SEQ ID NO: 242594 - DNA, 346 bp, Homo sapiens
agctttcagaagatggctcaaagacgcgtgggtatgagcagcttctctgttaaatgccattcccttgtttttttcaaaagatcatagattacggccggacactttgggaggccaaggcgggtggatcatgaggtcaggagttcgaggccagcctggccaactggtgaaaccccatctctactaaaaatacaaaaatcagccagtcgtggtggcacacacctgtaatcttagttcctcaggaggctgaggcaggagaattgcttgaacctcagaggcggaggttgcaatgagcggagattgtaccactgcactccagcctggcgacagagtgagactctctcaggaa

SEQ ID NO: 242595 - DNA, 544 bp, Homo sapiens
aatccagaattggagacaatggcgcagccatgtatgtgggggtctgtttccacacaagcaagtcctgttagagggacacatgtcaaaatgctagctcccactccaagttcaagttcccaaagttaacatcacaggaaattacaccaccaactgatttgccccaatgtcggctcctctgtctggaagtcgagtctgagaaggccattggtttagttcagctttggccaaaggaagggaccagctcagacaggaatgagtgaaagtgctggcctgattttttttctttttaaactaacattttccccaaaagttatcttgccattacccaagagtcataagtgaaaagacagccaaataccaaaaagccactgaggccctcaacagtgcctgctcatttcaaagccatttcacggacagccagggggtgcctgggccaccgcagaccacccctcactccaagagcactcctgctccccagagctccatgttccatgtaaagttccacggcatgtgcacaccacttcctaagaatgatgtcagcaaa

SEQ ID NO: 242596 - DNA, 455 bp, Homo sapiens
gaaaaatgtcagaaaaatagaaatttcatggctgggagtcttagagagaccaaacagaatataactataatgttacaatgtattctactcagaagagcctgtccatggccacagttgcctttactgtggattgataatacctttaacacttcagtaatccataaattgaaaagtttaggccgggcatggtggctcacacctgtaacctcagcactttgcgaggctgaggcgggcggatcacgaggtcaggcgatcgagaccatcttggccaatatggtaaaaccctgtctactaaaatacaaaaaattagccgggcgtggtggcgtgtgcctgtaatctcagctacttgggaggctgaggcaaggaaatctcttgaacctgggaggtagaggttgcagtaagctgagatcgcaccaatgcactccagcctggcaacagagcaagactccatctca

SEQ ID NO: 242597 - DNA, 323 bp, Homo sapiens
gataatggaactgaggctcagaggacctgccacgcactgagtggcaaagcagggaatgacattggtctgcctggctccaaagccctggctccttttctgtcttgccttccaagacctgtttatttaatgcatgatctaggtgtgcttcctttcagccccctgaaaacagaagagggtacaggttgagtatccctgtacttggagacccgaagtgtttcagattctggatttggaatattatgcaaatacataatgagataccttaggatgggacctaagtctaaatacaaaattcatttgtgtttcacatataccttatacac

SEQ ID NO: 242598 - DNA, 753 bp, Homo sapiens
aagaaattcaagataccatagatgaggaaagggaaatgagtgtgaagtttgcatgtgatcgtgtgatcacacagctaataagtatcatgaagagctttgacagttggtcttttgtctttaaattcagtactttgtgcaataaacactatactgggaaacatcttgtattttgactttgttttttctccccagaggtagctattcaggaaaaccgagacactgtcttatatgaaggtgtaaggctaggtagacctgtgacataagcctaacaatagcctccttctatgacttgccacaacttaaatagaatcccattgagatatcgattcacaatattcttctgccttgtttgggatacagagggacaagattgtctgtaaattgcatgtattaaggcaaaatagtgatttatagctactacatgtatcctcacattgctgcagaaaaatcattacgtgccaataacagagggtctcagactccaggtaggaacttcttctgaattaaatttatattgaataagcttactctatggggctgtgaagatgaaatgagataatccatgtaatatgcttggcatgatggctggtgcagactaagtaattgacactaatattatcaatagtaatattatcaatattaatgttagccataattgttttaaacatgttattatcactaaagaatgtaagaatacattctctatacattatttggtttattaaaatgtttctttttaattttttatttttg

SEQ ID NO: 242599 - DNA, 612 bp, Homo sapiens
ctaacacttgcacggtcagtcatgtacgttcacacacttggtcttctttctccctcaccaccaccctctaaggtaaatgtcattatctcattttttcagatgaggaaacaggcccagagagactaacttctctaaatcaaaaagttaagaagtaacagcccagggggtgggggagtctgagagtgaagggaagagtagcagaggcaaggccatcattaaccctggagcttgcgtggagccaggactgggtctcaaggcaaggccagaccaagggaggagtggaggagggaatgacatgaaattctttgccatgggatgcagactgtggaatctgttttgcctgtgctcaaggcttgtcctggttgggcatgaggtagaggctgcaaagagtccagggccctcaaatccagggaggggaagacgccaggtctggtaatgcagaaggcctgaggagagattgggcagggatgttaccctggtgatgacggaggtgggttggagttgattatatgggtgcaggccttgtccacaagcgaatgggaaacttcttccgtcctcctagctggcctgcccaaagcccttagcacagatcccatttctcaaaaaactatt

SEQ ID NO: 242600 - DNA, 703 bp, Homo sapiens
aagatttagatttgagctcttgcttctcaggaagtctataagttttaaagtaaaacaaggtttttcacaagtgaatggcagaagggaagaggttggagagctcattcattaatagacccactgataatcacaggcattttaagctagaaacatctttcagagataattgtcaatttccaggctacatttaaactaactggttaagaaacataaaaaaatggaaaagcagtggaagactggagtcaaggagcaaaggcctagattttcatatgagagctggaattatgctgtcattgactggttgtgttactctgatctggtaacattatctcattttcataatttgaaaacaaagagattatgctatttttaaaattttacagtatttttaaagtaatgtaagaacactcttccccaaatgtcttgactgagtttttctttaaccactcttattctctgaaataacctaaaactgtcctatattttattactttttcttcttgtcctacttacaatctgaaagagaagattgccatttatttacaactttccatatatctgaaaatgtttactgaatcacctgctggccttcttcttactagaaaaactattcattatttcattaaaaactttaaggctattttctgacctttaatcttaatgatatttcttcaaaatctgttttagttctggcagtcagaat

SEQ ID NO: 242601 - DNA, 362 bp, Homo sapiens
  misc_feature (205)..(205): n is a, c, g, or t
  misc_feature (273)..(273): n is a, c, g, or t
acctttttctgagcaccttccttctttttcttttcttcctgctttttctttttcttttcttccatcaaacgttcctcttcttgtgtttcttgctctttctccctttggttttttgatcagcagcctttttctgagcaccttccttctttttcttttcttcctgctttttcttttccttttcttccatcaaacgttcctcttcttntgtttcttgctctttctccctttggttttttgatcagcagcctttttctgagcaccttccttcttttncttttcttcctgctttttctttttcttttcttccatcaaacgttcctcttcttgtgtttcttgctctttctcccttctgtcgtcttctc

SEQ ID NO: 242602 - DNA, 481 bp, Homo sapiens
gagaaatatttgctgatgtgaatcttctaagagaaaaagagaaatgaatagtacaagaaggaggaggaggagaactgaattgctgggatggtgtcctaattaggtgaaagcgaacagagactagtgtgcaaatgaaaagatgacatataagagcttagatagtgccattcacagcaacaggtggggcagcagataattagagcaaagattgtgttgctcataggaccttctcagatcacacatgctctatattgtaagccaaatggtatcccctgttggccactactctgggacacaaatgctccatcaatcaaggaaattgggtgtttgtatccccaaaaaattagttcgtttcctaagaactccctaatccttgtacaaagagtaaggtatagagtaaacatcactccaatcccacttatcctaaacccatggctatcaaaattcaaaagtgaataagaacattctaacatcttgaaaa

SEQ ID NO: 242603 - DNA, 888 bp, Homo sapiens
ttttttactttttaaaattttttgttaaaaactaagacacaaacacacacattagccttggcctacccagggacaggatgatgaagacatcaccaggcaacagggacttttccactccagtataatttcatgggaccactgtcacatatgcagccatgtccttatgcggcgtatgactgtatttagaattaacatttcgtttacttcaatcatggagtgtctatcccagttacttttgagggaaagttatccaccactaatgttataagctactccagaaacatatatgtgccatataatttgcgattcctggagagaatgttctaagcagtagaaactagtaatttctaagaaacataaacacattcataacccccttaccttatgtaaaatagagtttataatttttagaggtatcattttaagattctgcaccaatagatggctttgttttcttttcaaaatgaagcacttgcttacaattcaaccaaactatcaccaggcgatgtcacttcgagtcagagtaatatttgtgcacagctcctcctgttttgtttatatggctagcaaggcggccattcctgatggtaattaccatgcgacactcattcaccaccaccaccatcatgtgtgggtgtctgcccacctctggcagtgccaggcttcaccagtgaaacacttgcatgttggggacatagcaacccttcataaatcactgctactgtgagagaacattctgggcttcgaccctttccctcaactgttcccatatcaggcattcacaactgcaatcctcccttccaaagcaaagaatctgcagtctggtaatgctccatggcataatatcaatgttcacgcgcgttaaagcaatcctaggaagggtcaaaa

SEQ ID NO: 242604 - DNA, 614 bp, Homo sapiens
cttttccctgctgtggtcacagagaaaaacgcaaccaatgtaagaacggtcagagagattcaacattgttggctttgaagatagaggaagagaccacaagccgaagaatgcaggcaggctctagaagctgggaaagagaaggaaacgtattctctgcagagctaccaaaatgcatacatccctgtctacaccttgattttaacctggtgagacctgtattgggcttctgacctatagaactctaagataataactatatgttgttgaacatgctaagtttgtgggaattgtaacagtagcaatgggaaatgaatacaccttttatacagtggaggatgactaaataatttattttgaaaatacaactgtcacaaggatgaaatattcatgatcacaaattggtgcattcttaactgtggataattatgtatgaagccaaattgtaataaaactgttatttgccaaacatagaaaccttgcttcgtgactaggctgagcccagagtgttattctcttcttctgcctgttatgtatctgggcaattgtagggcctttgcaggtgaatccagtagagaacatgctaagaatgagcagcagtcatgcatgactgtatc

SEQ ID NO: 242605 - DNA, 290 bp, Homo sapiens
ccacaaattgcatggctacccccagcccatgagatacaccattttgatggaaagctgagttatcaaaatcttagggctcagttcagctcctgaaagcagcagaactctgaggagtctgaagaatagaggaaaactaagttcaccttatatgtttctctaagtcctttggctttttacttgaagaatccatattctgtttttgtggtatttccttttctgtataaaggatactgagtggttttatttcaccaaaaataacacaaagtaaagtaaaaagtagtaataattca

SEQ ID NO: 242606 - DNA, 323 bp, Homo sapiens
gctcctcttaccatatgacgttttgcttattttaaaatacagccaccagactgaacccaccatggtctcagacactgacacacccatgggacacagagatggtagaactaagtgactgtcaccctgccatatccatacctgttccagagaagaagggtcagcacagtcatggttggtccaggactatcccctgcccctgaatccacacacgctccagcaggaaagctgcacgaggccctccaagttacggggctggcacctgaactcctgtttctgcactcttgcaggcagccccgagacccaggtgactgatggccatggac

SEQ ID NO: 242607 - DNA, 310 bp, Homo sapiens
gcacttgtgggtactcaataaattgtaggtatattgttactaattatgagtaagactaattttatcatgaataatttaatcatcattgccttattctggagatattgatgacataaatatcttttcattgaggcactgtgtattagagacaataaacaatgattcacccttcaaaagcacttttcttatacgtaatctcataggaagagcattatttcttgggatgtggtgtgaatgaatcaacatgtacaagactgacacgttgtctggaatttaggtgcccaataaatattatttaaatgaacgaaca

SEQ ID NO: 242608 - DNA, 383 bp, Homo sapiens
cttgctgaacccccccaggggttctgtgatacaaactgacatttcttattgatggcttcctctgcagactcttacgttgtaccatgtgctctgctaattcagatacacttcttttaccctttttctgtcttgtgacaggtgttttttgttgtttgtttttatttttgttttgttttgtagacagagttttgctctgttgttcatgcttgagcgcagtggagcgatcttggcttactacatcctcgacctcctaggctcaagcaatcctcccacgtagctgggattacaggcacctgccaccacacctgggtaatttttttgtgtgttttttttttttttttttttagtagagatgggctagttctagatcgcgagcggccgct

SEQ ID NO: 242609 - DNA, 578 bp, Homo sapiens
catgcctgtagtcccaactacttgggaggctgaggtggaagttgcagtgagtcatgatcatgccactgcactccagcctcggtgacagagccagaccctgtctccaaaaaatataaataaatacatacatacatacatacatacatacatacatacatatataatgtaaagtccttaaaatggcctatcaggtgcccatcaatccaggagtggataaagaaaatgtggtatataaataagatggaatacaactcagccataaaaaggaatgagttaatggcattcatggcaacctggatgggatgggagactattattctaagtgaagtaactcagggatggaaaatcaaacattgtatgttctcactcataagtgggagctaagctctgaggatgcaaaggtataagaatgatgcaatggactttggggactttcggggaaagggtgggaagggagataagggatataaggctacaaattgggttcagtgtttactgctcaggtgatgggtgcaccaaaatctcataaatcaccactaaagaatttactcatgtaactgaataccagctgttcccca

SEQ ID NO: 242610 - DNA, 231 bp, Homo sapiens
tggaagttgtgttgtggccccctagatacccctgtagacagtttctctcgcagagggatggtgatgagggaagaataaatcatggaagcgggggaagaatgcagaatttgaagtaatctgcgaaagggagatttaggagaaattggcctgagttggtctccttcctttctctttcctgctccgttgtagttttcatcattctctgctctgggtaacttgcagtgcagagga

SEQ ID NO: 242611 - DNA, 466 bp, Homo sapiens
cttggctaggcagtctgtctaatgctggatttcctactccaaggcagcattcaaggagcctaaattatcagtatacttgagggactttttccctagatgtactccactgaaggaatcttgaatgaaaagcttgctgggtttggggggtcttttaggtgtaccttaaagtgttagcagacacagattaggacaatgctgaaaggccagcccagctccagaattcctgcaggattgattgatgcctcagttgcaaatgtgttgcaattcaacttctccctctgcccagtcttgcatccctcaatccccacagaggttgctcttgccatcattaggtaataacctcctgcatacaaatttcagagtttcagtgtctatttcctgtgaactcaagttgcgatgggtcccctgatgacttatatcaaacatgtaacatgtgtgagaaataaacctttattgcaataagatg

SEQ ID NO: 242612 - DNA, 440 bp, Homo sapiens
ctagggcatagttttaggtgtcagggagtcttatttcacagcccactccaccacttactggctgtgtggtttgggcaagtcacccacactctctgagcatctagtgcctcatttgtagaaaggagattatatctcaatgcagggattaaatgagagtgtgggccgggcatagtggctcatgcctgtaatacctgcactttgggaggcagaagtagggagactgtttgagcccaggagtttgagaccagcccgggcaacatggagaaaccccgtctctacaaaaaatacaaaaattatatggctctggtggcctgtgtctgtctgagctactctggaggctgagatgggaagattgcttaagtccaggatatagaggctgcagtcagccaagattgtgccactgcactccaggctatgcaacagaatgagactctgtctca

SEQ ID NO: 242613 - DNA, 342 bp, Homo sapiens
ctcccaaagtgctggactacaggcatgagccactgtgcttggcctatatacatcacactttcctttatccacaagctgatgggcaccttggttgactccatatctgcaattgtgaattgtgctgcaacacacatatgtgtgcaggtatctttttgatatggtaacttcctttcctccttttggcatgcttctcctctgtccttttggggaaggcagtatcttcaatatttttagcctcagaagacatggccagaagttttgaaatcaccagcatgaattattgagacaagggatatcccttggtccctgagtgctccccagtgaagacctaaacacagactt

SEQ ID NO: 242614 - DNA, 415 bp, Homo sapiens
gttaaaaagagactggcaccaccacccccttgcttcctcccttgccatgtgagctctgcacacaccagctcctgctttgctttccatcatgtgtaagcttcttgaagtcctcatcataaccagatgctggcatcatgcttcttgtacaacctgcagaactatgagccaaataaaccccttttcctataaatcaccctgcctgaagtattcttttatagcacacaaaacaaaccaaggcagtttaaccagaatcccttcttaacccttacgtttccagcttagtaattttccatccactaaccactacaccctgctccacagctatgaattcccacttttacttgtattcagagttgagcccaatgtttctttcctactgctctctctgtggagaattgaaaaatatttgataaag

SEQ ID NO: 242615 - DNA, 496 bp, Homo sapiens
ccactactttaggataaagtgtatgcatatcctcaactctactagataaaaaacgtcaaactcattttcaacatggttgtatcaatttttgtctcactatcaataaataaatggaaatgcttttatatcttactgttaagtatgtttgttatgttttagtaccccttaacaggctaaggaagttccattctatgcctaatttactgagagacttttaaaatattgtgaatggatatattatctatttttttctgaacatgttgaagtgagtgtattttgcttctatcacctattaatttgttgaattctataatatactttctaaaatttaagcaaccttgaacatgattcatgtctttactttttttcttggatttgttctgctaatatattttgtttgtgttcttgacaagcatgtttgtgagtgagattggtctgtaagtgtgttgtcttggtttgattttgatataaagattatacttgccttaaacatgag

SEQ ID NO: 242616 - DNA, 465 bp, Homo sapiens
ggaatgtggtttaaccaagtgaaagatgtgattccacttaatggaaatacatgtcactaacccaggagtgagttaaattgcaagattacagatggaaaatgagcaagcatttaaataataatatggtatgttaaaattttcaaagtgctttcacatgcgaagcccaaaaaaggcgtggcaaatgcaaaataaggcagcagtggtttgtcaagaaaaggaagggacaaaaagtgtttaaggggatggtaaacatttgatggggaaaatgaaatcctagatatattaaaatttaaggcagccagtcaagccttagacacagtatacaacacattgctcagctggaaacaattgatatcacatcaaagactttcttctggaattttattatgttaaatactggctagaaataagttagatggggcttgatggatcttggagattctttgtctctctttttttctcttt

SEQ ID NO: 242617 - DNA, 585 bp, Homo sapiens
gcactagggatgatgcagagatggtctttcctgttttgtggacaagcaggcaggcaggcagagttcagggtcatgggctagggcagtcatgcctagtggtctctgagtgtaggattcttgaacctgctgatttgcatttcacctgtagttctacagtaaaaaatgattttatataacttttggtatataagtctcaaaaagtgtgagtcagaagagatgaaacattatatttaaaatttcatatcaaagcttctaatacaacgttgctagagccatggcttggaaataaatcaggaaaaaaccctcaaatacagaatcagttgtgttaatgcactagaacttgccttctgctttaaagccataattaatcatttaaatgctggataaaaaccatgtgttttgtctttagaaaaggtgttgagtggacttcaaggtttagatctgtgctgtcccatacagcagccactagtcactagcgggcctggctattgagcacgtaatatgtggctattgagatgtgctctaattatcaaatacacaccaggattcaaagacctagtacaaaaaaagaatataaaatatctc

SEQ ID NO: 242618 - DNA, 142 bp, Homo sapiens
ctgaatttagtgtggacacctgatcagcataatgcagtactgcccagaactcctgggctcaagcagtccacctcagcctcccaagtagctgtgactacaggcatgctaccattgtatctttttttatgtgaattttttattg

SEQ ID NO: 242619 - DNA, 580 bp, Homo sapiens
cctaacatctcttggtgcttgttttcttatttgtaaaatggggacaataatattacctagggcatagagttatggtaagagttaatgattaaatatatatgaagcacttttgagagtgcttagaacacactaagcactaaatgaaacttagctattatagtaatactattgttgaaattgaacattagtgaaaagagcttcccagagaatacttccaaaaggggtaataacgtctgaattataagcttccggagagcaggtataatcctctcgtgtatatgcttatatggggaggacagtataaagaacgtgggagcacatcatttactctaaacaggcagttaactggatcaagataaaaagaaatttcagggatgcagctctgatcttccaggaatttggccaagtgtgtgctgaggtttattaaatgttttactaacacgtgagttcttgcctttttttctggcgggacctaatatataggcatcttttattctgaacctaggcaaggggaaggagaaaacctcatggcaaaatggtgaggaattgtgagacagaagtgtcatggtcagtcaataga

SEQ ID NO: 242620 - DNA, 531 bp, Homo sapiens
atgacacagtcacctcttaaagacctgcctcataatacccacattggggattaagttttaacgtgagtttcagatgggataaacattcaaatcatatcacagggtggtagcaaatagataaagcgcgtaagataggctctgtaaactttaatgtagtatagggttggctggcagacgtggcttcttaccctaatcctgctgtgtaatggcttaatagccatgtaatctgaacatgtttaagctatctgtgtgcctcagttttctcatttgtaaaatgggattaattatagcaactatagcactttgggaggccaaggtggggaggtcaggagttggagaccagcctggccaatatggagaaaccccgtctctactaatacaaaaattagctgggtgtgttggcgtatgcctgtagttctagctacctgggaggctgaggcaggagaattacttgaaacgggggaggcggaggttgcggtgagctcagattgagccactgcactccagcctgggtgacagagattccgtctc

SEQ ID NO: 242621 - DNA, 451 bp, Homo sapiens
taggaaaaaaaaaaaaccttctacagcatccattttattagagggagacattctttgtcacttgggttccagattaataattctagaatcctaccatgcaggagttgtgatttggtttcaaagaatcaaagagaaaaattttaagaggagggaacccagagaagggctagcaggtgtaaataacttccatgccctttatttcatctggggatgagggaaaggagaaggatgctaagcaaacttgaaagctcctcaggagatccttaggaaccccgtactgctgggcccctttctcctgcttcccttccagggctcaagcatccttgggcaatgcttcttcaaattttgtgtgtgcagaaaacatgtaccaatcttgtttaatatatattctgatgcagaaggtcaggggtggggtttgtgattctgcatttctaacaggcttataggggag

SEQ ID NO: 242622 - DNA, 382 bp, Homo sapiens
cacaccattctcctgcctcagtctcccgagtagctgggactacaggcgcccgctaccacgcccagctaatttttttgtatttttagtagagacggggttttaccgtgttagccaggatggtctcgatctcctgaccttgtgatccgcccgccttggcctcccaaagtgccaggattacaggcgtgagccaccgcgcttggcctattctagacatatttttaaagttttttctaaaatgttttatttttccttattttttatattctattagccttgactaaaacatgaatacacttttttagatagacttcatcaatttccagttccctgaccaaagaaacctactgtttgaaaaagacaagttccctaaagatgactgcta

SEQ ID NO: 242623 - DNA, 649 bp, Homo sapiens
tgagtcatgtttggcatgtatgtgttgggggggtgggcataggagttacacatttaagaaagccctatcttttagtagaataaattaatgcagattggcctgtcttcctgcctgcctggtcagtaacagtggactttggagattgatctagtgatgataaacctattgtatgtggcataagccagagaagtcagcttcgatagcaagtttctacattggcgtgagagagaagcatttagttaacatttcaaagtaactaagcctgttagcatccatgtattctatcagtagactttattgagtcctgtcatttgtatggtcttttattgttttttgttttcaacaaaggaaatagcacacacatacatctcaaaatggattatacctgttgtaatctcagtattttgggagatcaaggtgggaggatcacttgaggccaggaatttgaaaccagcctgggaaacatactgagatcctatgtctacaaaatttttaaaattagccaggtacagtggtatgcacctgtagtcctagctactcgggaggctgaggcaggagaatcacttgagcccaggagttcaaggcagcagtgatctgtgatcaaaccactgcactccaacttgggtgacaacatgggaccctatcttaa

SEQ ID NO: 242624 - DNA, 658 bp, Homo sapiens
aaaatttgaaggaaaaaagcataatcatacataaaaacagaaacttttctcgaagtcctctcatggttccattgtgttcatgatgtcccaacagcttaatgactccagtagcgaagattttttaagtcccttcacatcactctcatttgagacacttgtaactatctattttcctcagaatttagagaccctttctgagaatattggtcatactgacatttctgctattatttccttataaacaggcaagaaataacgcagaaaaaattggagtcaccagtgtttaatggaccttttcattctatgaattcacacgggacctaaaatttaaagtttagtgctgatcagaaactaaaatgaattccatgatatatttagtagagccaacaaatttaggaaaaggtaacacccaaaacatataccaattaaaatttgctggcttttgtgagtctggggttgtatttcttaatgaaaatacatcttcttaaatgtttaaataaacctaaatttagcatttatgttaatttactttggtacagattaaagattaaaagacaaaaatactgagatccaaacacaaggaaagggagtgactggtaatactctttaacagaatattaaaaacaatggtatgatttagtctactaaaaaaaaatcc

SEQ ID NO: 242625 - DNA, 405 bp, Homo sapiens
ggtctggagattggaatgtgaccttgcacttagtgaggtcggaaattattaaattggggcttccacactacacccagactacaccaggagaaacagaatcatagttcacaacgcaaacgaatgccaggaatggtcagtgagtcaaaggaccagtcaaaaacaatcacacttgtgactagactcgtggctgcattaaacattgactcattggggttccaggggccaaaagactggcctttctgcctccctgggactgtgcttgaaaacgtctatttgccacttcagaaagcacagtatgaggtcagcatctgggcccagggcagctgcctcattcaggtggtggcagtgtaaggaggagtcgtgtaacgcgtgtcatcagattccagttcagttcctgggcataca

SEQ ID NO: 242626 - DNA, 640 bp, Homo sapiens
actctcaggtggtatgtcacatctaaaggtcttagtgaggtcagacttcaagccatcaacttgagataaataagtagcaactacagtccttgcttcatagggttgactgcccaactggggggaataaaggaaccacccacctcttctttagccagtgccttctctttatcctcttgccttggtctgtgatgttatcctcgctgtgtgacccaggggttaccgcactgtgagggaaactcggcatgcccttctgaagagtggcccaaaagaactggttagaaagagtttcaagcttccgtgtttcaattacagtggcattttgtgtttctactgagtgagagaagtttcaagttagcttgttaagaatgatttacaccataattctaggaaaaacaaatgtgagtgactgaaatttgaaaggaaagagtataggggggaagtgccagactaaacgaatcctaagtaaatagggtgtttctttcgggggtcggtagggggattggtttcttttaaaaaaagaaaaaaaaagaaaaaatgtatgtattgttggtaattacttcttttacctggaaagagtgaagcaggaaaaaataataataataattgctccatttgctccctgtaagagcaaattttcagg

SEQ ID NO: 242627 - DNA, 418 bp, Homo sapiens
caccatgcctagcctattttaattttattattattattattttctttagagacagggtctcactttgtctcccaggctggagcgcagtggtgcgatcatggctcactgcagcctcaaactcctgggctcaagccaatcctcccgcctcagcctcccaagttgctggaactacgggcgtgtgccaccatgccaggctaatttttctgtgaagaaggggtctcttgctatgttgtccagccttgtcttgagctcctggtctcaagcaattttcccaccttggcttcccaaagtacagggattataggtgtgagccaccacacctggccaatcaatatgtgctattttttagagaaaaattaatcaatttaattgtacctgtaattgactgaataaaaggaaactgaagtgaaaccaaaag

SEQ ID NO: 242628 - DNA, 632 bp, Homo sapiens
gtaaatggttttatgtactatgtactgttaaggatggataggtttgttggtatcctagtgggtgaggggtggctttggagttgcagttgatgtgtgatagttgaaggttgattgctgtacttgcttgtaagcatggggagggggttttgatgtggacacaggctataacacgagaaaccctgaggatgttatgctgggtgaaatgagctggtcacagaaggacaaatcccgcagggtggcactgagcagaggtccctggagaagtcggagccacagagacagaaagtaggatggctggtggctgccaggtgcagggaggggttgcggagttcctgtctgatggggacagagtttaggtttgggaactctacattttaaaatgtaaattttacagtatgtgtatcacaatacaaatgtattttttaaagtatagtagactttgcctcaaaagccccagttctttcaatctaaataagaaaataatgcaaaatacgccaaaggctttaagaccctgttcatcctaaggcaacgtaaccgttcacaaataaaggaatagctaagttaattgaggcccgttaacttactagcatattgtgctaccattaggatggatggccaggaagctccttcag

SEQ ID NO: 242629 - DNA, 234 bp, Homo sapiens
tttcatctaattgttgtaagagttatttcaaattatgtgtaaagaaaaaaggtaagaaaatgccgtgcctttagtaagctcatttctctatttattatgaaactgtttttttgtccattcctgttttagcagcaacacgtggcataggctttgaggaagaataatgttctctgcttctgtaccaagattagagtttgtttcagatatagctgatgagtaatggatgaattgtac

SEQ ID NO: 242630 - DNA, 567 bp, Homo sapiens
tcccagagttcaaacatccaattttcccagggagtgcatcaggcgtttctttccaaaacggaagtgtttcgtctttgaccggccaacaaatgacaaagaccttctagccaatattgagaaggtgtcagaaaagcaactggatcccaaattccaggaacaaacaaacattttctgttcttacatcttcactcatgcaagaaccaagaccctcagggagggaatcacagtcactgggaatcgtctgggaactctggcagtgacttatgtagaggccatcaacagtgagccgagattgtgccattgcactccagcccgggcaacagagcctgggcgacagagtgaggctctgtctcaaaaaattaaactaaattaaagctatgagaagaaaataaattttcctggtatagtgtccttctctagacctcatgtcctacagtctctgtgaaactgggccaaagatagaatttttttttctgtgctttatacagtgactcagacaaacctatgacctcacacaaatctgtaacttcatgtatcacagtctctataaaactatatcaaagaaag

SEQ ID NO: 242631 - DNA, 585 bp, Homo sapiens
agagatcagtggtaataagttgtttgaattttcgacaccagattaaggtctctgaggtggtttaaaggctatgaggccaggtgcagtggctcacgcctataatctcagcaacttgggaggccgaagcaggcagatcacttgaggtcagaagtttgagaccagcctggccaacatggcgaaaccctgcctttactaaaaatacaaaaattaaccaagtgtggtggcacacgcctgtcatgccagctacacaggaggatgaggcaggaaaatcacttgaacctgggaggtggaggttgcaggtgagccgagattgtgccattgcactccagcccgggcaacagagcctgggcgacagagtgaggctctgtctcaaaaaattaaactaaattaaagctatgagaagaaaataaattttcctggtatagtgtccttctctagacctcatgtcctacagtctctgtgaaactgggccaaagatagaatttttttttctgtgctttatacagtgactcagacaaacctatgacctcacacaaatctgtaacttcatgtatcacagtctctataaaactatatcaaagaaag

SEQ ID NO: 242632 - DNA, 446 bp, Homo sapiens
tccaagaagagtgccactaggcatcccctgggaaatgggccccctcaggaaccaaatggcccaagttgggagggcacctctgggaatgtcacatttacatcttcggctactacctggatggaaggcacagggattcttagtagtctggtttactcagataatggtagtgtaatgtctttgtacaatatctgttactacgctctgttggcctccctctcagtcatgtctccaaatgagccctctgacgatgaggaggagtaggaaggctcctcagattacaagtgtagactctgtgaacagttcagacacactgcaaattcgtgaactcacaggccactaatggcccataaaagttgccattttctaatgagaaacacatttttggtcttaataaagaaaaacaaaattccatggaaataaataataaacaatttaaatgagaaaaa

SEQ ID NO: 242633 - DNA, 178 bp, Homo sapiens
attcaacataatttattacaggtgaaaaaaaaaatcactgcatattaacaatctaacaaagttaccaggtaagcaaatacttaatgttaagataaacatataatacagtaatacctctattaacaaagacactgtgtatcagtgacatgttttccttggtggaatcttcttagtgaaa

SEQ ID NO: 242634 - DNA, 411 bp, Homo sapiens
cacacatccctcgccttctgcgcttgctgtttccctctgcaccagaggagctctggtgtcctgtgatggccttcctcaggacaatcagccccatacccagattctgagcaaccaagggcagtctggaaatggattgtgaatattcacacagttctgttatgctgtcgttccaatgcctggaatgacgttctttcagcttctctgacaaaatcctttcccaggcccagctcagtcatctctagaaggcctcccgcttcctctgtcttcgcatagctctttgttccgttactgtggcaattcctgtaaatttagccactcacgtgtcgcattacagttcatggagtatgcgcagcgaatcattcagactcactggagtatcgtgggtcttgcttggcgctagtctactcaaaa

SEQ ID NO: 242635 - DNA, 546 bp, Homo sapiens
agtatcgctcttttgcccaggccagaatgcagtggcgcaatctcggctcactgcaagctccacctcccgggttcacgccattctcctgcctcagcctcccgagtagctgggactataggcgccctccaccacacccggctaattttttgtatttttagtagagacagggtttcaccatgttaaccaggatggtcttggtctcctgacctcgtgatccgcccgccaaggcctcccaaagtgctgggattacaggcgtaagccaccgcacccagcccatgctttctttagtatataaaaagcagttacaaatcaataagaaaaatactaataatataatataaaaatgactaagaatagtaagagactgttcctaggaaagaaaatacaaaggttggggacagggtggaattttttttgagacagggtctcactctgttgcccaggctggagtgcagtggtgtgatcttggctcactacaacctccgcctcccaggttcaagcgattctcctgcctcagcctcccaagtagctgggattacaggtgtg

SEQ ID NO: 242636 - DNA, 599 bp, Homo sapiens
agtatcgctcttttgcccaggccagaatgcagtggcgcaatctcggctcactgcaagctccacctcccgggttcacgccattctcctgcctcagcctcccgagtagctgggactataggcgccctccaccacacccggctaattttttgtatttttagtagagacagggtttcaccatgttaaccaggatggtcttggtctcctgacctcgtgatccgcccgccaaggcctcccaaagtgctgggattacaggcgtaagccaccgcacccagcccatgctttctttagtatataaaaagcagttacaaatcaataagaaaaatactaataatataatataaaaatgactaagaatagtaagagactgttcctaggaaagaaaatacaaaggttggggacagggtggaagggaaactgagagggaaggagactgtactgtaccctctttggtaacttcttttttttttttgagacagggtctcactctgttgcccaggctggagtgcagtggtgtgatcttggctcactacaacctccgcctcccaggttcaagcgattctcctgcctcagcctcccaagtagctgggattacaggtgtg

SEQ ID NO: 242637 - DNA, 340 bp, Homo sapiens
agtcagtattttgacttaaattatatcaaatctacagatcagttgatggaccactgcaatttttatgatttggagacttctgatccagggacatgttcttttagggaaggatgtagagcaaaagatatgcataaacttgtgaaactttaccactgttcagaattcctcagagagagaaactacattcatcttggaaatccatattgcgtactttgaagaactgcagttcttcttgcaaactctttatttctttgaagttaggtcaggagaataatacggcatcattctgtggacaagccatggttattgccaccaaataaaatgtctctgtatcaagaat

SEQ ID NO: 242638 - DNA, 351 bp, Homo sapiens
ctgcaggtgagccccactggcctctcctcttccttccggacctcctcagctttggtaatggaaagctgcatcctcttctgtccccagttcctctctgggtgtcaggatctctaaaaccctctcagccgctgagaaatctgtctgtctgtctcacagtgtgtttatccgtgcatcatgaaggaccctcatacggctgacgtgccttggctgatgcgaataacactgcagcaagcgtgggagtgcagatagctcttggaaatacccatttccttcagacgcatactcagaggtaggattgctggattgtttggtcattttgatttttaaaattaaaaagaattttaattctca

SEQ ID NO: 242639 - DNA, 517 bp, Homo sapiens
aggttattattgtatagcacatggagaagctggtatcagctgaggcctgtaggcacttccagcctgagcatgttggagcctgcagaataccatggcctcaccttctccttgattcagccaaactctacatgtgcaacaaagtccaggctcctgtgtgtggcattcaagaaccctgattagcccctttggcctatacagaagttcttatagtcctatgaactaaatgtttgcatccccccaaattcatacgttgaaactcttatccccccccaatgtaatggtatttggagttgtgacctttgggaggtgattaggtcataaaaacaaatctctcatgagtgggattagtgcccttataagaagagatactgtttaccacaagaggacacagcaagaagatggccatgtgtaaactaagaagaaggacctcaccagaacccgaccacaccggtaccctgatctcagatttccagtctccagaactgtgaaaaataaatgtttgtgtttaagccaccca

SEQ ID NO: 242640 - DNA, 441 bp, Homo sapiens
caggtagaaagggttttctgtagacactgagtgatccctgtggttcctgctagcccacaacgctgttttgtctgatagcacatgaatctttctgcaccctgcccgccccccaccccccacccacactgtttttaagctgtaagaatgtgtgaccaggcgcggtggctcatatctgtaatcccagcactttgggaggccgaaactggtggataaacctgaggtcaggagtttgagaccagcctgaccaacatggtgaaaccccgtctctactaaaaatacaaaattagccgggcatggtggcacacgcctgtagtagtcccagctccttgggaggctgaggtaggagaatcgcttgaacccgggaggcggaggttgcagtgagccaagattgcaccattgcactccagcctgaacaacaagatgaaaactctgtatcaaaaa

SEQ ID NO: 242641 - DNA, 344 bp, Homo sapiens
tgctttcatggtttggtacgcagcaagtcatgggctggttcagagaaagggggtagctgaatggcctctactcttggtggcataaaagtcagtcacattgtaaaggagtgggcacataaggatagaagatgttgatttggctatattatagacaacctgccacagaaggacttctgtttttctgatcctcccttgagtttgaactacatgttccctgaggaattcctgcctgtggagatcaaattagaatttggattctcagcaggtggtttaataactgcaagcagttgccttcagagtccctgaataaaatcatcctcctggggtcctgggaaaggctttga

SEQ ID NO: 242642 - DNA, 614 bp, Homo sapiens
attggagcttctggttgttgggctatcagacttccagacttacaccttctcatcctgggttctcaggactttggcctcagactgagagttataccatcagccatcacctcttctagttctcaggctttaggacttgaactaaattataccactggctttcctgattctccagcttgcagacagcatactgggggacttcctggcctccataattgcatgagccaatttccataagtctcctcttatatatctttatatattctgtcggttctatttctctggagaaccttaactaatacaaagttcttcatatgaggcttctgcttagttttcttgattaagatggtgattcctgaatgagaccaaaatactcagggccaagccacatgagctaaaaggcactgacaatgctgagttaatgtagatatatcagaccaaagggtgcctgagatttagcttctttgctcttatcctgaaatgcagcaaagctgttgcttcatcatctagcttctgactctcagcatccccatctcctgatgccttcacttgaacatctttgctgggcagctccaccaccatctttgactcctcaagtatgctagcaacctgggtgg

SEQ ID NO: 242643 - DNA, 438 bp, Homo sapiens
tacagagtgtattttcttaataaatgagaaagagctccaattacttttctattccaaagtttatattcagttccaccactcgaattacaagcacggaaaagatttaaccatatatgcaatttctgtattcatgtatgagaaaacctgctgaagtgcttttaaataagactcaagaaaatgcttctggccaataagccatttaaaaaatgtattctggttagttggagaaacatccatgtgctcatattttggagttaaaggagccccatactgttttactgaaacttgttcttcagtatattatcagaaagcatgatgcaattctgtaggtttgccgatctgaagaaggtaaaggagtgaaataaatactcctaactacagctccaagtttgtaatccaatttctttgagtcctcagatatattcttaacaaaaatat

SEQ ID NO: 242644 - DNA, 344 bp, Homo sapiens
gttttctggagtgagaagctgtgtcaggaaaagaggattaggtaacaagtgacctagaattaggatgtgattctccctgaaggattgctgcagaggagataatgaaaggtaagggcttttccaagacatttccacattggactgacctccatctaaaatcttactaaatattaacacaaataaaagggttctggctgggcacagtggctcatgcctataatcccagcagaagtcaagggtggaggatcacttgagcctaggagttcgagactagcctagggaacctagagagaccccgtctccacaaaaaattaaaaaattagccaggcatggcaccaagcatc

SEQ ID NO: 242645 - DNA, 294 bp, Homo sapiens
taactcactgatttccacttgcctgagatctattaggattcctccattgcagatgttctgacacactgaagctatgccttacctgacaagctaatacccaattccttctagaactcatggatttatatttctgttctctccccgctcttgtccagacctttacatcctggattctttaccatttctgcccccaggactcttggatattgcattgtcactcatatccataaaacacgttaggaactggacattaatatgttaatgttattcaaaacacatccatggaagctcaaa

SEQ ID NO: 242646 - DNA, 357 bp, Homo sapiens
agcggggccagagcctggcggtcaagagcttctcgcggagaacgccaaactcgtcctcctactgcccttcagagccgatgatgagcaccccacctcctgccagagagctcctgcagccacagccgcagccgcaggccctgcactacgcgctggccaacgtgcagcaggtgcagatccaccagtgtcatgagacgggagccctttgctgtgtgctctgtccagtgtcatgaggcaggtgtttgcaaagccagctctcggttccgatggggtattgctgacctacttttctaggggaaatgctcttaaacactgtaattatgcatttctaatgaaataaaatgtatttatgaccaaaaa

SEQ ID NO: 242647 - DNA, 1549 bp, Homo sapiens
ttgtttccacagcccgttagaggcccaagctcagggagaccctccacgtggctcaggagctcatggaagaacacagggtcctcagacagagtggagagtagcatgatgccctcttgacatggccagcccagcccctcatctcatccataacactgaagctctgtaaccactgtctttccagcagcaaaatctgggtcacaggactcggagctctagcagtcacttgtgtctaataaataactcccattgattttccagcccagggtctcacccttccttccccagcagcagctctgattgctgacacccagggcgcagggctggaaaattactcacacattattggtgctcttcctcccccatcctcacccaaggtgcatataaaccctgaatagcctgcagcctaagaatgtgaatctctacataataactaagttagaagctgggtgggcacaaccattgtgctatctgataccctcatcccggtcactgctgctgctgtaagagcccaagctaagaacatggacaagctactgtttgggtttctgtcctcactagcctcgtggaagccattgctcagacaagtagggaggtcaaaggtatatgactatgtggagtagggtaggtgggggtgtcagggatagatggtaggaagaaaagacaagaggttaccgaatataaaattgaatttgtgatttttttcctgttcacatttcaggtgaagattatatcttttttttttctctcacagacatgattgggaaggtgtttatttttcctaaagaatctaatagtgctcacgtgagcttgatcacacagctggagaaatctacagaacttcactgcgtgtcttcatgcttataccgacctctcccatggctatcgcctcttctcctacagcatccagaccaagagcaatgagatggtcatttttaagtctcaaattggggagtacaatcttatcattgggggtgacaaggttttcttcaaggtctgtgagaatttccccaccctggtgcacatctatgccagctgggagtcctcctcaggcattgctgagttctgggtcagtgagaagccttaggtgaggatggggctaaggcagggtttctctgtgggagcttaccccaagattgccctgggtagcagcagggttcctatggaggcaagtttggtaagagccagtccattgtgggagagattggagatgtgtacatgtgggactctgtgctgtccccagaagaaatctggtttgtgtatcaaggtatctacatcaaacccaatattctggactggcgggcattgaactatacaatgcaaggttatgtggtcacccagtcccataaatagagttgaagttctgcttcaacaggacaaagttactgggaaggaaatccccaacatgaaagaccagctctgaagacaattctacttcatgccttatgtctatttctctgttttctctgaatttcctatctattgaactgcttaatttacaataaaaagagatgcggccgaattttttttttttataatatgacagaaagaa

SEQ ID NO: 242648 - DNA, 1323 bp, Homo sapiens
ttgtttccacagcccgttagaggcccaagctcagggagaccctccacgtggctcaggagctcatggaagaacacagggtcctcagacagagtggagagtagcatgatgccctcttgacatggccagcccagcccctcatctcatccataacactgaagctctgtaaccactgtctttccagcagcaaaatctgggtcacaggactcggagctctagcagtcacttgtgtctaataaataactcccattgattttccagcccagggtctcacccttccttccccagcagcagctctgattgctgacacccagggcgcagggctggaaaattactcacacattattggtgctcttcctcccccatcctcacccaaggtgcatataaaccctgaatagcctgcagcctaagaatgtgaatctctacataataactaagttagaagctgggtgggcacaaccattgtgctatctgataccctcatcccggtcactgctgctgctgtaagagcccaagctaagaacatggacaagctactgtttgggtttctgtcctcactagcctcgtggaagccattgctcagacaagtagggaggtcaaaggtatatgactatgtggagtagggtaggtgggggtgtcagggatagatggtaggaagaaaagacaagaggttaccgaatataaaattgaatttgtgatttttttcctgttcacatttcaggtgaagattatatcttttttttttctctcacagacatgattgggaaggtgtttatttttcctaaagaatctaatagtgctcacgtgagcttgatcacacagctggagaaatctacagaacttcactgcgtgtcttcatgcttataccgacctctcccatggctatcgcctcttctcctacagcatccagaccaagagcaatgagatggtcatttttaagtctcaagtttggtaagagccagtccattgtgggagagattggagatgtgtacatgtgggactctgtgctgtccccagaagaaatctggtttgtgtatcaaggtatctacatcaaacccaatattctggactggcgggcattgaactatacaatgcaaggttatgtggtcacccagtcccataaatagagttgaagttctgcttcaacaggacaaagttactgggaaggaaatccccaacatgaaagaccagctctgaagacaattctacttcatgccttatgtctatttctctgttttctctgaatttcctatctattgaactgcttaatttacaataaaaagagatgcggccgaattttttttttttataatatgacagaaagaa

SEQ ID NO: 242649 - DNA, 358 bp, Homo sapiens
tggctcgcgcataccaggccggggccacagcgcccgccggcgcggcccccgcagctcgcgccctcggctcccaggcagcgggcgcagcagccgcactcgtcgagcgccgagatcccgggcgccgggcagggcgcaggcgccgggcagccctctggccggcacggaccacacttggggcgccggccgcccacgtcgcggatcccaaggctcggggacagcggcggcagcagcggcagcagcagcagaagcagcagcggcaagagcagagacaagcgcggcatggcttgctccgggacagcggcggcgcctctgcttcgcgctccgctccgcgcccgccgagcagtcaccgctcccgccc

SEQ ID NO: 242650 - DNA, 938 bp, Homo sapiens
tcaatgccagtggacttcccacacccaccatcacacctccatttttgccccgcctccatttccagacatttctagtccttctctactgtgtctcttttctctccaacacatggatttctttttacttgtgaccatttttgtttctcaaaaaaggaaaaggaaaaggaaatccacagctatgactgccttaatacctgctccacagagaagggagccttctggactgcaggctcaagggcaggccaaacttggtgatgctagtaagtgtccacaccaagcagctcttacgtgtgtacctctcatctgtctacacagctcaccggaaacgtgttttttttgtttgttttttttttaattgagatggagtcttgctctgttgcccaggctggaatgcagtggcgcgatctcggctcactgcaacctccaactcccagattccagcgattctcctgcctcagcctcctgagtagctgggattacaggcgcacgccaccacacctggctaatttttgtatttttagtagagacagggtttcaccatattggtcaggtttgtctcgaactcctgacctcaggtgatccacccgccttggcctcccaaagtgctgggattacaggcgtgagccaccacggccggcctcacgtgttcatttcttaactgagctctgtctaaccctgaattatggatggggatgcctgcacaaaacacggagatgtagaaaggtgagaaatttcttagagaagccagttaatccaattattttaggcacttctccaatgaactatagggctaacacatccacctttttcagtttttttgcctctgaactttgctgtagtatttcatggtcagtctcaactatccagatctgaagtgtgctagccccttttcccaacagttaagagtgtcacctctcagcgcttattcccaacttatc

SEQ ID NO: 242651 - DNA, 410 bp, Homo sapiens
gaattcggcacgaggtgaattgaaaaattattcttggagttgaacttacaggcctctgatgagattttggaaagcatcaggaaggaaacaagagtccaaagtgctgggattacaggcgtgagccaccacccccagcctgtgtactcatttcttgaagagcaccattctctatgcctgtattaatttcctttttcttttttataaattaagtctttaaagacttctgcagttttctctctcagtcttaggcatgtctacattatttcattatgtcttgttaaattcatttaatctatgattaaccctcagcctttacttaggtcaacagtctttgtcccttaccatagaattttttgaaaatgagtgcagatggcaaatgtgaaatggtgtaagtggaagaggtaaaacat

SEQ ID NO: 242652 - DNA, 424 bp, Homo sapiens
aatacttgtgcatgaatgttcagagcagctttaattatagtagcctcaaactggaaataagccaaatatccatcaacatgtgaatagttaaacagattgtggtttatgcatacaacggaatagtattcagcaataaaaaggaatgaaccagcagtagacatgaattttgaaataattatgctaagtgaaaaaagtcagaccaaaaagagtatatagtatatgaattctgtttacataaaattctagaaaatataaattaatctacagtaagtgcaaaaagagaggataatggttatgttcattatcttacttgtggtgtgggtttcaggggtatatacgtatgtcaaaacctatcaaatataccctttaaagatatgcactttattgtgtgtcagttatacctcagtaaaaaacatcaaacttt

SEQ ID NO: 242653 - DNA, 527 bp, Homo sapiens
accctttatcccttccacccaccaacaaatatttattgaacacctactatacgcttgctctggacactggggaaccaaatgattatctgaacccatatctatctgatcctgaaggccattctttttccattagagtctagtgaataaactcatttaaataatttcatagaaaattatattactctatgattagacaagatattaaagagatttttatggggtggtgagactatgggaacacataaaaataggcatgaaagactgaataatgctagatttagacacttggcagggaagacccaagccattttgcttgataggtacttaaccccagaaacaacaaaaataataacaaaattttacagtcacattttctgattatagaactttggaaaaaattataaagaagcaaaatttatttttaatgttataagccagagataataactgtaattattttaaagtatgttctagtttctcccccaacccttggctgcttcatatttagctggctttgaactttgtga

SEQ ID NO: 242654 - DNA, 482 bp, Homo sapiens
aactttgtagtagtcgttgtagtggtagacagataacgaataccaaggctgcatcatagactcctcctttaaattttttttctgtttttttttcctcttttcggttttggatataacaccagatttcagttcagagaacactcgttcaacattcagggaaagctttttacgtcacctgctatgaatgaacgtagtttgctggcaaagttttgatgcatttgctaagcattagtgggaaaggcatgccaaaatcttctctataatgtgttcaatcttgggggaaaaaaaaaggaaaaaaaatcttaggaccaggcagttgtatactttagttattaatgaatgacttcatgttaatcttgctagtttagatgatttccaagggaaagtattgtaaatgtttttttttcataatcttgttgtgtttgaattatttgtactttatctgtccagacaataaatgaaagtgtgtagaatggatttga

SEQ ID NO: 242655 - DNA, 912 bp, Homo sapiens
tggagacttattctcctttttaacaccacttgcctccagtaacttacactaattgtcatctataccaagcctttgaaaatttgtagtttttgtaagtttttaggaaatatgcatgctaattagataatgcctaaattatgttgcttttcatgtgaatttagtaaagtcatttaagacccgttggcttagtttttcatgagactttctaaacatgcttaatctctgcatactattttaataataatgtaagtttttgactttttgctattataatgggcagtgaatatatttgtgctgaaatctgtgtggaatttttttgaacatcattttcttactgtatattattagaggtgaaatgtttgggtcaggagttacaaacatatatatttttaaaaaactactctaaagatccttgatacattttgtcaaattgatttcttgtaaaaatgggaccagtttgcacctctgttgtggtatgagagagtgcccatctccttggggacctagccccttgatggttccagcactccatcgaaaaccagctccactgtggggtgttttgtgtgacatggtggtgtcatatgtcttctctgcaagaaaaggcattgttaccaaggcaaacagaaatactcgatacagttatgtataaaccagaggaagcctttgccagagagattgttgacaattgctagagggtatgataatgcagaagttacagagtgttcctttggcaacacgtgttaatggatttgttccagtgttggagccctttttaatgaaaattctcaacacctacactggaaaaataataaaataaaaagccttagtcaggaatgtattgcttgttaagatttagccaaggaagtcacatgttatttaacaaggtagattacttttttctttgtagtaggc

SEQ ID NO: 242656 - DNA, 843 bp, Homo sapiens
agccatgcccttaaaaactaattctactttcaactagtttttttttccaccttcagtctgtagtattgttcacattttgaaaacaatacctacagtaacctgtgaggtaggacatgatagtgttttattggaccccttttactttatgaattggaaaaattaaatttgcatgtagtttgtaaaaaaaaaaaataaagaaagaaaaaagaaattgattgagattatttcagcagccagaagtgtgggacaggcagggcagttattcctccttctcagtttggaaactgaagctcagagagtaaacttgtcagtgacacagttattcaagaagttgtcttcagttgagagatatgtttttcacctgtagcttctggtattggaggagtacctttttagactaaacaaattacggttaaaattataaaggtatttttggagtacctggaaaaaatcagcattttgcttttctagttccatttagtaggaaggcaggaaagtttggtatacctgaattacatgtgagttatttctatttttctaaaaattcttataaattgtgtaaggtaaaaatgactacttcttgttttatggtaaatatagttatatcctttcaagccactgctgtacaaagttgtgaaatctccctgaggctttttccctcatgtcagcttcaggtatccagtatcacttatgcttgataatgattgtatgaaaatcattcagaattatactatgttttttcatataaagcttttgttttactaattttgaaatgactgttcctccattaagcgaatacagccctaagcataaatttggtttgttcatttaaaaatggtcttt

SEQ ID NO: 242657 - DNA, 275 bp, Homo sapiens
cctggctccagaggggagtcaggaggcccccggaagaaagcgtctccctcccggctctctgcttgccatcacccaggaggccgacgtggccagggtgactgcaggacagcttgtgtctttgcaagtcaaggtgggacagcttcgtcccaaagaccgagactacaggacttgacgccgcaatcctccagggtcggatggacccagcgcagaggagattcacgatggactgccctccctcccccgcccattctccactaaactaaggagcccctttt

SEQ ID NO: 242658 - DNA, 333 bp, Homo sapiens
gggattctaaattcaaaatatattcatccttccaactgttgcattaaagagatggtatgtggctgggagtgctggctcatacctgtaatcccaacagtttgggaggctgaggcagaggaggattgcttgagctcaggagttcaagaccatcctggacagcataataagaccttgtctttacaaaattaaatttaaaaattagctgcgtgtggtggtacacgcctgtggtcccagctactcaggaggctgaggtgggaggatgtcttgaggctacagtgagccgtgatcgtgccactgcactccagcctgggcgtcagagagagaccctatctt

SEQ ID NO: 242659 - DNA, 498 bp, Homo sapiens
attgaatgggaggagtatcagagaatttgcaactgctgtgtctcagaaaacattacaactaagtactttgacctaaaggagactggtggaggtctcagaagcaagaagctcactctgatttttcctgtctttctgtgtgaaggatggttgtaaaggaattgatatggttaggcttcctgtccccactcaaatctcatcttgaattgtcatccccataattcccataatccccatgtgttaagggagagaccaggtggaggtaattgaatcatggaggtgttttcccccatgctattctcgtgatagtgagtgagttctcacaaaatctgatggttttataagggattttccttcctcactgggttcttcttcttcctgccaccttgtgaagaaggtttcttgcttcccctttgctttccaccatcaattgtgagttttctgagggttccccaggcatgctgaactgtgaatcaattaaacctctttcctttataaact

SEQ ID NO: 242660 - DNA, 444 bp, Homo sapiens
attgaatgggaggagtatcagagaatttgcaactgctgtgtctcagaaaacattacaactaagtactttgacctaaaggagactggtggaggtctcagaagcaagaagctcactctgatttttcctgtctttctgtgtgaaggatggttgtaaaggaattgatatggttaggcttcctgtccccactcaaatctcatcttgaattgtcatccccataattcccataatccccatgtgttaagggagagaccaggtggaggtaattgaatcatggaggtgttttcccccatgctattctcgtgatagtgagtgagttctcacctgccaccttgtgaagaaggtttcttgcttcccctttgctttccaccatcaattgtgagttttctgagggttccccaggcatgctgaactgtgaatcaattaaacctctttcctttataaact

SEQ ID NO: 242661 - DNA, 485 bp, Homo sapiens
ctagaagactgatgagcacctattaaaggcatcaagcttctttccccatggtgtcattggatttgtttttgcaaatgtctataccaggcaagtgaaagctacatcatggcttataactttctgaaaggcaggaaattgaagagattgcagacaaatacaatcagaagtatgtccagcattggcagagtgagtggagagcagttcaattggaactgctgaattggtacagccaacaggctagctgcctcctaggctcagtacatgtactggcgttccagagagccagaaagatgatcccagacgcaaacacacccatcgtttttgaagcctagcacagggacaaaaaaatactgttaatgtttgtgagtcaagtaaacggattttagatactaaggtcacctagaaacactcattaagtgcccatatacttaatgttttatctaaatatatttcctgttaattaaaactcttaatgtcgctgtagt

SEQ ID NO: 242662 - DNA, 433 bp, Homo sapiens
ccagaaataatgagagtcaactttattatgcagtattaagatctttttatttttttactcttctctgttgaggtgacaatgttaagatcttaattatgtctactaattttaatattattagtttgacgaaagcttttatagcacttgctacgtgccaggcagtattctaagtactttacagatattgttgtttaatcctcataacatccttgcagtgtaggaacttctctgtcctacagatgagggagctgaggcatgagagattaagtagcttgactgggttctcacaggtgctgatggaaatagaatgtgaacctagtagagcagcttcagaactgatgctcttctttgccatattggaatatattactactttggaaattaatgatttattcaaggaagatagattaaaatgacaattcaaaactttctg

SEQ ID NO: 242663 - DNA, 475 bp, Homo sapiens
gattttctccccaaagcttctgctgcgtatagacacatctgcaaggcaccttttaagctgtttttgaaagttataaccagatactgattttgtgacaattctgtgatatacctgaacggttgcttaaacatagagacctaaagctaggggaagcattacataatggacatgaagcaaatgacacgaaactaagtgaacccactgggttgccagattatttctctcttctggacacaaaatcctgtaaggttttttctataggaactttcatttttaaattgctgggctaagtttagccaattgtctattatattcagttgtgatttttttttctaaataattttcttggacatcttttcttaaatttaaaaattgcatactaatggttacatatcactaagctgattaggaaatgtagtcttcacaaggtaaaaataagaaatttcccatcttaatacattaactttgttttcct

SEQ ID NO: 242664 - DNA, 594 bp, Homo sapiens
tttggagatggctatctacttactgtatccttgtatattggatagtagccagggagcaagctctcatttctgttatacgggcactgatcccactcatgagggcttcaccatcatgatctaattacttccctcaaacctcacccttaacgccatcacattggggcttaagatttcaacataaattttgggggaacacaaacatttagtacataactaacagactatataacaaaaatgcttttttatgtatatgaagtatagttgttataaccaaacaccagaaaacctattctgtatctgagacctgttttgcaataggctatttggtgttaggtaatgatcttctgacttgtaatcactcttggtattgggaaagtctaaaatattatagagatacttgctttcagtgtgtcatgaaattctctttcagtcactttctgaataaagaaactgttctgcaacagacatttgtgaaaggatttgtgaagacttacacaggattttggttgatcaaatgcaatctcaaaaataattatacttgttaagcagtttagactcttctcatgatatatgcattaaactgaagattataga

SEQ ID NO: 242665 - DNA, 496 bp, Homo sapiens
gctttcccactgggtgaattcctcagaagaagcaacttcagaatgtcactgcttgctgtctgagctgtgccacaatgcctctgaattagcctgagaagccttggtcaggaaaagcaaagaaatcagaattgcaggataaggcttctcccaaaagactctcaagaagtgtcctttctatctgtacagatcagagtgtttggacactgtgcagaagtctcatgaaaaaacatgtaactttatcctgaagacatctcagcttccctttttatgtggatgatcaagggtgtctgcaagtctgggaaaaagggatagaggagaattaacagccaatactccagggcctggcttactgatagggaaatggctgtgatgacagaggaatctggggaggcaggaggagcttgacagaaacaaatggatgtcccaaataggctagttcataattttttaaaagttgaatattaaaaaaataaaacatacaagttaaaaatgccat

SEQ ID NO: 242666 - DNA, 459 bp, Homo sapiens
aaatattgaattgtacccatgagaccatgtggccaggcaagaagaatgagataggccctttcttcaaagtatatgattttttttattattgaagaaattattcataaacacttgaaaacaaagcatattcaaagttttaaactgtacctaaaagatagtgccataagagttgtgagcttttgctaaaaactttgaccttaaaatgggcaactcatgaactatgaattattttaagggtctaatttattgcattttttgattcatatgaatttcccttgacaatgttaattcagttatcagggcaaatgaaaaaataagctctgtaaattaaaatacagaaatatttacatattgtggcttgtctctggaacttttataatgggatattatattttaacataatgttggcataaaatattataatcaagatatcagcaatatagttacaagttgttcttt

SEQ ID NO: 242667 - DNA, 575 bp, Homo sapiens
gtggtttaaaaaaaaaaaaaaaaaaagcacatagcagactggggaaaacctttgtggcaaatgacacagagtaactaatttttgtatttttagtagagacggggtttcaccacgttggccaggatggtctcgatctcttgacctcatgattcacccacctcggcttcccaaagttctgggattacaggcatgagccaccacacccggctgtacgtcagcttttaaaagctcccgtttgagttcatggggcttggtttacattttctttttctgccgggccttctctgtgtacagacttactggcatttttagctccgtggtccttgtgcacctgatccatggtttgacggaatcagtgtggtgttcatggaagccagatcttggttactctgatgccccatcagtgtgtgtcttcgtgtggacctgggcaggtggttggtacgtgtgcctcctctgaagcatggtcttgtcttggaactgagctagggacagccaagaagtgactcggacccaggactaggcttagctgtcaggccaagtttcaacggtttggcagaaacaaactcatggaattt

SEQ ID NO: 242668 - DNA, 383 bp, Homo sapiens
ctcacggcttcccttgggtaggggaaacaattccctgaacccttgcacttcccgagtaaggcaacaccccaccctccttctacttgccctctgtgggctgcacccagtgtccagccactcccaatgagatgagccgggtacatcagttggaaatacagaaatcacccaccttctgcgtcgatcttgctgggagctgcagaccagagctgttcctattcggccgtcttgccttattagattttccattgccaaatgtgtgccttacatttcaagggctttaccccatccttgacccttacaggtgtgcatcaacacgtgtaatcataagcttttattcccctttgcactcatctctaggtcctcttagtgcattattagtggac

SEQ ID NO: 242669 - DNA, 820 bp, Homo sapiens
ggcacatctcacatcgtggcagacaagaaaagagtgagagccaagcgaaaggggtttccccttataaaaccatcagatctcatgagacttattcactgtcatgagaacagtatgggggaaaccacccctatgatttaattatctcccactgggttcctcccacaacacaagggaattatgggagctacaattcaagatgagatttgggtggggacacagccaaaccacatcacgcctgtaatcgacactttgggatgccaaggtgggcagatcgcttgagctcaggagttcaagagcagcctggaaatgtggtgaaaccccttctctacaaaaaaaagagataagaatgaaaactactcattggctgtaaccacatgaaagttatctttatcgcaagctatataagtagaagagggtatggagagttattgtttaatgggcacagagacagagttggtgtttgggatagtggtcatggtggtacaacattgtgactatactttaagccactgaatggtacacttgaaaatggtttaaatggtaaattttttgttatttatatcttactacaattaaaaaaggggctactttggtatgctaaaatataccatcaacaactgaaaatgagctgaagaaaatattttcaaaaatgagattatatttcttaattcatagagtttatacaagtcaatttttaaaaagcagaacgattgcagttttacaagtcaggaatggttgattcacaaaaggaaataaagatgaacgaaatagtttaattatgaaaacatcacccttataaataataaaaagaagttaaatt

SEQ ID NO: 242670 - DNA, 414 bp, Homo sapiens
tatttttatgtgaactcatcattttagaaaaaaaagtacatggatcagctcaaagactgatttaatgaagtatcctatcattgggttatacataggtgctagttagagagtgcattattttgtcttgaaatatttacattgcaaaaataaattaaagaatgttttctaaagccattttagatttttttatgaaagtgtactttgatcaattgacacaaaaattcatgataattgcatcatatacttacataactccataacaaataaaaaataaaagaaattttgtgtgattttatgtacataatgtaaggatgtgtctttttttggccattctgaaattttatttgattcaaatattcttaattgactggtactgagtgacaagaattaaataaaaattgaattagtttaata

SEQ ID NO: 242671 - DNA, 396 bp, Homo sapiens
ttgccttttccaagcctgaagcagcaaagaaaaaggagataaataaattttgaactcttctctggagcctggagagctgcttcctctcaataaggagaattgcttcctgaacccagatgagaagtggtttctccttcagtccctattcactgcacagagtatgtggcctatgtatgctcgtgggtattatcttctgaaagagagttactgccatgtgcgcccctgttggaaatgtttcattggtacagaaacaacgtggagaccgaggcattgccttattgccttgtctgtttttgctttttttttttttttttttgaggtggagtctcacactgtcacccaagctgaagtgcaacagcacgatgttggctcactgcaacttccacctcccggatt

SEQ ID NO: 242672 - DNA, 286 bp, Homo sapiens
gcagaaccgagattaacagaaccttgtagactcataatggaagggtgagacatttgtaaaaatagtctgtctccaggagaaataacaaatgccaataaacagagaaagatgttcaacctcactaataatcaagaaatgtaagataaaacagtatatactacttcttatctgacagattgaattagaagacttgttggcagagcatgagaaaataaacccagtcacgcatctttagtggagtgtaaattggcagcagtcttctaggatatagtttctttgcctcctt

SEQ ID NO: 242673 - DNA, 720 bp, Homo sapiens
cctgcctcgtggctgactcttgaagcccaaaacttcctcaaatcagccttttgcccaacttctgtctactgtcggactctacaggccagcctctgcctcacagtggaccctccagacccagatggtgtctcactgtggcatcctcaggtgaagctcctgcctttctgcagcctctacaggcccagctcctgccttgcagtggcctctttaggccaagctcatgccccatggcgacttttccaggcacagcttttgccttttgcagcctgtccaggcccagaatgtccttaactcagcatctccaggacgagctcatcctcccagtgcgtctacaggcccgtctcctgcctcacaacctcctttggcccaactcctgctgagcagctggcagcctctctaggccacagacttcttaaggtaaagcttttcaggcccacctttggcctcccggcagcctcagcaatcaaactattccctcactgcggccaccgaaagccaagtttctccctgcctcacggcatcctccgaaaactgagcatttgcctcacggtggcctccccaggccacgaatctgcctgcctcccaggcagctgctgcctcacaatggtctctttaggcccagttcatgctaaaagatggactctccaggcacagctcttgcctcctggcagcctctgcaggcccaaattctccaaaagatggcctctcctaactcagctc

SEQ ID NO: 242674 - DNA, 255 bp, Homo sapiens
agtttttcatttctggccatgatacataaattttcttgtaaaatagatatcttgaagtaaaagtacaggtttatttaaacagttgagagtgatagtactctgctgtggactttttctccttgataatggatctattcattcctctgtgaaatgtaaaaataaaaataccaacctcgcaaggttgttgtaaatattacacatgactttgtcaactctcaaagtacaattaaaatgttcaaatgggaaggtaagaat

SEQ ID NO: 242675 - DNA, 626 bp, Homo sapiens
acatcacttttattatagtataccactacaattgttctatttttattattgttaatgtcttactgtgtctaatttatttatttatttatttttagatggaatctcactctgtgagtctcactctatcgcccaggctggagtgcagtggcacaatctcagctcactgcaacctctgcctccagagctcaagcaatccgcccaccttgacctcccaaaatgctgggattaccgacctgtgtgtactttataaattaaactttatcataggcctgcatatatagaaaaatatatagtctatacagtgtagagtgtgctactatctgtcctttcagacatccaccaggggtcttgaagcttatcccccagaagatgaggtgggaactactgtaaataattttgaccctttgaaatctgatgagacttgttttacttcctaacatatggtatattttgtgaatgttacgtgtttatttgaaaactttaattcctgtcagtaacagcttgaagtcttcagtacaaagcgtctgaacatctttcattccgtacaatgcattctgtattctgttttgtggaggtgccatttaggtataatacgttaattacttaaaaaaaattttgtatcttta

SEQ ID NO: 242676 - DNA, 295 bp, Homo sapiens
gaattatcagacccaagcaagtggagaataggaggcaagcaggagggaggaaagaaatgggcagaggccaggtaatgaggggccggggtaaggaccatgaccttttaggtcatgggtgatgggagtgtggattaacctaaccagtctactctgccctcccctcatccatccaacaccactgcccctcatccccatgtccagttcaaacccctgtccaaagtaacggttctcaaacagtggctcccagaccccttgatgacccattgtattattcaacatctatgttcataatgtg

SEQ ID NO: 242677 - DNA, 594 bp, Homo sapiens
ccctggtgaccacttggttaagggggccacactcattgagaaagttgagcccacccccatcaacccagtcccccactaccccactcctttctgcaggagtttccctgagacacaggttgttgggttttaaatcagggtaatgttggtggattcataaagctagatatagcatgtcattcttctcccacactccctctcctcagccccccaaaattgcagtgaatttaagcaaatcctacaaaattaaattgcccctttgctaaagatcctatatgtctccaatcctgccaggtgtagagtcagatagttggcttttggcctttaattttgctgctagctattaaatttaaaagagtatcattgaagtaagtaatattctcatttctgaaattaattttcccctcccagtctctctctctctctttttgccagcacagattaaatggttctttcagatctgcaaacaataaaggataaaattatttatagggaaatgaggatgctgttttattgttggcatattgttccagaacataacaacattttattttcaagcaggagaggttagaccagggggagaaagagggggaaagg

SEQ ID NO: 242678 - DNA, 468 bp, Homo sapiens
gcagaattccagccaaggagcctgtaattgacaacactggctcagcccagtggctgcttcacatggtttctctacttctaatgacatcaatttctctcatgccagtagtgccttcctttggcgagcaactatgcaataaggacatccgcttccttcggcgcttgatatcagccaggggattaacctgtgcagaggtgacttgttagtcatcagttactgcctcaccaaagtgaggtcaagttcacagcaggtttttgcaaagctacgtttttattgtcagcataggaagcattttcttacacatgcaatggatggttcactttagaggcacatctgaccactatgagagtttgtgggaggcatcagtgcacttgggttacagacaactgaataaagtacaaatacatcattagaaaagcagagggtgtgtgctccggtgacgttgcaataaagcaattctttggcata

SEQ ID NO: 242679 - DNA, 417 bp, Homo sapiens
gacctgagagagtctgtgtcgtgacctggcgttcactgcactgtcttgctgattgacaaggtaccagcttgagactgctacctgtgtctcagacccccctcaggagcgggattgaacaaacccagtgacaagtcccttctcagagctgtgtatcccaaaaacacaggaagaaatgaaacatggtcctcctgaggccggcaaccttggtacccatctgtgctctctggatgttaccagcctctgtaaggcagagatgttaacccagccagaaagcagaaatgccatacgggatgaggtggcttttcacagagccacgtgcagtttattcagcctctgcaagattggcgagaagcacatgaggttttagtttgggcgtgttttgaaaatagatgccaaaggcccctgtgccaactgcaa

SEQ ID NO: 242680 - DNA, 818 bp, Homo sapiens
ttcctgcccagaacgagggttccgcagcagaagccaggactgtgtgactgcacagtggggacaaagggcctggggcagccctgccccatgggacacaacagcctttgcaccaggatgggtgccccggtacgggccagctgaggaatgagctcctctgtgcctgccggggcccccacacccacagtgggaggaggcagggcagagaagccagctgcccgccccgcaaaacccgcccgaggctccgacagcgctggcctcaggccactcagccacttctgacccccaggtctcgcattcccttccccacaggtcttcgggtccccggcctcggcctcatgtcctgcagaactgccgaggccagggaatcggacaggcatggggaaggggatgtgagatctgagggccagatgactgccccctttttcttcaattattttcactgtggtaaaatacacataaaataaatttaccatcttaagccactttttttgttttttaaagacagggtctcactctgtcacttggcctggagtgcagtggcacaaacctggctcactgcagcaccaccctctcgcctcagcctgccaagcagatgggactacaggcaatgccgccaagctctgctaattcttgtcttactttttgtaaagacggggtttatgttgcccacgctagtcttgaactcctgggctcaagcgatcctctcaccttggcctcccaaaagtgctaggattacaggcatgagccactgcgcccggcccatcttagccatttataagtgtacagatcagtgctattaaatacgttcataatgttgc

SEQ ID NO: 242681 - DNA, 403 bp, Homo sapiens
tttggcaaataggaaattgcaggacactcctggggtcgtcctcaccctcccacactcacacagccacaatgttacagctgaccctgtgagtctagagtcgagacacggactgagggttgctccatgacctggtccccttctagatgtgaatcagtgcaagggcccaggacagcggaagaggtgtgaagccatcctgtgatcgggaagccacagggtgtccagacccagcgggagccgaggattcaggagaatctccccagtcagctccagaggtgcccacagtgtgagctctagtgtctcccaggtaggggccaaagcgtcacctgcccggccctgggggtgcaagtggagtggattttactcctgtccagaaaatggagtgagaccctgtctctaaataaat

SEQ ID NO: 242682 - DNA, 539 bp, Homo sapiens
gctgactctcttttcagattcagcccagttgcacccaagtaaaataaacagtcttgttgctcacacaaagcctgttggtggactctcttcatatggactcatgtgacatttggtgccgaagacctgagacaggaggactcctttgggagaccggtcccctgtcctcgccctctctccatgagatccacccatgacctcgggtcctcagcccagccgaaggaacttctcaccaattttaaatcggggacgcaaagccaacaagaatgaagaagtggccagatgtgaatcagtgcaagggcccaggacagcggaagaggtgtgaagccatcctgtgatcgggaagccacagggtgtccagacccagcgggagccgaggattcaggagaatctccccagtcagctccagaggtgcccacagtgtgagctctagtgtctcccaggtaggggccaaagcgtcacctgcccggccctgggggtgcaagtggagtggattttactcctgtccagaaaatggagtgagaccctgtctctaaataaat

SEQ ID NO: 242683 - DNA, 600 bp, Homo sapiens
gctgactctcttttcagattcagcccagttgcacccaagtaaaataaacagtcttgttgctcacacaaagcctgttggtggactctcttcatatggactcatgtgacatttggtgccgaagacctgagacaggaggactcctttgggagaccggtcccctgtcctcgccctctctccatgagatccacccatgacctcgggtcctcagcccagccgaaggaacttctcaccaattttaaatcggagacagaggagacacgttttgtccatgaactcaaaattctgctgctggtcacagactcgggaagacagtcttcccttggtgtctaatcactgtggggatgcatgtctgattattcacccacattccagaggtgtctgaccactgcagggacgcctgccttgatccttcaccttggtggcaagtaccacctcccctggatgggacgcaaagccaacaagaatgaagaagtggccaggtatggtggctcatgcctgtaatcccagcacttagggaggccgaggaggaagaattgcttgaggccaggaatcccagaccagcctggacaacatggcaaaatccagtctttacaaaaaaaa

SEQ ID NO: 242684 - DNA, 419 bp, Homo sapiens
ttaattgttaaattaagtgaatattttctagtgtaacattttaatttctttaataattttcacttttttggttatttttttagccattgctctaggacttgctgtatacaatttgatttaccagaatctgcttcatatttgcactcaattaattctggcaagatatagaaatgttatttgggaggccgaggtgggcagatcacgaggtcagaagtttgagagcagcctggccaacatggtgaaaccctgtctctactaaaaatacaaaaaaaaaaaaaaaattagccacgcgtggtggtggccgcctgtaatctcagctattcgggaggctgaggcaggagaattgcttgaacctgggaggcagaggttccagtgagccgagattgtgccattgcactccagcctgggcaacaagagca

SEQ ID NO: 242685 - DNA, 583 bp, Homo sapiens
tacattttcatcaataattttcagtctaaccctatgattacatgcttgccacctgccccccaaaataagtggtctatagccttgttagcaattcttcacaatgatacttatcatcaactggacatacttctacatttcaatttcaagatctataagtggaattttaaacatagtttttttttttttcattttcagtaatgatacagaacagatgttcaccatccaaagtatggcaggctttcatatttttaatactaacttattttagccatgtgtatatatatgcataggtaagagtcattaattaaactttattgacatataaaaataggaaaaatgcacaaaagtaaaggtacagctcctttacttttttttactgaaaagtagttttactactaaaaagcaaacacttttgaaatgaaatctaattaaaaaaaaaattactagcacaacggaaatgtgctttttgttctcctaatcagtacctacctttctgctccccaaaactaccaggtatacagtatacattttttgtgtatggcattttttgctcaatgttgtgtttgccaaactcattcactgc

SEQ ID NO: 242686 - DNA, 516 bp, Homo sapiens
caccagcatggaagcttgcaaatggatgccagctgcttggaaggaaatcctggatagagtggtgaagcactgttttaaggactgctgcatcacccacactgctgaggccacataagaggattttgtattggaaaatttgtgcattgtcaactctgagataaaacttgatttagaagtcttggactctgaatgtttaaaagatctagtagtacatggggctgggcgcagtggctcacgcctctaatcccagcactttgggaggccgggcaggtggatcacctgtggtcaggagttcaagagcagcccggccaacatgacgaaaccctgtctctactaaaaataccaaaaacaaaaaacaaaaaaacagctaggtgtggtggcatgcacctgtagtcccagctactcaggaggctgagacaggagaatcgcttgaacccaggaggcggaggttgcagtgagccgaggtcacgccactgcactccagcatgggcgatagagtgagtgagactctgtctc

SEQ ID NO: 242687 - DNA, 521 bp, Homo sapiens
atatggaaaaattgcataattatctatgggggtatggcacaccaattttaaaataatgttcacgtctctggagaaatggggtctcaggatgagtggagtctcagctttatctgtgacactttgtttcttgagagatgtgtggaagagaggagggaagtgatgagagggagtgaagaggaagagaaaggaaaacagagaagaaaggaaggggtgaagaggaagagagaggagaacagagaagaaaagagcttctgcacagcaaaagaaactaccatcagagtgaacaggcaacctacacaatgggagaaaattttcgcaacctactcatctgacaaagggctaatatccagaatctacaacgaactcaaacaaatttacaagaaaaaaagaaacaactccatcaaaaagtggacgaaggacatgaacagacacttgtcaaaagaagacatttatgcagccaaaaaacacatgaaaaaaatgctcaccatcactggccatcagagaaacgcaaatcaaaacca

SEQ ID NO: 242688 - DNA, 445 bp, Homo sapiens
gtaaacgtcaaaatatataaataatgtatctttttaaatgacagtatacttttatatatatctgtgtgtgtgcatgcgtgtgtgtgtgtgtgtgtgtgtgtgtgtgtgtgtgtgtgtgtgtgtttagagattgtgcttcactctgtcacccaggctggagtgcagtagagtgagcatagctcactgcagcctggaaatgctgagctccagggatcctcatgccttagcttcctgagcaagtgggaccataggcatgcaccgccatgcctggctaactttaaaaatgttttcagagacagggtattgctctgtgttgcccaggctggtcttaaactcctggcctcaattgatcctcctgcctcagcctctgaaagtgctgaggttataggcatgagccactgcacccagcttgatattatgttttaaaagtacagggtcaacagtt

SEQ ID NO: 242689 - DNA, 421 bp, Homo sapiens
gggatggaattctgccatttacatggtaaagattagtgattcttaaccctggctgtatattagaattacttagggaatttgaaaaaatatcatatgtggattctacatccagcatttctgagagatgtgtgtgttgaaaggcttgtgggtgggacaggggtggggagtggtccttgataggatgccagcatcagagttttttctaaaaggtccccagattctatatgtatccaggatgagaaccactctctacccttcgagctgaggcagggtcagatctgtgggcactgcataaaaaatggcaacaaaagggaatgtcctgagttatgtttatgaatgttgttgctaatgataagagacgattgagatatcattgagttgaacttcttattaaaaacacaactgaaacataaaattgata

SEQ ID NO: 242690 - DNA, 329 bp, Homo sapiens
gcaaaacagaattagaaggtgggggtgtcatggaatcttaggagccctgcattccaattgcccaggctttgctgaaacacaggcaccctagtctcacctgagggtcaccaccaatggggatcattccttcagcattcactctcagtattcgtgtacccttgtgacaatgccacagacccgtgtctttcccaatacatctaagcatattcctcactgtttatctcttgtctgtacaacatcatcaaggcagaaacagtttcccaacaggttatattttcttaatggtagtcatgaaatcataaataaaaaaatagaatcatttagtatgt

SEQ ID NO: 242691 - DNA, 265 bp, Homo sapiens
caaaaacccttccctccacctccacttcccctactaccaagttttcctaatcccagtattccacagcaccattcacccagttgtttagagataactaggagccactcgtgattactccttttctctcgactttcctctttcccacttgcccatgctgtatttggagttcagccaatctttctccccaactgcaaaatcccattgcagtagtccctgtacctactgcagtagccctgaataaagtctttcttactgtgctttaaca

SEQ ID NO: 242692 - DNA, 390 bp, Homo sapiens
cactgcaagagttccggtctggcagagagcgcggagagacgcagagcgcgggccgctcctccagggcgctccaggccctccggccccgggtcggcgggtgagctagggggcgccccgggacaggccgcgccctctgccctgcagataccggaggcctctgctgtggctgcccactggctgggcccaggccttgaagcggtggcgaacgtctcttccctaccctacctcggtgactgatggcggcggcggcctctcccagtccggaccctgccggccgtcgggtctcccggcccaagcctgccgggcctggacgaaacccccgccgagcagcctggacgcagcgcctttgggtggcggcgggagtagcgtgccgggaagcatggcggccgc

SEQ ID NO: 242693 - DNA, 615 bp, Homo sapiens
gtagacatgaaggagaaagaaaaggataagggagaagaaagaaaggacagagagaaaaaaatgaacaatcagagtaaaggcagcaagcattctctaactcctgaccgcgagtgatcctcctgcctcaacctcccaaagggctgggactacaggcgtgagccactgcgcagggcctcaaccagcgttctctagagcggtggatcccaaatgccatctgaggaccagcaacagcagcagcatccggttaatggagtcatggtgacactgaaaattcttcctgtgttggcatctgacagaggatttgaaaccgaatgctgaactcatgttaggaaagtgaagcagcaggttctctggagagagatggtctctgcatagcagaaatggagttcccccaagtgaagcgagtctggccgctggggcgctggcttcctcactgagacaccagagagggagccttcttccacattgtcatctgaagatttctcatcattagactctctcagcgcacccagaatgggacatggtgggtctgcagaaaaggaaacagtgtttccagatccttctagacacacgcttagtgcattaaaggaaaatcattcgcagtctaaatgggtt

SEQ ID NO: 242694 - DNA, 492 bp, Homo sapiens
gtagacatgaaggagaaagaaaaggataagggagaagaaagaaaggacagagagaaaaaaatgaacaatcagagtaaaggcagcaagcattctctaactcctgaccgcgagtgatcctcctgcctcaacctcccaaagggctgggactacaggcgtgagccactgcgcagggcctcaaccagcgttctctagagcggtggatcccaaatgccatctgaggaccagcaacagcagcagcatccggttttcctaggataatgtgttggagggctctgaaccccagaagcttcacacctagagctcttcagatctacccttggtcattgacatcccagcatgaatcagtgactcagtccttccagatggatgcaggaggagtcggagctggaggaaaaggcgatgtgatgacagaagcagaaattggagcgatgcactttgagatggaggaagaggccacaagccaaggaatgcaggtgcctctagaatctgata

SEQ ID NO: 242695 - DNA, 560 bp, Homo sapiens
gtagacatgaaggagaaagaaaaggataagggagaagaaagaaaggacagagagaaaaaaatgaacaatcagagtaaaggcagcaagcattctctaactcctgaccgcgagtgatcctcctgcctcaacctcccaaagggctgggactacaggcgtgagccactgcgcagggcctcaaccagcgttctctagagcggtggatcccaaatgccatctgaggaccagcaacagcagcagcatccggatttgaaaccgaatgctgaactcatgttaggaaagtgaagcagcaggttctctggagagagatggtctctgcatagcagaaatggagttcccccaagtgaagcgagtctggccgctggggcgctggcttcctcactgagacaccagagagggagccttcttccacattgtcatctgaagatttctcatcattagactctctcagcgcacccagaatgggacatggtgggtctgcagaaaaggaaacagtgtttccagatccttctagacacacgcttagtgcattaaaggaaaatcattcgcagtctaaatgggtt

SEQ ID NO: 242696 - DNA, 814 bp, Homo sapiens
ttaaccaattactctctttttggacacacgaacaagaagcctttatggagacttaaaatcatgtaagaatagtgtaaagcaataaaatccatgtccaactcttctcatttgtttcagggacaaactgaagattctaaaaatggtatgaggagaaatgtatgtagcatttaagagaaaagccagtaaaagaaaaagattgttcattaatgtacatagcaaaagaaatatcaaggcaaaatataccttctcttgccccctgccaactgatacaaaaatggaaaacatgatttcagaagtacagaggcttatcaaaagaaaaaaaattcaacgttatcattattagtcatgcctattttaataaagaagcacaaaatctagtcaagttcaatataaacctcatgcagataaatggaaggtttaggaaagaggttgatgaggaatgtaatgtttctgtgacaaaagaaagggaagaaacatattcactgagagttagaaaaaaaaatgtaattttaaagggaaaggaataatggaaatttggatctttcccaggttcttggggaaagtgtttacacgaatcccaatggacattaaagcttttggctgaaactctattgtctccttttgttgataagcctttggtatatgtatgcattcctgaatagacacacttacgtgtaacactgtcttctaataacagacagctgtagtgaaattttgacaagtctgaatagttgttaaacgcaaaaggctgcaaagatgatttttttcattaatatgttgttactctgggcagaggacagctgagtccaaaaga

SEQ ID NO: 242697 - DNA, 457 bp, Homo sapiens
gactccttctatgacaggtagtgatgggggatgcatcttgattttatatcagcatccattttactacagtcgctgcaagtcccattcttatcggattttaaaataagagtttcaggagttggcatatttttattctgtttgattctccttctaatcagattttccatgagctgatattaaaagtagtgtgcctttacttcatcagatagtgaagaaaggtgcccaggaatattttgaaaagtgaaaaaaaaaagggggagtttgcccagaatgaaaaattcaccacctgcaagctgcatttgcataattaagagttgctgctccatccatgggctctcactacaccctgccacgtgggcggggccacattgcctctcagcgctcttatctggccttcccagaccgtggatggtctcctcattagcttgcagatgtttagtcctcttttctgatgaga

SEQ ID NO: 242698 - DNA, 550 bp, Homo sapiens
ttgcagcgacaaggtgtctacctggacatctcatattgaaggctcttatttccagtgtcagctctgtaggaaaaatatctgtatctgatctgttttacctttttgacttgcacgaagtacttggtaacaagacactgcccttcaggagagaagcagcagcatgccggggcctcagcctggccactcttttgtttttctgtactctttgaaatatgcgtggctcaaatgccagggatgtaaatagaagtaagttaccagaataaagatgctatcagcgatgtgaaccggaatctacaggctgaggctgaggcaggcgtctgattagatgggctgagtgactccacgagacaacagtgtgcatttgcacctgacgccaggtgagatgagatactgagggtctgttacagccacttttaaatccatacgattaagaaatttgtgtgaaagagtgccagaaatgaggtgaaaaaaatctagcttccaattccaatgaggtaatttgtgtaagtctgatttggaaatgtttctctttattacatgttgaatctaa

SEQ ID NO: 242699 - DNA, 378 bp, Homo sapiens
ataaatatatagtttatatatttatatatttatatattatatattatataaaatatgaatatatatatgatatatttatataaatatatagtttatttatattttatataaatatatagtttatttatgtagtttatataaataaattataaaactatatatttaaatgtaaatatataactatatataactatagctatatatttatatatttaaatatatagttatacgtatttatatttaaatatgtttttatatatttaagtatatatttgtatatatttaaatatatgtatgtatttatatttaaatatatgtttacatatatttatatataaatatatataacaaaaaaacaataaaacagttaacacaaac

SEQ ID NO: 242700 - DNA, 516 bp, Homo sapiens
tttgagtgcttagtaggtgccaggctctgttctttgtgttaaatattcaaaggtgaatgaaattcatgcgatttctattcttatggagcttatgctttctcagtgttaaattttctattctcctgaacttactttctataattcatgtctttttatctttaagtgcttccatgtcactaatgagagttttcctcatgagaagaacagatttgtattttgctattctgggataaacaagaccaatatatttacatttttcttacagatgcacatccttatctatttggaaacaatgaatgctttttgctattctctttcaaatttaaagatcaattgagtaaaatattaatatatgctgatgtaatgttgactgtaaagtattagctcctgtctcaattgtggtttattagtcatgcttgaattttgtgtttattgattataaatatttacttttattttgtcatagattttgatttcaaatgtaatttttgcaacataaatgcccattcaaactct

SEQ ID NO: 242701 - DNA, 674 bp, Homo sapiens
ttcacctctacacctttgtgtaagcactctctgcctgccaagtttcctcctgttctccatctaatccaaactttccagagccctcctgcccctgaagataccccttaccacagcacagacttaagagccccttaaggtctgaggtccatgtttgaccttctcccgcttgtaagccaaaaataaaattcaaaggcccccagcaaccatctgaatgcactccctccttgaatagggcactcttggtttccacaacctcttactgtagccaagacattcctttctagtgataaccaattctcgacgagaaacagaaaatctatccaaaacctcgaagtgccgcctttctggaccaaaccaatgtatgccttatgtgtatttgattgatgtctcatgtctccctaaaatatgtaaaaccaagctgctccccgcccaccttggacacatattcttagggtctcccaagggctgtgtcacgggccatggtcaactcatatttggctcagaataaatctcttcgaatatttcagagttcaactcttttgcttgacaccttcataaagaaagcaacattttggaaacaacagccaaaggatattgtagtagtggaaagtggctattattgcagtgttcacaaagcagtcttttcctggtcttgggtctctacacttagaaga

SEQ ID NO: 242702 - DNA, 1001 bp, Homo sapiens
tgtagacacggagtctcactatattgcccaggctggtcttgaatgcctggcctcaaacaatgctccagcctcagccttccaaagtgctgagattataggtataagccaacatgccctgcccattgtttatttttaaattttcctctttttttgagccaaacctaagcaggttttccccctgacttttctgccagaactgcttttgtcaaattaaccattgaccatggcatcgctaagtctgctagtcattttccagtcttcatttttcttgtcataacagcagaacttgacagttggtcattctcttttctttgaaatgcttttgtgtcagtaggcttctgtttgtttgtttatttgtttgttgtgagacagtcttgctctgttgcccaggctggagtatagtggcatgatcgcagctcactacaacctccgcctcctgggttcaagcaattttcatgcctcagccacccaagtagctgcgatgacaggcatgtgccatcacgcccagtcttttgtcagtaggtttctataataccacaatttcctggccttttctccaccttgctggcttttctcagactctttactggatcctcctcttctccccctgcatctaaatgttggcaaaagatgtaagtaatttcatctagtttcatggctttaaatatttgttggctgatgattcctaaattcgtatctttattataggcctttcctttaactccagactaatccaactgtacttgaatgtctaaaaggcattgtgcacttgacatgttcagaacagctcttgacgttgccaacactactacttgaccagcctgtcttgcagaagtctccatctcagaaatgatgatacctctattcttctagttgctcaaaaagcttgagtgttgtcctttgactcaactttttgccctcccacatcttgtttgccagaaagtcctgaggcctctttcgcctaaccacctgtaccctcatcattttcatccaagccacca

SEQ ID NO: 242703 - DNA, 369 bp, Homo sapiens
tgtggtttttattttatgtgtccttaagagttaggcagagtttattttgcagttactaggaagtcatcaaatggaagcctctttcattcatgttatttcaacattctttgagcatctttcaaggtctaccagtcccggagccttccagctacatcctggaggggctggagggttccgcttatatttgtgggtgggtgcaggcctggcctgtagaaagaaggaaagcacacaggaagcagaagtgggcccaggcagcgggctttctggctggtgctggagaaaaggcgctgaaccggatctgtcaacttcagttacagctggctctgagcagtgaacctctctccttgttccttactgactgagaactta

SEQ ID NO: 242704 - DNA, 238 bp, Homo sapiens
gacagtcccagtttattgccaagtgctgtcccacactaattattaatactgtccccttttactctcaagagtgatgataaattaggacaccctaccaataagttgttatctagcttctgctaaagtgctctggaaatggggggaggcttgctaactcacaagttgcccattctatttttaaaaagctatactaaaaatatatactatatatgtaatacataaaatcttaagagtatta

SEQ ID NO: 242705 - DNA, 806 bp, Homo sapiens
agaaactgggtggacggggtcttgccacgaccccatcctcaggcacagcactttgaaccaggcctgggccaccgccaagggcgccctcctggaccccgggcctctgggacgctcgctgggggcgggcgcgaacgtgctgactgcacccctggcccgcgcctttccgcctgccgtgccccaggacgccccagctgcaggcgccgccagggagctgctcgccctgcccaaggccggcggcaaacccttctgcgcctgaggcgggcgggtcccgagcccaggagggaacccgcgctcaggcggacggcgccgactctttttactgagtttccagaggaagactagcgcggccaccgcgaagccgccaacccaccggagagggggcttctgaacttggactcctgggaacatggacaagcccggcgctgccacgccggggcctccaccgcctgggcctgagcctgaccgggccattcccaaatttgggacgcggaaggagaggctctcggagcagaagaggccagataccctgaagcataaagtttacgtcaaaagtttacatggagaaggcggttccgttctgaagcgtggtctgctgtcccctgggcgtgaggcctcctgggcctgtcgggcctccgatttcatcctcagcacgtaatgctcaccaacagcacttgcactgagttgactcttgcacactcttgactccataatatgatgctttttaagatgtatgttcacaccaataattgcctgcttcagaggctaatataacaaaaccaataaaaccgagtgatggtgtttgtatt

SEQ ID NO: 242706 - DNA, 429 bp, Homo sapiens
ttgccctgattttctggaaagactaccacacaactagccagcctgcttgtgtatacatagctcgacagtcagtccagtggtaacccagctccacaaagagagctcaccagatggcctgttggctctccatgcccacttacactgggctagaaatccaacctggtgccctcatccccagcaaaaacatgtcaccactatcacgaacttctgtagcttaagtcattgaggcaatcccagacaccaccaatgaggatcacaatagaagaaattgtatggagaccacactactgagtccaactgaaaccaaagccaatgcaccatacccaaagaacccacaggacccacatatgatgtactccataaaattagaaaaaaacaacccttccactagatgcatagatatcaacatagagacacaggaaacatgga

SEQ ID NO: 242707 - DNA, 160 bp, Homo sapiens
tgaaagagactcagttgtcaaacccacagaaatacaaatttgatttttcccgggggaggaagaaggaagtgaagagaatttgggtaaactccatccatcctgggggttggatctgaacacttacagacataattggtaataaaaggcattaaaaactgga

SEQ ID NO: 242708 - DNA, 460 bp, Homo sapiens
gacaccagcagccaaagcactcctggttaagactcatttttacacaaatggctctcctagggccgtatgtattcaaagtaaatgcatctaaacgtattgtataatatgcccagaaaaatcatctgttcacccccatttccatttttatggggactccaatgaaggattctctttgtttagtaattaaacaggactaggatattaagagaaaggttctgacagtaggcagctttgagtcaaaagtattataattaaacagaagaaatgaaaggaaaagaaaataaagtaccatgcaaagatcgaacttgaaaattaatcggagatcagcggaatttctgaaactttccccctggttgaggtatagtcagccacacaacaaaagttcaactgatgctaattaccttctccattttctccattgtcttcctctcttttccctaactcttttaagttttctatg

SEQ ID NO: 242709 - DNA, 527 bp, Homo sapiens
taattttagcccagtgaggcccacatcagacttctaatctacagaactacagtgataatacgtttatgttgttttaagtccctgagcttgtggtaatttgttaacagcagcaaaaggaacctaatacacgaagggcaataatagtgccttcctcttgaggtggctgtgagctttacatgaattatgacatggcagcacttagaacagtagatggctctgccaggtatggtggctcatgcctgtaatctcagcactttgggaggctgaggctggtggaccacaaggtcaggagatcaaaaccatcctggcaaacacgatgaaaccccgtctctactaaaaatacaaaaaattagccaggcatggtggcaggcgcctgtagtcccagctacttgggaggctgagacaggagaatggtgtgaacatgggaggtggagcttgcagtgagttgagatcgcgccactgcactccagcctgggtgtcaaagcgagaccccatctaaaaataaataaataaataaataataaaat

SEQ ID NO: 242710 - DNA, 633 bp, Homo sapiens
tggcaggcagccctgcaccggacacacagtgacattcaacttcctgcctgccagccccagtgtgtggttcccagcctgacaaccttggcaccccagcaccccagcaggaggggtttctgcttgtggtcccctggccaccagcctcggccagctggttgtggaccagccgtgacctggggcaacccagccaacctcaccgtccaatgggctgcagccacctctctccagtgaggtctgagacccagccttaacgaggctacccccttccagggtctctctgtgttactcaggctggagtgcagtggcgtgatttctgctcactgcagccttgacctcccagcaggctcaagcaatcctcctgcctcatcctcccgagtagctgggactacaggcatgtgccaccacgcccagctaagatcttttttaaaatgcttaatccagaagtcattacaaacaaatactagatcttatttattctatctaactatatctctgtacccattaaccattctgccttccctgcctccattacccttcccaatctctggtaaacatccttctactctctgtctccaggagttcaactgtttttcatttttggctcccacaaataagtgaaaacttttgaagctt

SEQ ID NO: 242711 - DNA, 492 bp, Homo sapiens
ataccggccattgaaccccaagacagaatgccgtagctttgcccgaagcaaaataacacactaccaacatcaccgttgaatcctctgactcctgttccctgagatcactccctcaaataagctatctatctgcatccatcccttttctctggctcttctttttggggagacccatgataaaataggcagagaatgggtagctctagagtagtaaaaagaaagtaaccaatccaggtgtccatccttctcccaagcaatgcaagagtaaataactccattccaaaattcaggtgtaaactaggcatggtggtgaagacctgtaatcccaattactttggaggcttaggcaagaggattgcaggagcccaggagttcaacaccagcccagggaacacagagagatcccatctcaaaaatgtaaatttttaaatctagatacagattcttattaatctacagtaatggtttagtaatggttgtgtgaccagtttt

SEQ ID NO: 242712 - DNA, 462 bp, Homo sapiens
ccaggagtccaggccaggtgctgactcagttcaacagaagaattaataatgttttttaaaaaaggtgaaagaacaaatagaacatttaagccaattagaatatagaatgacctatgcaggaagcagtgtaggttatgattaaaagcttgaaccttggggtcagacagacacaggtttgaatcctagctctgtcacttttttgttgtggccttccaggcaggatacttaacctccctaaatcctggtttatttgtcgataaaatggggatggttttgggagtggtgagaactcagtgaggtaatgcatataaagaccttgcttttagccaccattattataatcactgtctcactgttgaaaaaggccagggattccccaaagtgacagtgccagagaaatatgctctgggtgctacaacagagagtacagacctcagaagcagagctcccggattccagacc

SEQ ID NO: 242713 - DNA, 438 bp, Homo sapiens
ccctacaaatatagggcatgttggggcttatgggactgaggaataatactcttgctcacccccaagcccctgggttaggtaccagttgagtgacacacgtggagtgtgacaaatggagaaatatcggcattcgaagaaaaaaaaaagggcaggctcaggggctcacgtctgtaaccccagcgctttgggagaccaaggcaggtgtatcactggaggtcaggagttcgacaccagtctggccaacatgatgaaattctgactccactaaaaaaaaaaaaaaaaaaaaaaattagccagggttggtggcaggcgccagtaatcccagctactcgggaggttgaggaactagaatggcttgaactctggaggtgaaggttgcagtgagctgagatcatgccactgcactccaacctgggtgacagagccagactctgtctc

SEQ ID NO: 242714 - DNA, 333 bp, Homo sapiens
aatacaagattggagggggaaaaagtcatacgcatatataaacaggcagtgggagaaaggaacccaacattattcggcatatttttaccctaatgtgttactttttcaaaaaaagctaaaaatgattgaagggaatcctgccacagaaaaagcctcctcaagctctactcttacactttcaagtgaatccttctttaagatttcccaggaagtacttctccacaatctcctcaagcaagctatatcaagtggtaaagcagccttacaaataagtgccaacaagttattattccacctcaggaacaacttagaaaataaatgcactaaagcaaa

SEQ ID NO: 242715 - DNA, 513 bp, Homo sapiens
agaagagcgtgtatttatcaagcactcgacacaatgtcagatgcggagtcagcgctccataaatgttggctgtcatttttgttctaacgtaagagaaagctggatgatcccatctgggtttcagccccgttttccctcttcactcctccggtgggtcagtgggagctctgccgaccgcctggctgcggccactcactgctgggactgcgcagcctgcccgctcccagcagctggcggagccgcaggacccccgcgccgcccgggccgccgccgttagggttggctcaagcctctcggcccagtccgccagttttacagcccgaactcaaagagggcttttaacttttcattcagcagcagcgtagctccgacttttaataacacacctcgtgcacgacaaaaatttgctcctggcaatcatggtttcgaccacaaaaccacagcggggaggcgttcctgattaactctttcagcgctccaggcagtctggagccggcgctcctggagatcaga

SEQ ID NO: 242716 - DNA, 608 bp, Homo sapiens
tcaggaatcttcaatccccaaatttatcatcctcttatgcattttttgacaagtattgttaaaaaccttttgtgctttctcaaaacccaacaacatacttttcttctgaatgcatcagcatatagatcctgaataaaaatacatttttattcactttctcctgctgattatccccttagcacagagtgcttttgcgataacatcataggatttagaattacaatacctgagttttggtcataactcttgtcattttttaacttttatcttgggaacactaagaacacctgttagcatttcccttagctggtgaataccaaaatgttggcctacctcatgagaaccaaatgatatttttaaaatatgtaatgtaacatacaaatatatattgtttatgtctcctaagactgtttctccaataaaccatcagcctgtactttttgttttcaacaataccaaaactagaaggttagaaacaatgactcatttgaaattattagcaaactttaaaaattctgactatggatatcctgtctccctttgttatgcagctgccaaccataaacctccaccactataaatgttgcatggaatatacgggatcacct

SEQ ID NO: 242717 - DNA, 400 bp, Homo sapiens
agactcataggggcttggccctgccctgagagagggtcatttatgaccattaaggccagaaggagagctttgtagtcctcactgccccgacttctctgtgaggcacatgctggcaagactctgcacccgccccttggcacgggtctggactctatccaggaagggacagagcatacatggggattatatgcatatttgacaagtgctatgctggaactctcacccaaatctaagaaaagcagcttacaaagaagacaaacacaggcaagcttgagtcatgaaaggagagcagcatgcgggatgggacttcctggattgagaccatggtttggctctgagcttcctgggagtcaaagcaaaatgaccaacaataaataattatgccattatcaaactaaca

SEQ ID NO: 242718 - DNA, 323 bp, Homo sapiens
tgtacctctctagtagtgctctctgattgaaggtcacagtggataaaaatattaatgaaggttcacaaacgaaacaaagcaaaaacagaaacaaaaccaaaaaaccagtggcttctatgcagtgaccatgtcccctgccccaagccctgtcttggctttgacagctgctggcccaggacatagaggaagaaatcaaggctcgtaactttatttttctccactttaaccaacccttgaatgctgaattgcataaaagacctgcttttttatgtggccaaaaaagtagttgtattacataaataagtacatcaccaactaagttt

SEQ ID NO: 242719 - DNA, 319 bp, Homo sapiens
gctggaagtggaagagggcagagcctcttgctggtgctctggcagggcccccgctcggtcaaaccagtgctctttctcttttggacctatgtatgttggtcttggtctcctagagctgcctccaccagaggcttccagcaaggattttttttccttctccttgctctgctcatgatcataaaagtcacacaccctctcctctaccctcgaacactggaaaagctggaaaagcacctatctctacgaggcaacctcagacactttaccaccatcttaactgtatggagccaataaaagaaaatgctgttgctatgccccc

SEQ ID NO: 242720 - DNA, 372 bp, Homo sapiens
tcctgggtttattgtttgtcatttgctagttttattttgcattgttttttgcccacatgcaggttttgcacatatttctgtcatggatttcttagtctgcatatcctaagtaggtgtcactattcattgagatatgaatagctctagttttgtatctcagtatgtttggatggtctgctaattttggtggatttttatctcttctttaatctacttccttgaaggaatgatttaaaactctaaaatcagttacactattttgttgaaaatatgaaatgctgtagagttgtcttctgatgccatgttactcatagctatcgatgagcgagtcacagactagattagtggaaggaaggaaggaaacaaatgaaa

SEQ ID NO: 242721 - DNA, 3677 bp, Homo sapiens
  misc_feature (45)..(46): n is a, c, g, or t
  misc_feature (200)..(201): n is a, c, g, or t
gaaggtaaatgacctactagtgcggcgaaccctgcgaggcgtcanncgtcgggtgcgcgattacttcgtataatatatcagtaggatagcaatcgcgagcatcatcatcagagcgcgacggttacgcgcgagctgcgggatgtccgcgcgcacgtacgccgcgcgcgcgcgaggtactgagaagaggcgctctcgctccnncaccgcggacttcaatgcccgtccccagctcgccacgtttttcgttggaatatacgttgcacatttatggcgattctgagtgtgagggcagacttctgccaggctcagcacagcattttcgctgacaagtgagcttggaggttctatgtgccataattaacattgccttgaagactcctggacaccgagactggcctcagaaatagttggctttttttttttttaattgcaagcatatttcttttaatgactccagtaaaattaagcatcaagtaaacaagtggaaagtgacctacacttttaacttgtctcactagtgcctaaatgtagtaaaggctgcttaagttttgtatgtagttggattttttggagtccgaaggtatccatctgcagaaattgaggcccaaattgaatttggattcaagtggattctaaatactttgcttatcttgaagagagaagcttcataaggaataaacaagttgaatagagaaaacactgattgataataggcattttagtggtctttttaatgttttctgctgtgaaacatttcaagatttattgatttttttttttcactttccccatcacactcacacgcacgctcacactttttatttgccataatgaaccgtccagcccctgtggagatctcctatgagaacatgcgttttctgataactcacaaccctaccaatgctactctcaacaagttcacagaggaacttaagaagtatggagtgacgactttggttcgagtttgtgatgctacatatgataaagctccagttgaaaaagaaggaatccacgttctagattggccatttgatgatggagctccaccccctaatcagatagtagatgattggttaaacctgttaaaaaccaaatttcgtgaagagccaggttgctgtgttgcagtgcattgtgttgcaggattgggaagggcacctgtgctggttgcacttgctttgattgaatgtggaatgaagtacgaagatgcagttcagtttataagacaaaaaagaaggggagcgttcaattccaaacagctgctttatttggagaaataccgacctaagatgcgattacgcttcagagataccaatgggcattgctgtgttcagtagaaggaaatgtaaacgaaggctgacttgattgtgccatttagagggaactcttggtacctggaaatgtgaatctggaatattacctgtgtcatcaaagtagtgatggattcagtactcctcaaccactctcctaatgattggaacaaaagcaaacaaaaaagaaatctctctataaaatgaataaaatgtttaagaaaagagaaagagaaaaggaattaattcagtgaaggatgattttgctcctagttttggagtttgaatttctgccaggattgaattattttgaaatctcctgtctttttaaactttttcaaaataggtctctaaggaaaaccagcagaacattagcctgtgcaaaaccatctgtttggggagcacactcttccattatgcttggcacatagatctccctgtggtgggattttttttttccctttttttgtgggggagggttggtggtatatttttcccctcttttttccttcctctcctacatctcccttttcccccgatccaagttgtagatggaatagaagcccttgttgctgtagatgtgcgtgcagtctggcagccttaagcccacctgggcacttttagataaaaaaaaaaaaaaacaaaaaacaacaccaaaaaaacagcagtgatatatatattccaggtggtttttagtctttactgatgaaagggtgttcatgttagtttcttcaaaaccctatctaatactaggcaaagtagccaagagccttttgttttgtttttattttgataaattagtggagaaatggcattttaagaggagtctcttctcaacttacctgagagtcgaattcttctcttccctaaccaatgaagctaagtggttatcccagaaacttgtcttctaaaagggaggactccaggccatcaataaagatgtccaggcagtgagcgtactttttacaccctgtagaattgtgggctgtagcgttactctgattttctgtctagtatcagagaatgctggtagcttaaaatttttattttaggacttgtactctgaattttcaggaaccgtcaaaggagcagcagcaaattcacatattttcgacttgagaaatgcttgtggtatgtgttttccaaactgccccctatatgtaaagttcagtttaaccactgattgccttgttattactaggttttttgagattaaaaaaaaaaaatccctggtttaaaaccaacaatgatgcctagtgagtatgtgtccacaggccataacagggtagaagagagacatcgtgcaacccaatgagtagtgaagggactgtgttgcttgtgaagcggtgtagtagcatttttgcagattcttggctgggtttagtgtactgatctagaaaagctgtttttctgctcctttgtggaaggcagttatgatcaggctgcatggacaaagcaggtagaggggcaccatcaggggctcttgcactattttcacctctaaatattacgtactcagtagtgccctgcttctagggctctgaatacgggcttaaagtcatcttgtcctgctggaatttgctgtgcagagccataagcctcccattttgttagcgtcagctaggccaataggaacagaccgggaccttgtctcacactgatgatacctcacatgttgaccggctatgtgaactgcctatttcctatgctggagttttgatttttaactaaacgcaaatctgtagattctctcctctcccatcccagaaaacaaaacaaaataatgcttttcgaaattgtttctaggactttaaaacataatggtatatccaaaattctttatttcagaatgcaacaatagattccattaatatagactcaagatcaaaacagcatacctgctaagctaagatagatggtgttgattccactgggttttgatcaatacaataacaaacctttttcctttgacatactctgaattttgttgtttggggggagggggtgtgtgtgtgtgtgtgtgtgtgtgtgtgtattgtgtgtgtgtgtgtgtgcacgcgcagtgtccatcagtatcagtgcctgcctgagttaggaaaattacattcctggttctgtattgaggagaaggatgtataaagcaacatgaaacattagccctccttttattttaaagactaatgttaattgttcttaaaactggattttttttccttaaagcaatttttttcttttcgatttaatgaagtattgctagctgaagccagtttgacatagagagatgtcagattgatttgaaaggtgtgcagcctgatttaaaaccaaaccctgaacccttttaaagaacaataaaacatattttacacgctc

SEQ ID NO: 242722 - DNA, 1459 bp, Homo sapiens
  misc_feature (45)..(46): n is a, c, g, or t
  misc_feature (200)..(201): n is a, c, g, or t
gaaggtaaatgacctactagtgcggcgaaccctgcgaggcgtcanncgtcgggtgcgcgattacttcgtataatatatcagtaggatagcaatcgcgagcatcatcatcagagcgcgacggttacgcgcgagctgcgggatgtccgcgcgcacgtacgccgcgcgcgcgcgaggtactgagaagaggcgctctcgctccnncaccgcggacttcaatgcccgtccccagctcgccacgtttttcgttggaatatacgttgcacatttatggcgattctgagtgtgagggcagacttctgccaggctcagcacagcattttcgctgacaagtgagcttggaggttctatgtgccataattaacattgccttgaagactcctggacaccgagactggcctcagaaatagttggctttttttttttttaattgcaagcatatttcttttaatgactccagtaaaattaagcatcaagtaaacaagtggaaagtgacctacacttttaacttgtctcactagtgcctaaatgtagtaaaggctgcttaagttttgtatgtagttggattttttggagtccgaaggtatccatctgcagaaattgaggcccaaattgaatttggattcaagtggattctaaatactttgcttatcttgaagagagaagcttcataaggaataaacaagttgaatagagaaaacaatttcaagatttattgatttttttttttcactttccccatcacactcacacgcacgctcacactttttatttgccataatgaaccgtccagcccctgtggagatctcctatgagaacatgcgttttctgataactcacaaccctaccaatgctactctcaacaagttcacagaggaacttaagaagtatggagtgacgactttggttcgagtttgtgatgctacatatgataaagctccagttgaaaaagaaggaatccacgttctagattggccatttgatgatggagctccaccccctaatcagatagtagatgattggttaaacctgttaaaaaccaaatttcgtgaagagccaggttgctgtgttgcagtgcattgtgttgcaggattgggaagggcacctgtgctggttgcacttgctttgattgaatgtgtgtgtgtgcacgcgcagtgtccatcagtatcagtgcctgcctgagttaggaaaattacattcctggttctgtattgaggagaaggatgtataaagcaacatgaaacattagccctccttttattttaaagactaatgttaattgttcttaaaactggattttttttccttaaagcaatttttttcttttcgatttaatgaagtattgctagctgaagccagtttgacatagagagatgtcagattgatttgaaaggtgtgcagcctgatttaaaaccaaaccctgaacccttttaaagaacaataaaacatattttacacgctc

SEQ ID NO: 242723 - DNA, 857 bp, Homo sapiens
atgcgaaaggaaagaaggccaagggaaagaaggtggctccggccccagctgtcgtgaagaagcaggaggctaagaaagtggtgaatcccctgtttgagaaaaggcctaagaattttggcattggacaggacatccagcccaaaagagacctcacccgctttgtgaaatggccccgctatatcaggttgcagcggcagagagccatcctctataagcggctgaaagtgcctcctgcgattaaccagttcacccaggccctggaccgccaaacagctactcagctgcttaagctggcccacaagtacagaccagagacaaagcaagagaagaagcagagactgttggcccgggccgagaagaaggctgctggcaaaggggacgtcccaacgaagagaccacctgtccttcgagcaggagttaacaccgtcaccaccttggtggagaacaagaaagctcagctggtggtgattgcacacgacgtggatcccatcgagctggttgtcttcttgcctgccctgtgtcgtaaaatgggggtcccttactgcattatcaagggaaaggcaagactgggacgtctagtccacaggaagacctgcaccactgtcgccttcacacaggtgaactcggaagacaaaggcgctttggctaagctggtggaagctatcaggaccaattacaatgacagatacgatgagatccgccgtcactggggtggcaatgtcctgggtcctaagtctgtggctcgtatcgccaagctcgaaaaggcaaggctaaagaacttgccactaaactgggttaatgtacactgttgagttttctgtacataaaataattaaaataatataaattttccttca

SEQ ID NO: 242724 - DNA, 797 bp, Homo sapiens
atgcgaaaggaaagaaggccaagggaaagaaggtggctccggccccagctgtcgtgaagaagcaggaggctaagaaagtggtgaatcccctgtttgagaaaaggcctaagaattttggcattggacaggacatccagcccaaaagagacctcacccgctttgtgaaatggccccgctatatcaggttgcagcggcagagagccatcctctataagcggctgaaagtgcctcctgcgattaaccagttcacccaggccctggaccgccaaacagctactcagctgcttaagctggcccacaagtacagaccagagacaaagcaagagaagaagcagagactgttggcccgggccgagaagaaggctgctggcaaaggggacgtcccaacgaagagaccacctgtccttcgagcaggagttaacaccgtcaccaccttggtggagaacaagaaagctcagctggtggtgattgcacacgacgtggatcccatcgagctggttgtcttcttgcctgccctgttccacaggaagacctgcaccactgtcgccttcacacaggtgaactcggaagacaaaggcgctttggctaagctggtggaagctatcaggaccaattacaatgacagatacgatgagatccgccgtcactggggtggcaatgtcctgggtcctaagtctgtggctcgtatcgccaagctcgaaaaggcaaggctaaagaacttgccactaaactgggttaatgtacactgttgagttttctgtacataaaataattaaaataatataaattttccttca

SEQ ID NO: 242725 - DNA, 692 bp, Homo sapiens
atgcgaaaggaaagaaggccaagggaaagaaggtggctccggccccagctgtcgtgaagaagcaggaggctaagaaagtggtgaatcccctgtttgagaaaaggcctaagaattttggcattggacaggacatccagcccaaaagagacctcacccgctttgtgaaatggccccgctatatcaggttgcagcggcagagagccatcctctataagcggctgaaagtgcctcctgcgattaaccagttcacccaggccctggaccgccaaacagctactcagctgcttaagctggcccacaagtacagaccagagacaaagcaagagaagaagcagagactgttggcccgggccgagaagaaggctgctggcaaaggggacgtcccaacgaagagaccacctgtccttcgagcagtccacaggaagacctgcaccactgtcgccttcacacaggtgaactcggaagacaaaggcgctttggctaagctggtggaagctatcaggaccaattacaatgacagatacgatgagatccgccgtcactggggtggcaatgtcctgggtcctaagtctgtggctcgtatcgccaagctcgaaaaggcaaggctaaagaacttgccactaaactgggttaatgtacactgttgagttttctgtacataaaataattaaaataatataaattttccttca

SEQ ID NO: 242726 - DNA, 770 bp, Homo sapiens
gtgtcaatccctgagcgctacgtggagctagatcccgaagagccacccagccttgaggagctgcaggcgcggtaccgcaaagccgagaagatccgcaacatcctcgcccggtcaagcatgtgcaacctacagccgacctcaggccaggaccagaacagtgtggctgacctggacttgcagctgcaggagcaggagcgcatcatcaacatctcctacgccctggcctccgaggcctcccagcgtagcaagcaggtggcagcccaggcagtgactgacccgtgacccagcatgcaaagaagcctggagccaggggcccagtggaaccagcttcctccaaggagatgacctttctgcccccaaggaaaccccttccagctgagcagggaatccggccggaggaaggagcagcttaccgactgcgggtgttcaccacaggccaggccctaatatgcacccactagtttagctcagactcctctctacatatgaatggcaaaggcacttttgatatacactgtaaaatacactgtattttagaatcggaatctattttctaatgttcccctcaagggctgagtggcaggaaggttgaggatgcaggactttgcagctgcacgtacagattcaggtacttctgggtgacaggtgttgtgggggcaggaagggcggggcaagccgaggctagtccaacttccaatgacctcaggagaaagtgagatttgaagaggtgttcccagtagactccagcaagaggctggttggcgtgctgt

SEQ ID NO: 242727 - DNA, 641 bp, Homo sapiens
gcggccgcattgccagagccccctgctctgctgctctgcctgtccgcctatctgccattccatcatgtgtgtgcagacgtgcctgctccctggatgccagcctctcactgtctcctgtgctttttgccagcccaggcagtgactgacccgtgacccagcatgcaaagaagcctggagccaggggcccagtggaaccagcttcctccaaggagatgacctttctgcccccaaggaaaccccttccagctgagcagggaatccggccggaggaaggagcagcttaccgactgcgggtgttcaccacaggccaggccctaatatgcacccactagtttagctcagactcctctctacatatgaatggcaaaggcacttttgatatacactgtaaaatacactgtattttagaatcggaatctattttctaatgttcccctcaagggctgagtggcaggaaggttgaggatgcaggactttgcagctgcacgtacagattcaggtacttctgggtgacaggtgttgtgggggcaggaagggcggggcaagccgaggctagtccaacttccaatgacctcaggagaaagtgagatttgaagaggtgttcccagtagactccagcaagaggctggttggcgtgctgt

SEQ ID NO: 242728 - DNA, 527 bp, Homo sapiens
ggtccctgcagggaggtgctcctggttttctacctcggtgaaggatctttgacacaggcaacctccatccaggcacccagtggaaacggacagctgaccatatagcccagtgccttttctgacacacttcttccttggggaagttgaggttgggggcgggctgtgcacagggctccccagcctccctgtgtgtctgcttccttccctgccctccgcccggtggccccatggcccacagcccacagggaagcaagttggtgccacccctgcctcccctccgcagccggcgggcctgtaaatgcctcccttgggcccccatgaggccagtgagccagaagcccctctgacccagaggtcactgtgaccagcacatcctggagaggaggcctcgcccttgcacctttcatctgcaagagttacttttacatttattttaaatgttgatttaagtatatacttcatctacagttatccatataaatagattcattacagggcctggctctgaataaacacagtaagttgga

SEQ ID NO: 242729 - DNA, 491 bp, Homo sapiens
agggtacagagaaacggatgtactgtttttcagtattttgggagggtggtttgagcagcatttattgacaatttcattagtggggatgtttctattgaaaacagagttaggaagtcataaaatgttcttgcaatataaggtaataataccactggcgtttatcttactgttttcatgttctaagtgcatgcatctgagtaaaaggatctgggctgcagtccagtctgagagatgccagcaaaggcttcctaggccaattcagtccagtaaatccctcttcgatcttctcttccacacagacagcagtgatgagcatgcccatgaactcacatgattattttggggaaaatgaaagagttgtattctttttgaggtagtaattccactttcaggggcaaatacattttgattattttatcacccttcagtgagttgtttttgttctttaatcacggatgtatgtttgaagtaagaagtaaagcataaagtat

SEQ ID NO: 242730 - DNA, 322 bp, Homo sapiens
tagatttaatcctcctttttctccttttaccctagcacttacttgttctctgattacaactcagtgtctcggagtattaattctttctttaggaattggccttcctactgtgttgtgagctcctggggacaggacctcagctcagtcatcttttatctccctctgcacatccagcatagtatgttacattgggtaggcctccatacatttttgttaaaaataattgaggtgaatagattagtaattaagcagaataattggaatatatatatgaactttggtccctagaaatatcaaattttttcctggtgttacttgtgtt

SEQ ID NO: 242731 - DNA, 374 bp, Homo sapiens
cacagtagcacaatcttggctcactgcaacctccgcctcctgggttcaagtgattctcacacctcagcctccctagtgggactagggaggactccctatagtcctagctgggactataggtgcatgccaccatgcctggctaatttttgtacttttagtagaggcagggtttcaccatgttggccaggctggtctcaaactcctgacctcaagtgatccgcctgcctcggccccctaaagtattgggattacaggggtaagccaccgcgcgcccagctcgaatgacttgcatttagtgttctaattagctgtgtcaaacacttctaaaatttttgaaagtgcttctcctcctatttagcttatttcccttgtgg

SEQ ID NO: 242732 - DNA, 577 bp, Homo sapiens
gagtctcgctgttcctcaggctggagcgcagtggcacaatctcggctcactgcaacctccgcctcctggtttcaaatgtttctcctgcctcagcctcctgagtagctgggattacaggtgtgtgccaccatgcctggctaattcttttgtatttttagtagagatgaggtttctccatgttggtcaggcttgtctcgaactcctgacctcaggtgatccccacaccttggcctctcaaaatgctgggattacaggtgtgagccatgcctggcctaaatttttttttaaagaaaatatgctattttgaagaaaatatgtatgatgacatgttactatatgatgtatatggtgatatgttactatgtgaggtaatatgtatagtaatatgttactatgtgaggtattgtgtgtggtgatatgttactatgtgaagtagtatgttactatgatgtgaggtagtacattaattagctagatttagtcattccacagtgaatatatacttcaaagcatcatattgtacaggataaatctctacaagttaaatctatttaaatctaaaaagataaatctattt

SEQ ID NO: 242733 - DNA, 498 bp, Homo sapiens
caaatgaccacatacaatgatggtcctgtaagattataataccgtattttactgtgcttttttatgtttagatatgtttagataaacaaatacttacaatatgttacaattgcctacagtgttcagtacagtaatatgctgtacaggtttgtagactaggagcaataggctatacactaggtgtgtggtaggttatacaatggaggtttgtataagcacacctacgatgtttgcacaacaatgagatcacctcatgatgcatttctcagaatgtatgtccatagttaagtgacacataactctatatgtatgtgtgtatgttatgtatcatttatgtattttttaatttgtatgtacattattttgctgccctcctccaacccatagcaagtttctccagactattacagttgacccttgaacaacatgggtttgaactgcacaggtccacttacatgaagattattttcaaataaacatactggaaaattttttgga

SEQ ID NO: 242734 - DNA, 615 bp, Homo sapiens
caggtggagggaaggggagagttgctgcacttggaaatgcttgctagaagggatcgcctcttttccaggtagaggctgtaagggaagctttacctagaattaaggttggaacagacactgcttccaaatagttccttgctcactattttccttattgtcccaagatataatgtgcatttccatgtgtgtgaaaggttatgacatttcatatacaacaagcctcaattctggagatgcaggaaatttcaataattctcaggcagcagctgccattcggtcaccagcacaggctctgattgtgctgtccagacagtaagtactagccacatgtgcctatttaaattcaaatttaaattagttaagcttaaatacaattaaaaacgcagttccttggtcctactggccacacattaagtgttcaatggctactgtctaggacagtggaaatgtagaacatttccatcatcacagaacgttctcttgcatacctagaagacctgaggtttatcacaagacatagacttggaccaggcgcagtggctcatgcctgtaattccagcattttgggaggccgagataggtcccctgagcccaggagtctgataccagcctggg

SEQ ID NO: 242735 - DNA, 325 bp, Homo sapiens
gagtagtggtttctgttccattgtggtttttttgttcatttttctgcatattccattctgtttttattatagttttaaaatgtagtttgaaattatgaaatatgatgtccctctactttgttctttttcctcaagattgctttggctattcaaagtttattgtagtttcatgtaaattttagaattgtattttttattactgtgacaaaaatgtcactggaattttgatatggagtatattgaatttgtagatcactttggataacatggcactttaacaaaatttattttttgaatccatataaataaaatatttttaaattta

SEQ ID NO: 242736 - DNA, 284 bp, Homo sapiens
gttctttcagtggcccttgttctttcccaattgttagttatcacaggacctttggtcttgtttttatttttaggaaccagttgttttatctggaacaccgtagagttgttttttgttttcagctattttacttagtaagactctctgaaaatgttcagtcgtacattggagattttctgaagtggcaattttccatttctgattttttcccctaagtttcttgtttgaggtctgggcccatttattcaaacaaacaaacaaaaataggacaagattccctttat

SEQ ID NO: 242737 - DNA, 482 bp, Homo sapiens
cagacctcagtatttgtgccagaacctcaatggtctcctctgttttcttccacatttggtctcagattgatagtggtcacaataaggaaacaacctgtatttattttagaaggtaaagtttaaaaaaattgatatattaactaaatcaagtaacttgacatcagataatgtgttttctcattatttctggttttttttgtactgctcatcttctattcattattccttctctagataaaatctgtcagtgataagagtttcagattgtacatttctagataatttatttcacttccatttattttatgcccaaaaggttatgagataatattaatttatggtgagtagcttgaactttgactagttccctgaaccttgttgaaggcatatgaacacaaagtacacccgtttagcccattatttgggggaaaaaaatgtgtgcccaagtgtttggatgttttattgtgtatttccaagtaatc

SEQ ID NO: 242738 - DNA, 261 bp, Homo sapiens
tttattttttgtagagacagggtctctctatgttgcccaggctgatcttgaactcctggcctcaagtgatcctcctgccttggcctcccaaagcactgagattataggtgtgagccaccatgcttggcctggtttatgtcttaaggggaccattctgcctgctgtaggagggaagggtggacattgagggacctggccaggcatggtggcagtgtggcctagggcagcagcaggggcagagagcaagacgggtcaggcctg

SEQ ID NO: 242739 - DNA, 618 bp, Homo sapiens
tatctagaggcgaggcggcagatcttctgcaggggcacgatgtcgccatccatggaaaaggccccatcggtggccaccaggaacagccgatgcttctgggcctcctgaagcttggtttctaggtaggccacgtccaggtggcaatagtggtacttgtgggccttgcacaggcagatgccgtggatgatggaggcacagttcagctcgtccgacaggactgcgtcctcgggtctcagcaggacctcaaagaggccggcgttggcgtcacaacagctgggatagaggatggcatcctcccgctggtggaagcgggctatttttgcttctagattcttgtggatgctttgggttccacggatgaagcggaccgagctaaggccagctccaaagagcctgcagacctgcctgaatcacctcagggtggctgctcaggcccaggtagttgttggcacgttaagttgaggattcctccggagacgccgtccacgtggatgtgcggcccctgacgggacgtgatgacccgctcactcttccaggtgccagctccgcggatcccttccagctccccctccagaatgccgcgcagctgggccagtactgactgcgcgctgcggccgc

SEQ ID NO: 242740 - DNA, 285 bp, Homo sapiens
gctgggtcctgccaagcagaagctcccaggctagcaggggagacagctgggcagcgagtgtgggagagaggaatgcagagggctgcagctgtgggcaaaattttagaccccaaaggccacacagcaagtccacactaaatatgggctatttgaagttgcttagggcatcagtcatagatgcacaaaatgtcagagttggcagcgggaatgttagaaatcatcagttctaacaacttatttaaaaatatttaattatagaattgttagaaaatactgccaagcata

SEQ ID NO: 242741 - DNA, 815 bp, Homo sapiens
ctcaaagtcatgtatgaattcagtgcaatctcaatcaaaatctcaccatatttttgtagtggaaattgacaagctgatgctaccatttacaaataaaaatgcaaggggccaagaatagccaaaataatcttaaggaagaagaaaatggaagttttacctcaccagataataagatttactctaaagctacgataattaaaacagcgtgttcttagtgtgaagatagacaaatagaagaatggaacagaatagagtctaaagaagaactcaagggccaaaagtagccaagaagaacagatctggaagacattatccctccagatatcaagatctcttataaagatatgtggtatcgacgcaaggaaaggcaagctgaccaaggcaagctgaccagtggaactaaacaaagtccagaaacaggttcacacatatagtcatccggtgtgtatctttgtgtgtgtgtatttcacaaaggcttaaagtaatgtgtcttcaataaatggtgctacatccaaaagagcataactatatgtttccattttatatgaagttcaaaaatagacaacagaatagtgattacctctggagcagctgggggctgcctctggtagggtgggggtgttgcctgggaagaagcatgagagaatcttcaggggtcctggaaatattccatatcttgatttggttggtggtacactgttgtgtataatatacacgtatttgtacatgtgtgtataaaatgtcattgagctccacatttaagattttttggactttattatatgtatgctaacctcaataaaactaaaaaattc

SEQ ID NO: 242742 - DNA, 522 bp, Homo sapiens
agaataacttaggttatggatttggctgtcatttactagttgtgtgatatttgataagttaaataacttctttgagtctcttatttcctgacctttaaaatgggaatatttcaaatggtggtgggatggaagaggtatcatatcacatggtgcctagtgcggtaagcactaagtgtcagctctcttcctccctgactgcaaggcagtttatttaaataaaatgattcttggccgggagcagtggctcacacctgtaatcccagcactttgggaggctgagatgggcggattacctgggatcaggagatcgagaccagcctgaccaacatggtgaaaccccatctctactaaaaatacaaaaattagctgggtgtggtggtgggcgcctgtaatcctagctacttgggaggctgagacaggagaatcgcttgaacccaggaggcggaggttgcagtgagctgagattgcgccattgcactccggcctgggtgacagagcaagactccatctcaaaaaaaaaaa

SEQ ID NO: 242743 - DNA, 496 bp, Homo sapiens
ttggtaaacacaatctgccacattatttattgccatttttatttttccttttgtgaattgcccagccatggctgtgtccttccatttttttctgttgatttataaaactatagtacatacctcaaatcttttgcacggataaaaattcttttttccaagttttaatttagaattcttctacctcaagtagaagaatataataagagtgtgtttcatttactttatatgcttccttttaaaaatctgttaggatgaaacaattacagaatcctatgtgtctaaaaaattaatatgatattatatatataaagccatttctcaaatattttaaaattaactccattacattacaaattcaaattctatcagaaagtaattatagcaaatggtacacaaaagctaaaaatcactgtcttcattttaaccctctactacaatgggcccttttctccccttataaactacatataatcaatacctttggttaataattaaa

SEQ ID NO: 242744 - DNA, 437 bp, Homo sapiens
ccatagtttaatctagtcactttctgaagcttcctgctagcatgaaattgatttttttacctagaaaattaacatgaatatttattgacagaagtgaagactatatttgcacagtcagctaagagtgccagtaaatttaataaaaatatttgggttttgttttacccaaaagtatacaaataggtgatagaaggttttgttttcttttgttatggagttattgactttgtttgttttgtttttcaagctctagcagtacctttataatatgtcatatatgcccttaaaccatctcctcttcctcttcctccttgtttttttattggatagtgttttttcagtagtgcatggaaagactgttctttgcttcttttaatgtcttcatttgtctttaactaggtaaacaggatttactgctactgtagcctacccagaaa

SEQ ID NO: 242745 - DNA, 684 bp, Homo sapiens
cgctgcagcggggcggtgacgtgtaggccggcgccagctccactctgtccctcctcgccgggtctgtgcgtctttgcgtctgtctgtctgactgatggtcctcacacgcggttccctgtgactgggcgcgaccccggcaagcgcggcttggagggcggacggggcgcggcgatacagctgcccgctcgcatctttggccctgcgctcagctcctcacccggcgtgggaagttaaagtaaaaccgaaagggaagaaggcgcggtggcaggagctgacagagtgatgggaaacgcgtgagccaggccgagagtttcaggtttcttgctgtatggatcactgattgaataatagatggctttacctcgtctcacaggagccttgcgttccttttcaaatgtcaccaagcaagataattataatgaagaagtggctgacttaaagataaagcgatctaaacttcatgaacaagttttagatttgggcctgacatggaagaagataataaaatttttgaatgaaaaactggagaagagtaaaatgcaaagtataaatgaagacttaaaagatatattacatgctgcaaagcagatagttggaactgataatgggagagaagcaattgaaagtggggctgcatttctcttcatgacatttcacttgaaggactctgttggtcacaaggaa

SEQ ID NO: 242746 - DNA, 3490 bp, Homo sapiens
  misc_feature (1683)..(1683): n is a, c, g, or t
  misc_feature (2837)..(2837): n is a, c, g, or t
cgctgcagcggggcggtgacgtgtaggccggcgccagctccactctgtccctcctcgccgggtctgtgcgtctttgcgtctgtctgtctgactgatggtcctcacacgcggttccctgtgactgggcgcgaccccggcaagcgcggcttggagggcggacggggcgcggcgatacagctgcccgctcgcatctttggccctgcgctcagctcctcacccggcgtgggaagttaaagtaaaaccgaaagggaagaaggcgcggtggcaggagctgacagagtgatgggaaacgcgtgagccaggccgagagtttcaggtttcttgctgtatggatcactgattgaataatagatggctttacctcgtctcacaggagccttgcgttccttttcaaatgtcaccaagcaagataattataatgaagaagtggctgacttaaagataaagcgatctaaacttcatgaacaagttttagatttgggcctgacatggaagaagataataaaatttttgaatgaaaaactggagaagagtaaaatgcaaagtataaatgaagacttaaaagatatattacatgctgcaaagcagatagaagtgaattgtccattccagaagaggaggctggatggaaaagaggaggatgagaagatgagcagagcttctgacagattcagaggactaagatgacaaaaatgactaaaatggacaaaagaagaaatagaaaatctgaatatttgactattaaaggaatttaatctgtaattaaaaaccttaagtacaaagaaatctatatgctatgatggctttaatggagaatgtcataatgtcatttaaaaaggtatgagagtactattgtagattaaaagaggttaaaggcatataataatcaaaatgtaatgtatgatccttgattgactcttgaatcagaaaaaaattacgtatttttggggccgttggagaaatctgaatatgggctggacatcattaggtaatattagatctcaggtgtgataatgttgtggctatgtaagaggatatcctaaatctcaggagaagcatactgcagtatatatagtggtatctcatgaagattaaaatgtactgtcaaatgtgtcagcaaaagaaatacacatgatgtgtgtgtgtgatcaagtgtttataatgagtggattaataaatatgagaagatagggtgatttgttgtaaagtaataaaggtttaaaaattacatgattcagtagagaaaaagcattttatgaatatctaacattacttatgataaaaaatctcagcaaactaggaatagaaggggattttgttaatctgataagctgtagctataaaaaacttggagaaaacatacttaatgctacaaagttagaagcttccctgaggtacggaattagacacaaatgcctgttaccacttctgtttctcactgtattaaaaatccttgctaacataatatggcaagaaaaagtaagggcataaagactggaaaaaaaaacttttccatttttcacatgactgtacctgtagaaaatgaatttaacaaggttaatataaaaatcaattttatttctacttactagaagcacattaaaaattacacttatctttatgtaacgtaatacattttaccttaaattttaaaattttattttacgtttacaaaagcatcanaaacatcaaatacgtaggagtaaatttaacaaaaaataagcaagacttcatggaaaactaaaatattgagagaatttaaagaagatctaaataaacagagggatataccaagaattggaagactcactattataatgatatattttttacccaaattgatctgtagattcagtgctatcccaggcacagtcttatgtttgagggtgtgtgtgtgtgtgtgtgtgtatgtgtgcatgtgtgtgtgtggaaattgacaagggtaatatgaaagttatatggaaattcaaaggcaaagagcagcctggttaactttgaaaaataaaaagggagaacttactctagtagatcttaaaacttattataaagataagtatacagtgtggtgttggtccaagaataggcaaatggactagtatgacagaatatagcccagaaacaaacctacggatagaaatatacttgatttataatgaaggccaaacaatagtgagacaaggctattttttcagtatatggtgctgggtcaactgcatatacagatgaaaaaaagtacctattttacaaataattttaaacagcctacagaattaagcatgatacacaaaacaatacatcttctaaaagatgtaaaagagtgtcttcaggatctttgtatgtgcgaaaatttatcaaacagagaacaaaaagtacaaagggaatgattaagttggactgtagtaaaattaataccttctatttattaagagtaaaaaggcaaaacatggagtgggagaatatagcttcaagatatataaccaaaaagagagcttttatccaggttaaatacgagctcctacaaatcaataaggaaaggacagataatcctatatgaacatgagtaagagctttgaacaaggacttcacaagagatagttgaccagtaaacatgaaaagggcttcagcttcattggtagtcaaggatatgccactgcatgcccattagaatggttaaaatgtaaaagactgacatacctattgttaggatcaagaatgtgaactagaatttttgtctactgctgctagagtttacaattggtacaaccactttgagtaactgtttgacagtgtctactattacctactgtggttggacaagtgaaattttaaatcttagnacataaatatccaataaaaatgcttgtacatacatgtatatcaaaaataggtgcattcattgcaacattatttgtgatagccttaatgtagaaacaacccagttcattgttaaaaagcttaagttgtagtatgtagactgccttatagcagtaacggattacagctatgtataacattgtaagtgaatcttataatgttgacaaaagaagccatacaacacatattatgattccattaatatgaaactgaaaactaggcatgaccagtctctggttttagaagtcaggatagtggctgcttttgaggaaggaggtagtgactaggagtgaatatgagggaggtttctggggagctgataatgttctgattcttgaagtagttaaccagattacacaggtgtgttcgttttttgataattctttgaactgtatgtgtactgtatattttcttgttatattcaataaaaagaattactatgatttttatattacatagattaaataagaagtatttcagattgataagtaacacatgcttgtgtatttatttagcttaaggtttggctatcatggtgagaactcctatgtaccctgctcaggtcctggtaaacagtatcataagtataataaattggtgtttttcattctcatgc

SEQ ID NO: 242747 - DNA, 504 bp, Homo sapiens
agagttcaaagagttttacttcccacaaagtggcagacagggtaatgtggaacaaccctctacagagaatacctagaaaaactgcaaaatacaaaatttgtttgactatatcagagaagttatcaaagcagtgaagatttttggggccaagatgtggaagcagaaattaacccagaaaatgtgatcctggcatttgggctactttttcctagaagtgaattgtccattccagaagaggaggctggatggaaaagaggaggatgagaagatgagcagagcttctgacagattcagaggactaagatgacaaaaatgactaaaatggacaaaagaagaaatagaaaatctgaatatttgactattaaaggaatttaatctgtaattaaaaaccttaagtacaaagaaatctatatgctatgatggctttaatggagaatgtcataatgtcatttaaaaaggtatgagagtactattgtagattaaaagaggttaaaggcatataat

SEQ ID NO: 242748 - DNA, 219 bp, Homo sapiens
  misc_feature (9)..(9): n is a, c, g, or t
gaattcggnacgagagagaactagtctcgagtgacaatggaaatctctttgcatagttgtaagcctgagtgattgagagaatcaggatttctatgctgtgcaactcctaggggcgacattgaccttgaagcacacttcagtggcacataggatggcacagaatgtagctcctgtagccatgtgtagcaacaagacatgaggcagaagtctgccggcatt

SEQ ID NO: 242749 - DNA, 564 bp, Homo sapiens
atgagaatttactctttcatcttagttttccctgaactggagggcttactgacgtgtccatatttttttaaaccctgataaactatgtagagcacagtttagcaaagactatcataatttaaaatgcagatactctttgactcagtaattctgcttcatgagtacagagatacagcattgtatggcaaaatattgcaaatgcataatcagtgaggggctgattaaattgtgatgtattcatatatcatgagattgttaaaaaaaaaggatgagggagccaggtgcaatggctcatgcctgtaatcccaacactttaggaggccgaggtgggcggatcatgagctcaggagatcaagaccatgctgactaacgtggtgaaaccctgtctctactaaaaatacaaaaaaattagccaagcctggtggcgggcacccgtagtctcagctactcgggagactgaggcaggagaatggcgtgaacctgggagacggagcttgcagtgagccgagatcgcaccactgaactccagcctgggcaacagagtgagactctgtctcaaaaaaa

SEQ ID NO: 242750 - DNA, 417 bp, Homo sapiens
tgtgttgtgtttattcagcagcacgctaaatcacacccgggcacaagtggagcattcatcaggaaccacgagcccctctttcagtctgccaaacctatccaattactggggctggaagagcctgcacaaacccttctgccaggccttgcaaaattctaaagaacaaagtccaaccatccaagcaatattttaaagaatgagatctgtgttaacacttaaagacattttccacgttgacctcatgaaccccaaaagaaggatgaaagaagtctggaattaatgaatttagggaacctgtaaaactccaaaaatgtttaatgcaaaaatgtgatatttttggtaggaaatttccattgctttcaacagatttgggaagggacccaaaagatgactaaaagcatctgcattttaaccaaa

SEQ ID NO: 242751 - DNA, 437 bp, Homo sapiens
gattttcacaaactaccatttgttggcaataaccttcctttgcttcaaagctcagctaagccttcacttcttccaaaaagctgttcctaacccctcagtctgatttgtgctcctcctctgtgctcctatcgtctcctgcattcctctgctctagcatttacactatgtcatgattttatttccaccttgggccctccctggcctgtgagctccttgaaggcagggaccacttcttttcatctttctggttccagcactttttatagtgcctggcacacatcagatgctcaatccatttctatgtgtattttgtctacttccattctactgcagtgttcagaaaaagcccctaacctcaatttgcatgatgacctaatctcggaatctggaacaatgtgagtttctgagactccggtggtgctggggctgttgggtca

SEQ ID NO: 242752 - DNA, 300 bp, Homo sapiens
gagggaagtctagggcgcacacacccagctccctggcagagggcaggaggggccccactgctgcggcctggcctggctctgatatgatgtgtcctgccacctggcagtatccagcaccccgcccccaggagtagagcttcctgagtacccccagccaagctccaccctttggaggagaaatggacttatcagtcccaagtgatgaacagaccggggacgctttgggacagggcggggctgggggaatctcctctataagaggtcaatactgtcagtaaattggatggctgatgtgagcct

SEQ ID NO: 242753 - DNA, 606 bp, Homo sapiens
ttcttagaaaagtgattaggtgccgggctgtccttgtgtgacttaagttggtaagctttgattcgtttctgttatcaggcaaatcgtgcatgaaatccctcctttcatagccttccctggctccacgttgtcagggtttgacacaagtgactccattttgaatctgacaacttttgcgtgagcaggactaaccattagaattcaccagaggtcagtcagcttcagtcctcacacaaggaaggcaattacacaaggctttaataccaggaggttggtcatttgaggtcatcttaaagaggctgcctaacacatgggtaaatattttaaaaacctaactatatctggctttcaagaggcatactttgagtgttaagagaaaaattgaaagtaaaaggatgataaaaaacacaccaaccaagaaaaggctgatatagctatgcaaatatcagttgagataaatgtaagtcaagaagcattactaaggacacaaaggaacatttcatagagataaaaagataaatctaccagaaagatagagtttgtattttaatgcaactaataatatagcttcaaaatatagaaaacaaaattacagacctagaagta

SEQ ID NO: 242754 - DNA, 533 bp, Homo sapiens
agtcctagtgactcaggaggctgagtcagggggactgcttgagcccaggagttggagacttcagtgagctatgattgtgccactgcactccagcctgggcaacagaacaagaccctgactcctgcagaggagggctccatgtccaaccaatgggatgtacaaaaacgacagtgtgacttccaaggtcagatcacaaaagtccttgaaggtttcaccttactggatcacttgctctgggggaagccagccgccatgtggtgaagacactcaagcagccctctggagaagcccatgtagcaaggaactgaggtctcctgccaactaccagcgctaacttgccaggcatgtgaatgactcaccgtggaaggggattctccagccttggtcaagtcttcagatgactactaacccaagccaatatcttgattacagccttgtgagacccccagagaaggaaccgccccagctaaccacccactccagaattcctgaccctcaggaactgtgtgagatcataaatgctgattgtttca

SEQ ID NO: 242755 - DNA, 378 bp, Homo sapiens
agcaatcctcacacctcagcctcccaaagtgctgggattacgggcatgagccactgtgcccagaccagggagttgtttctgacactcctgatgtcaaaaggagtgaaggtgtagggttaagactttactgcttttgttgaaagccgagagtaatgatgaacacctctaactggtatgtcaatatgaactgttaacaacacatatcagtatgtgctaatctaccaaaaggacttcctagtgaaaaatgctaactccatctgggtgccttggctcacatctgtaatcccagcactatgggaggttgaggtgggaggatcacatgcggccaggatttcaagaccagcctggtcaacatggcgaaaccccatctctattgaa

SEQ ID NO: 242756 - DNA, 649 bp, Homo sapiens
taaggcttaaagacatagtatgcctgagaagaggataagaaccagactgtccacagtctgttctcctatgaccttaaaggacatggcaaggaccactgaggttttgtggttccatgagttgaggagaagcagaggagcatgatccaccccaaggagctgctgggtagtaaagagcacaacccagagatgaagctgggaggtacactactggtagacctgagggaagcctttcttttcctcacagtgacagaggggtgctgggtaaagctgagcgttgcccaaggtcacccaccacacttgacctgtctggaggccacatgaagccttgatgcgctggcatctgacctgaacatgctgaactggagtgaggcccgtgttgcctccctacccctgacccaagggccatcgcgtaagaagctggatcaattccctctccctccgccagagactgctccccaacattagtccgttctggcttctactgtgtggcggaaggaaaagaggttgaatcagaaatgagattgaagttttaaactggactatacttcaaaaactgaaagtaatcagaatattatagaatgtgtccaaaatgtttcaatgatgagactctggagttcccctatgcatagttgaaagcagtgattagaaa

SEQ ID NO: 242757 - DNA, 458 bp, Homo sapiens
aggcatataagaggggcttggtaaatttttgattattggttgactcttttttaaaaaaatgtttaacttgtgtaaaaactatttcaaggagggtactcaaatgccacacttttgtgacttttgctgtccttaccaaaatgaaatatgggtggtggcttccctctaaaggctgataacaatgcctttaatctaatcttgcaaggtgtgtaaatcacaaaccccacttgctgactctctgcccccgtctgtcatgctttaccacaatggtgaacaacagctttgaatcatgctaaatgtcaaccttcctgcccattagttgattgctttccattctgtaaatacaggagttatgcagaattgattgtatcaaagtgatatatttcaggttgcagtataatatcttatgtaccttgaatgccttgaaatttctataaacacaggttttgtaattgtgtgtg

SEQ ID NO: 242758 - DNA, 409 bp, Homo sapiens
aactattgttcgccactaaaggaaagcgtgaggcgagcactcactacacctttggagaaagaacactttctttaaatgttctaaagcctcttgctttgagctgcttgttgcccttgtttgcaggaacccatgctggctgcaggcagaagtcgcagagtttcaagcatgtctcatctgtctacagtctcgttctcagaaacttctgtttgggcttcaagacagcgaagggcaggaaagacagacaccagaagtgtcccagctaagatatgcaagttctcagcagtgtcaggggagcaagagtggggcattttagagatcagatgagatgactgcggcacagttaccaacataaacgccaacgtctgtatgtacacagccctttgagattaaaacactgctacacatataa

SEQ ID NO: 242759 - DNA, 515 bp, Homo sapiens
gtgttagcttttgagcatgggaccttttgttgtatttggatttttgaatatgcagtgaggcacatgagagctttgactgagaccacttaagagtttaagtgggaaaggttaaaaccataatggcatagaagggaggtgcaaggacaataaaaatgtatttttttttgtacttttatctttcattattaagtgtagctttgtcctattccctttttccatgggcctggtaaaatttcctggccagagacaggttgaggtatatgatagaggtatgactcactttgtctttgaaacatattttaaaataacactaagtctttgttttaaaataaagaagaaaaacaagacctagagtcaattctgttactcataccctgttagcttgccgtaacattaaagaaagaaaagatgttggtacatgaaaaaggaataataaaaagtcaaaattagtcttcttcatgaagatcctttcttatttcattttccaaattccaggtaagtttcttaccagaaaa

SEQ ID NO: 242760 - DNA, 407 bp, Homo sapiens
aaacctgtgcagcttgttactgcactaaataccagagcagttgtaacacactggtaagtacttatgtacttaaacatatctaaacagagaagaggcacagtaaagatatggcataaaagataaaaaccaggccaggcgcatgagcctataatcccagcactttgggaggccgaggcaggtgaatcacctgaggtcaggagttcgagaccagcctgaccaatatggtgaaaccccgtctctactaaaaatacaaaaattagctgggtgtgggggcgggtgcctgtaatctcagctccttgggaggctgaggcaggagaatcgcttgaacccgtgaggggcagaggtttcagcgagccgagatggcaccactgcattccagcctgggtgacagagcaagactccatctc

SEQ ID NO: 242761 - DNA, 421 bp, Homo sapiens
acagagtcttgctctgtcgcccaggctggagtgcagtggcgcgctctcagctcactgcaagctctgcctcccaggttcatgccattctcctgcctcagcctcctagtagctgggattacaggtgcccgccaccacacccggctaattttttgtatttttagtagagacagggttttgctgtatcaggtcttgatctcctgacctcgtgatccgcccaccccggcctcccaaagtgctgggattacaggtgcgagccaccgcacctggccaaatagtccataattttatcacgtgtagatttctgtatccaccactataatcaagatgtagaaccattccatcaccacaaagatctcctagtatccacattttgccagttggatgaagtatagaaaccttacctcccttcaagtctctttgc

SEQ ID NO: 242762 - DNA, 1225 bp, Homo sapiens
cgcgcgcctctgccgtttgcagcccgcggcgctttcccctccgcggttcctccccgagccgcccccagtgcccaagcttccgcggctccgccgaccaggggccgcgccgactgggaactcgccaggggcgtagtcccctgcaaggcctgggggccggcgaggccgcagaggcgggatgggcctgagcccgggcgccgagggggagtacgcgctccgcctccctaggattcccccacccctccccaaacccgcctcgcgaaccgccggtaccgggcccaaggaccagccgcctgcgctcagacgttcagctgtgccccactcaggtctaaatagcatttccccccttgaattagaagaatccgtgggattcgcagcgttggtccagctcccagccaagcagcctccgccgggcacattagaacagggcagaagcatccagcaaggggagaaggctgtagttagcttggagaccacacccagccagaaagcagactggagttcaattccaaagcctgagaatgaaggcaagttaataaagcaagcagctgagggaaaaccaagacccagacctggagacctgattgagatttttcgaattggctatgagcactgggccatctatgtagaagatgattgcgtggtccatctggctcccccaagtgaggagtttgaggtgggcagcattacttccatctttagcaatcgggccgtggtgaaatacagtcgtctggaggatgtgctgcatggctgctcctggaaggtcaataacaagctagatgggacgtacctgcccttgccggtggacaagatcatccagcgtacaaaaaagatggtcaacaagatcgtgcagtacagcctgattgaagggaactgtgagcactttgtcaatggcctcagatatggcgtaccccggagccagcaggtagagcacgccctgatggaaggagcgaaggctgctggagcagttatttcagctgtagtggatagcataaagcccaaaccaataactgcctgaaggtgatgaaaactccagctagaggaagagttactgacacaagcaaaaagaacatgcttccttcccttgccttctctcaatggctccgattaagaaaattgtgaacttctggaagaatctacaatgtatccaattacccttccagaaatacatccaatatatacgagcatagacccacagactctcaggatgggaaggaaaaaaaaaaaa

SEQ ID NO: 242763 - DNA, 1119 bp, Homo sapiens
cgcgcgcctctgccgtttgcagcccgcggcgctttcccctccgcggttcctccccgagccgcccccagtgcccaagcttccgcggctccgccgaccaggggccgcgccgactgggaactcgccaggggcgtagtcccctgcaaggcctgggggccggcgaggccgcagaggcgggatgggcctgagcccgggcgccgagggggagtacgcgctccgcctccctaggattcccccacccctccccaaacccgcctcgcgaaccgccggtaccgggcccaaggaccagccgcctgcgctcagacgttcagctgtgccccactcaggtctaaatagcatttccccccttgaattagaagaatccgtgggattcgcagcgttggtccagctcccagccaagcagcctccgccgggcacattagaacagggcagaagcatccagcaaggggaaaaccaagacccagacctggagacctgattgagatttttcgaattggctatgagcactgggccatctatgtagaagatgattgcgtggtccatctggctcccccaagtgaggagtttgaggtgggcagcattacttccatctttagcaatcgggccgtggtgaaatacagtcgtctggaggatgtgctgcatggctgctcctggaaggtcaataacaagctagatgggacgtacctgcccttgccggtggacaagatcatccagcgtacaaaaaagatggtcaacaagatcgtgcagtacagcctgattgaagggaactgtgagcactttgtcaatggcctcagatatggcgtaccccggagccagcaggtagagcacgccctgatggaaggagcgaaggctgctggagcagttatttcagctgtagtggatagcataaagcccaaaccaataactgcctgaaggtgatgaaaactccagctagaggaagagttactgacacaagcaaaaagaacatgcttccttcccttgccttctctcaatggctccgattaagaaaattgtgaacttctggaagaatctacaatgtatccaattacccttccagaaatacatccaatatatacgagcatagacccacagactctcaggatgggaaggaaaaaaaaaaaa

SEQ ID NO: 242764 - DNA, 295 bp, Homo sapiens
cccaacctttgtttgtctttggtctccaggtgaggagtttgaggtgggcagcattacttccatctttagcaatcgggccgtggtgaaatacagtcgtctggaggatgtgctgcatggctgctcctggaaggtcaataacaagctagatgggacgtacctgcccttgccggtggacaagatcatccagcgtacaaaaaagatggtcaacaagatcgtgcagtacagcctgattgaagggaactgtgagcactttgtcaatggcctcagatatggcgtaccccggagccagcaggtg

SEQ ID NO: 242765 - DNA, 1468 bp, Homo sapiens
cgcgcgcctctgccgtttgcagcccgcggcgctttcccctccgcggttcctccccgagccgcccccagtgcccaagcttccgcggctccgccgaccaggggccgcgccgactgggaactcgccaggggcgtagtcccctgcaaggcctgggggccggcgaggccgcagaggcgggatgggcctgagcccgggcgccgagggggagtacgcgctccgcctccctaggattcccccacccctccccaaacccgcctcgcgaaccgccggtaccgggcccaaggaccagccgcctgcgctcagacgttcagctgtgccccactcagaagaatccgtgggattcgcagcgttggtccagctcccagccaagcagcctccgccgggcacattagaacagggcagaagcatccagcaaggggagaaggctgtagttagcttggagaccacacccagccagaaagcagactggagttcaattccaaagcctgagaatgaaggcaagttaataaagcaagcagctgaggttcttaaattttgatgaagtccaatgtgtcagcttttccttttataaaacggaaatgtaatgaaatactgctcagtaataaaaaggaatgaactgttgataaaaagcaacaacacggatgtcactcaaaatagttatatgaaggagaccgccaaagaagtggacatacaacatgatttcatataaatctctatgaatagtgcctttggtggtgtatctaagagacctttgcctaatccagtgtcacaaagattttctcctgttttcttctagggaaaaccaagacccagacctggagacctgattgagatttttcgaattggctatgagcactgggccatctatgtagaagatgattgcgtggtccatctggctcccccaagtgaggagtttgaggtgggcagcattacttccatctttagcaatcgggccgtggtgaaatacagtcgtctggaggatgtgctgcatggctgctcctggaaggtcaataacaagctagatgggacgtacctgcccttgccggtggacaagatcatccagcgtacaaaaaagatggtcaacaagatcgtgcagtacagcctgattgaagggaactgtgagcactttgtcaatggcctcagatatggcgtaccccggagccagcaggtagagcacgccctgatggaaggagcgaaggctgctggagcagttatttcagctgtagtggatagcataaagcccaaaccaataactgcctgaaggtgatgaaaactccagctagaggaagagttactgacacaagcaaaaagaacatgcttccttcccttgccttctctcaatggctccgattaagaaaattgtgaacttctggaagaatctacaatgtatccaattacccttccagaaatacatccaatatatacgagcatagacccacagactctcaggatgggaaggaaaaaaaaaaaa

SEQ ID NO: 242766 - DNA, 1302 bp, Homo sapiens
cgcgcgcctctgccgtttgcagcccgcggcgctttcccctccgcggttcctccccgagccgcccccagtgcccaagcttccgcggctccgccgaccaggggccgcgccgactgggaactcgccaggggcgtagtcccctgcaaggcctgggggccggcgaggccgcagaggcgggatgggcctgagcccgggcgccgagggggagtacgcgctccgcctccctaggattcccccacccctccccaaacccgcctcgcgaaccgccggtaccgggcccaaggaccagccgcctgcgctcagacgttcagctgtgccccactcaggtctaaatagcatttccccccttgaattagaagaatccgtgggattcgcagcgttggtccagctcccagccaagcagcctccgccgggcacattagaacagggcagaagcatccagcaaggggagaaggctgtagttagcttggagaccacacccagccagaaagcagactggagttcaattccaaagcctgagaatgaaggcaagttaataaagcaagcagctgagggaaaaccaagacccagacctggagacctgattgagatttttcgaattggctatgagcactgggccatctatgtagaagatgattgcgtggtccatctggctcccccaagtgaggagtttgaggtgggcagcattacttccatctttagcaatcgggccgtggtgaaatacagtcgtctggaggatgtgctgcatggctgctcctggaaggtcaataacaagctagatgggacgtacctgcccttgccggtggacaagatcatccagcgtacaaaaaagatggtcaacaagatcgtgcagtacagcctgattgaagggaactgtgagcactttgtcaatggcctcagatatggcgtaccccggagccagcaggtgtgaccccatttgctctgatgatggcttcttccagagctttcttggggtttgtcatttcattagtgatcagaatggtagagcacgccctgatggaaggagcgaaggctgctggagcagttatttcagctgtagtggatagcataaagcccaaaccaataactgcctgaaggtgatgaaaactccagctagaggaagagttactgacacaagcaaaaagaacatgcttccttcccttgccttctctcaatggctccgattaagaaaattgtgaacttctggaagaatctacaatgtatccaattacccttccagaaatacatccaatatatacgagcatagacccacagactctcaggatgggaaggaaaaaaaaaaaa

SEQ ID NO: 242767 - DNA, 504 bp, Homo sapiens
gtggactgtgtttagggcctgtttagtatcagcttgtgaaacgcagttttcactgtgtgtgtttcaatgactttaaaattatttttgcattgtatgtaaattaccaaacataaacgatttagaagaaataaaaagcttatttttcttaagaaacagtggctactgtcacttctcggccttttggctaagatcaagtgtgtaaaaagtggctactttaataataatggtgtcttacatttatatagcactttattgcttataaaatcctttcacatgcattaggtcatttatacctcacaacagctctgagaggtagctattatagttcccatttaatagatgaagaaactgaggctcacagagttccagtaatttgtccaaggtcacaaagctgttaaatagtagagccaggactgatactcaactattctgactctaaagccagtgaaatttttcctctgccttttttttataatagtaaaaagagaaaaattaatatgcttt

SEQ ID NO: 242768 - DNA, 331 bp, Homo sapiens
ccaggagagagaaaaagagaaaggaagaaagagagataacacaaagggaacaaatataaatcactgacttttttctttggagtctcctttaccaagagcaaaaagaatcttgatagtgagatttctgtctatgcttgtggccctcagagaagcatttcaatagattattcatctgtaaaactggaatggggagagaagatcctctgtcaaccttaagatgcaagctgtgctatataatagttgaaaggacacagaaaaatatttaggacaattaaagcaagctaccattctagacatagggattataaataaattgattttgatattgatg

SEQ ID NO: 242769 - DNA, 528 bp, Homo sapiens
ctggaaagtgtcagcgggtcccagaagcgcgatccctgcctgggcttcctgggagtgtgtgtgggttgctggggtaggtctagccacacctcactgacccgcctcccatgcttacacgtggacatgagagaggccccgtctgcgtgtctgtgtgcctgtctatccccactcacagtcaagagctttagcgccgacacctgctttggaatcctgactccactacttactagctggttgaccttgggcaggaaattttccctttcacccatttctaaatctgagtgtttactaacttccagccactgggcttctccaatagaaggttattagtatttccactttgcagatgaggaaaactgaggtagggagaaagagcgagcaagcaagagacagacacacacacacacacagagcgagtgagcgagcgccaagtggtttgcctaagatcacacagctggtaaggtgcccgagggccctttatcttacaagggtgctgcgagagtcaagtgagtagcagaggtaaagctc

SEQ ID NO: 242770 - DNA, 399 bp, Homo sapiens
aatactttcttaattcgtctcttaattttctaattcctgcttaactttctggttttataccacatggtttgcagttcccagaactgttcatattccttcacattttgataatttgctcttttctatctacacctttggcatccacttaccaacgcttttacctaaccccagtttagttgtcactttgaagaacactagtaaggtcctacatccagactgggtaaggttttctatcctatgtgctccttgatatgatgtgagcacccatgtacagcttatattgatctatatacctatctgtgcatcttatctgttttaaacattgtgagaccttgtgctttttatccttcaagtcttgttaaaatgcctggtgctcattcaatattgaaaaacaaaata

SEQ ID NO: 242771 - DNA, 451 bp, Homo sapiens
atcaagatacagaatatggatttagaatgcgaagtctctaagtcaagggaaaggtctaggtcgaacagtggtgcccttcaacaagtaataccctacatctcagccaaagaatctatcagtgaatccatggatggatgcatgagggatcagacagcccctgtcccactatgtctggctctatggaaatgtgggactggtgacaccctccttctcacagtattataagtaaatgcagcagagagtccactcttgaagcttgtgactgggaggaagaaagcatggagaggaagtatgcattcagatccacagaggaaaatggtaacctttgaagtcttcccacaaatccctaaactaggcctaaggccagaagagttctatatcagaacgttttgggaatcgtcttcaaaaccggaatccatttggccaataaagagtctatttgaattacaaa

SEQ ID NO: 242772 - DNA, 457 bp, Homo sapiens
cagtccctgagtccccgagaccatcttgaatgctgagcaggaaccagccaggctcagccctggcccctcgcccctttctctgactttctcactttacatgcccttgttgttagaagacttagatagaaacatccagcccagctgggcctagtctcaaaagatggggagggtgtgaggtaaggaaaggcttttgacctgtcccaacggctttcctgtgaggggaagaattctgcgagttggtgaccccctttgggccctcctccacttggatgtgatgttggtcactgaaaccgtttcctcctcatgtttgtctggctctcatttcaaagccgtagaggagcaaaataaacaaccatgtgttaggggtacctctaaagtgcaggcacgtgggtgggccagggtgcagctaaactgctgagtggatcatttcaataaaaccttatcctcagccattctc

SEQ ID NO: 242773 - DNA, 470 bp, Homo sapiens
aaagccaagtttttaacttggtgtttgttttttgttgttgttattgttgctatattttggtattggcaggggcagcaatgaaggagtgagatatggaagttggattttccatagcattacttttaaattgaatctcaactgacctctctggcaagctattcatactttgccttagactggatttaaaaaaaaaaaaaaaaaaagtctccataggcaatgattggttaagacggagaaaagagataacggtgcacccatgggaggaggctgagaaaagcaaagacagtgacaggcagataaacagaaaaagaggaagtgattaaaaataaaaataaaaataaatctcaggtacttgaaaagccctggctgagacagtgatggagataaaaagagaaagaggagaaatacaatcagcactactggtaactggagaggctggaggaatgggggatggaggctcagagactgaa

SEQ ID NO: 242774 - DNA, 565 bp, Homo sapiens
ccgctgcttgcactggctcagtgggcttctgatcctgactcggctaagtatttgctggtgaactcagatgagcccattggtgtgtctgtacctcagtttcccctctgtaaaatgtgtctggcagcagtctctgtgtgagcttaaccggaggctcatggaggccgtgggatgctgagcacagtgcctgtgctgagtaccactcagcaaactgaggctgacgctgtggttgttacctggagggtctgggcttataaccccccactgcccgccacaacacacacacacaggcgcacacacatccatgcactcgcgcacacatgcacgtgcacgtgcacacacatcacaggttacctccttcaacattgtgtacatgcacacacacatccatgcactcacacacacgcacatacacgtgcacgtgcacatacacacatcacaggttacgtccttcaacattgtgtacaggcacatacacacatccatgcactcacacacacatgcacatgcacgcgcacacacatcacaggttatctccttcaacattgtgtacaggcacacacacaca

SEQ ID NO: 242775 - DNA, 478 bp, Homo sapiens
tcgctctgtcacccaggctggagtgcagtggcatgatctcagctcactgcaacctccacctcccaggttcacaccattctcctgcctcagcctcccaagtagctgggactacaggcgcccgccaccacgcctggctaattttttgtatttttagtatagacagggtttcactgtgttagtcaggatggtctcgatctcctgacctcgtgatctgcccacctcggcctcccgaagtgctggaattacaggagtgagccactgcgcccagcacatctcgctatctttcagaaaatcattgttatcaggtttggtgcagtggctcatgcttcttgttgcagctgctcaagaggccaaggtgagaggatcgcttggggccaggaatttgagaccagcctaagccacatagcaaaacccagtctcttaaacatatatatatgaaaaaatatacattacatcaggaatttcagtttccttcttt

SEQ ID NO: 242776 - DNA, 481 bp, Homo sapiens
tagcctgtggccccatggtcagcctgtgtccagatcctgggtactctacttcataactggccatatgaacttaggcaagtcaatttaacttctctgggccttggttgcctcatctgtagaatgaggataataataataaaatctatctctaagatagatgggaggtaaaacctatctctaagatagatgggtaccatgggtaccatgctcactacctgaatgaaaggattaatggtacccccaaacctcagtatcacacaatataccattataacaaacctgcacctatacccccaaatctaaaataaaaactgaaaagaagttttaaaaaaagtaaaaacagaaaaaaatggagctatgtgtattactggaaggttctggtaatttacctattgtggctcagctacacatctctttgctctttcaaccctgcaatacttctgtaaccacccccctgtattaaattccttctggctgaaaa

SEQ ID NO: 242777 - DNA, 416 bp, Homo sapiens
agaaaattaaaaacacctcctacacacggatgcagcaaagcccagtgtagatttttttttttgtatttttattcttttgtactcaaaagcctcaaaagacctttataatccacacatttttctaaagtacaaggtaatcaatcagtgggattgttctttaatgtgtgggaatattctcctccttattctcctcctagaccaaacgctgactactaggctaaacgctgactactaggctggaatattcactgagaacatcaacatgccaaagagaagccaatcatcgaactaacctggtggtagcaggctactgggagttaatgaaaatggaagtgggaggcaacacaagcagtgcccttgggtgggaagggatggagcagtataaagacagtggaaaggcctcgttgagtgaaaaa

SEQ ID NO: 242778 - DNA, 329 bp, Homo sapiens
atgtaaatgatgcatctttagtttcatcttcctcaatttcataactgatttttgtgtagctttcatatctgaaaatgagtacaaatatggagaaaataaaaggatctttcctaaacaatattctaacatttttaaaaaggttgcactggtaatgcaaacagataaagtaatgaaacttctcagatagcaattatgtggcacaggctctgagagctaatctctcaaagagtcaagcctagtaagataccagagataatatctacatggacagaagattgatagcttctttgacaagagcaaatatattgctttgggcttaaagctcagca

SEQ ID NO: 242779 - DNA, 609 bp, Homo sapiens
tgctggttttgtccctaaacacagactagtgctaagcatgtactaagaacttagcacttggttgtggaaatgaattaaacttcagttcaccaaagttctgagcattccatgaagtattcagcctcatccaatcaattcttggatacacaacccatgaaaccattcagtgtttttaaagaaacattaacaaataatattaaagaataagtcccctgagaaagtgtatgcatataaaataattctaactttattcttgtaccatcattgaatacttaatcagcaagccaattttcttttgacaccaagactggaaaatcatcaccaatatacagtctggcacaggagacagggactagaatttcacaagagagaggagggctagctctattctcactagaaacaagacctaaagcaagtcacttaccctctgtcagcccttatctctaaaataaaaatagttgtacttttcccagtgaccccatagtgctattgtgaggatgatttttttaaaatttgtacaattgctttcttgaatataaagcacctaattggtataatggctttatgggacaccctgacctttttaaaagagggcctattatactattg

SEQ ID NO: 242780 - DNA, 467 bp, Homo sapiens
ggtgtctttaatttttctcagcagcattttgtgattttcagtgtagtggttttgtgtcttttgtaaatgaattgttacgtagtttatgttttttatgtcattataaatggtatttttaaacgtgtgattttccagttgtttactattagtgaatggagatgcagatgcatggttgtgtactaatctcgtgtcctatggcccctctgaaccgtagcttctgtggagccgtgggtgacagttgtaaacagttggcatttgcagatagagccatgtgagcacctttttctccaggcttgaggccgttcctttcttttcctgcctcgttgggctggtcaggacctttggcatcgggtgagtcggcgtggggagctgggcctttctgccatgctcttcctttcggggaaagtattgagtggttcaccagtaaggatgtgagtatctggagtgtttttgtcattgttccttta

SEQ ID NO: 242781 - DNA, 419 bp, Homo sapiens
tgtctcctgcctgcccctgggaactgaacgtcttggtataaaacccgattgtacatttgttcaattctgagataggagaaaaaccgccctatggtgggaggtgagacatgttggcagcaatgctgccttgttattctttactccgctgagatgtttgggtggagagaaacataaatctggcctacgtgcccatccaggcatagtactttcccttgaacttaattatgatatagattcttttgctcacatgttttttgctgaccttctccttattatcaccctgctctcctactacattcctttctgctgaaatcatgaaaataataatcaataaaaactgagggaactcagagaccggtgccggtgcaggtccttggtgtaccgagtgccgctctcatgggcccaatgatgtttataaa

SEQ ID NO: 242782 - DNA, 382 bp, Homo sapiens
attgagatggagtctcgctctgttgcccaagctggagtgcagtgatgcaatcttggctcactgcaacctctgctggccaggttcaagcaattctcctgcctcagcgtccagagtagctggtattacaggtgcccatcaccacgcccagctaatttttgtatttttagtagagacagaggttcgccatgttggccaggctggtctcgaactcctgacctcaggtgatccacctgccttggcctcccaaagtgctgggatgacaggttggagcctctgcgcccagcccaattcttgagtattaaatgcttaactgccttgttatacctcctgtactaagaacactaaaaatgtagagcattttagacaagaaacctaattaaaa

SEQ ID NO: 242783 - DNA, 317 bp, Homo sapiens
ggagaaacacctaatgtaaatgacaagttgatgggtgcagcaaaccaacacagcacacatatacctatgtaacaaacctgcatgttgtacacatgtaccctagaacttaaaaaataaaaaaaaacaacttggtatagccacatacactacctttgaaagatctccaaaaagtgaatgaacattacaggattaaaaaaaaaacctacatgacattattttccaaaggtacatacaattatgtgattataaatccattaattgtaaaccagttacagtgattacctctgtatcaccactctggtaagcggaggaaggca

SEQ ID NO: 242784 - DNA, 448 bp, Homo sapiens
ctatggtgtcagcgctgatggggtctcaggtctgtcactgtacccggccccacagccagagctaagtttgggagctggccacggagtgtctgcggctcatgatggtaggctgaaaaatggcccctaaagatatccaggtcctcatccctggaacgtgtgggtgtcccctttacagccaaaaaatgggctcctgcagatgtgcaaagttaaaggtcttgagataaggagatgatcctgggctatctaggggttccttaaatgctgtccctagtgtccacaacagagagaggctgagggagactcgacaacacaagcacggaggaggagactgcgcggccaccgaggcagagaccagagtgatgcaaacacagccagggatcaccagggcagctggctgaggctgcaaggggccctgcacaggttctcccctggcgcctccgagggggca

SEQ ID NO: 242785 - DNA, 147 bp, Homo sapiens
cagggagagagggaagaaagagcatgacattgttctttttaatgcgattttctttttggctaatagaaaagaaaaaacagtttcttttttttttcttttaaaaataaggggtctcagacactgaaaacccagctctcctaaaacagt

SEQ ID NO: 242786 - DNA, 345 bp, Homo sapiens
cgttgaagctattttatagaacctagctcttatagctggacaaaccatgtttcccatcttcccttcctctacttcccctggatttcttttttttaatttatttttttaattttttggagaaaagagtcttagtgtcgcccaggctggagtgcaatggtgcgatctctgctcactgcaacctccacttcctgggttcaagtgatcctcctgcctcagcctcccgagtagctgagatcacaggcatgcgccaccatgcatggctaatttttatatttttagtagagacggggtttcaccatgttggccaggccggtctcaaactcctgacctcaggtgacccaccca

SEQ ID NO: 242787 - DNA, 495 bp, Homo sapiens
aatatttgaatgtttgatttttttatagtatcaacagttgtactgtgtaccagatcacatagtacagttttacatttaatctatattggcctgaaaagaacacacaggcactttactcttaaaggatataataaactatagttatactgcattcatattcataccagcatgtagtatctttccctgcattcacagaagttttatttacaatgacaaaactaaagcctgaggatttgttttaaatctgcattgtggtagagaggaaaaagtacttttaaggaaacctgggttctagttttgtcattgtctttaattaaaccggttagtgatacatggtaagtcacttcattggcattttgtgtattcatcagtaagctagacaagatgatagctacagtttaagaatttctgtaaccattatacaaaactggtaggtaatattaaaggtattttcctgaaataataggaataaatactgagcactttgtatgcaaa

SEQ ID NO: 242788 - DNA, 435 bp, Homo sapiens
cgaatagctgggcctacaggtataagtcccaccatctttatggcagaagttctgccttcttattaagagtgagaagaatgttttatggttgatattagaagttttaagacagtgactgtcacatgtagggataggctcagagggagctagagagaaacccaagtagggacctataaagaggtaccgattgctggagggcccagctgaggttgaaaatcccaaagcccaattttatgctgactgctaaagccttgttcctcgaaagaaaaaattataatgattataaaacataattatataagtattatataaagcacaacttagaaaagatttaagaggtattctaggaagattgatttagaatgtttggattattttgaaatggatcttaatacttattgcattcctacttatctttcagagatttccttcaga

SEQ ID NO: 242789 - DNA, 535 bp, Homo sapiens
gtgtgtgtgtttgtgtgtgtgtgtgtgtgtgtgtgtatagtgcatgtatagcatttacactatcgtgtatatacaaatatatagcatatgtatagaatatactgtattattgtacatatacatatgtacaagtatatatgtaagctcagtgtcttatgatttcattctgacctattgccaacttcattacacacaactcctttcataaatgtatccttcatgaacatttcatgatctgcacagaccttcagtgacatgcttaaactttctgctttgttttatacttccccttaaacaactggtcatcctgctttaggataaaaagttactatgcaagactcatacagaattattctgttaattttgtaaccatccttaccaaaggtacattctcacacccattaacttccttcatatttctctcctcctcctacttagtggttcctttctgtcttgtttccatatttgaaacaacctctaataaactctgaatttaaacaacttttttcccaataaaaagcaatttttatgcctt

SEQ ID NO: 242790 - DNA, 489 bp, Homo sapiens
taactctgcgtgggtggtgagcctttcagggaaaatattccctctcttccagtgtccctcatctggttgacaccaccctgtctctccctctcactcaacatcactttgtttcgggctgtatcttagtgcaatctcccatggaatggccccaaagactaatctgctacaaggcatgaaccaagcacaagtatagctctgttccatgactttcttttatagcctccctccagccctgttgaacacacaagtagatgaagtttagaagaattctttcactatttaaatcagctcttctgtctcactacggcatgatagagggtaaaatgaagagaaatgaaagactaactacattttacttagaccactacatcatctgctcagtctatagctttcctattttgttccacactcctggaattctcacaatgggattcaaagctcacctagaagccactcttagacaacaaaggacacagtcccctttggagt

SEQ ID NO: 242791 - DNA, 468 bp, Homo sapiens
tgcagtgagccaagatcatgccactgcactccagctgcaacaggatgagaccctgtctcaaaaaataaaaacaaaaagcaagagatcaaaagcactgtaacaaatgaagaatgcctttcaagggctcactaggaggctaaatgtatccaaggaaagaatgtccaagcttgagtatatgtaaatagaaacctacaaaaccgaaaagcaaagagagaagactgaaaaacaatatccaagaactgagggacaactacaaaacgtttaaatgcaattaatgggaacagcagaaggtgaagagagaaaggaacagaagaaatacttgagacaataatgactgataattttcctcaaattaatgtcagacaccaaaccaaacaaaaacagatccagaaagctaagagaacatcaagcaggataaatgccaaaataaattaattgaaaatacacctagacatatattaaaactac

SEQ ID NO: 242792 - DNA, 810 bp, Homo sapiens
acaagaggactgtggggtggagacacattcaaaatgtctttccaaaaggagatactccaacactcatacaaactccttcaggcattccaacagcattcccatttataatggaagccaactttttaaaaaaagaaaacaaaacaaaacaaaaaaactgcagatcacaaatatcaagacattttcctgaagaaaagaaaatgtaaaatttcagcaaagtcagtttcgttagattacagacagaagatagaaaaaaaaaaaaagaaaacattgcattttttgtttgtctgtttcctggtagaatctgagcgaggcaaaataacagcactaatgtgtagaaagaattccacatctggaaaacctttgcttcgtctatggtagcttttcagcctcttgctctgtctctattatttcccatgacttcagcttaccttgcttttgttttctttagtgaaattatttaacccttaggggtttcaggcttggtctggtttggttggtttggtttctagggaaagagaatactacataatatttttgtgattttctagaatttaccttatttatatttattactgtctatgtcacttacatttactttatttatatttattactgtccatgtcactatagtatgtacttactatactatataagtgacatggacataatgcatataaatatctgatcacttctatgaatttatattttagaaatactttaagtggacagggtttgattttcattttaatagctctgatattggtctttctcttcccattcaagagttttattttgttcatctcaaataat

SEQ ID NO: 242793 - DNA, 425 bp, Homo sapiens
cgataaaaatagcaataaaatctttgcaaaaggcatgcatgcatgtgtatttatatgcatatgtgtgtgcacatacatacgcacatctgtttcctagttctgttggtagtagagggggagggtgcctgggaacagcagtattccaatagcagtgagtgtatcaggtttctagatcttggcttctatatcccattttccactaaaaggaaccccagctgcttggagaaatggctgattataggattggagcaggaatgtttaacatgagcctggaacatcttgggttagaaagcaaagaagtcttcaaagagtgatgaaaacatgccaaaaggacccagagtcagtttgaagcggttcccactggccaaatctgagtttatttcaaaatttaagaagtgatagtcatggattagaacctgctgagt

SEQ ID NO: 242794 - DNA, 919 bp, Homo sapiens
ctattgtttgtttgttttttattacctgaaatttttctcttacatttattatttcatcttctttctttgagaataacttcctgaaatatatccttggtttatccatttttaacaagtgttcttttaaaatgtatgcatttaatgctatagatttttcactaaatactgtcctagctatacccacaacattttatatgtaatatttttactatttaagtagtctcttcgttatccagagattggctttctgtggtttccattatccataattaatcgcaacctaaaaatattaaatgaaaaattccagaggtaaactattcataagttttaaactgcgtgccattctgagtgatgcgatgaaatctcacaatgtcctgattcttcccactgggaatgtgaattgtccctttgtccagggtatccacactgtatacactgcccatctgttagtcacttagaagctgtctgggttatccaatggactgtcatggttttgcagtgcttgtgttaggtaacccttactttacttcataatggccccaaagtacaaaagttgtgatgttggcatattgttataattgttctattttttttattattgttactaatctcctagtgtgactaatttatcaattaaactttatcataggtgtgtacatgtaggaaaaaccatcatgtacatagggtttgacactatgcatggtttcaggcatctactggggttcttgaaatgtaacccccatggataaggggggattaccgtcatcagttatttttcttatgaaatggtaggagttctttacattctggatacaagccatttactagttatttcataaatatttcctcttactttgggtcattctcataatgatattttgataaacaaattttaaattttagtatgattcaatttgtg

SEQ ID NO: 242795 - DNA, 519 bp, Homo sapiens
aattgatttcctcacatacattttttttcctacttttccaaagtaagtttttcttcccaaaaaggtttaaatgtcttaaaattaattttgcaccaacctaatattatagccaagcaaccacaacctattataaaaaagttctcgtccttggccacagaattctattattaaaataaacatttctgtgacgcaaaaggacttacttttagaaaacacatctatcttgcataaattccatatgtttcacattttaaaagatttatctaagtctaatgtcaagcttatttttaggtaggattgtgcggctgactttcctgttcaaaagtaaagttggagctgtttcaaagagtaactttattctgcttgcctgtggctgtttgtaccacagaaggcagatttgtcaggtgcggtggctcatgcctgtaatcctagcactttgggaggccaaggcaggaggatcgcttacagccaagagttttaagaccacccagggctacaaagcaaggcccccatctctac

SEQ ID NO: 242796 - DNA, 417 bp, Homo sapiens
tatactaaccttcttattcatcatttctgcttcaattcatttgtttgtgtggattcagagttaccatctagtgtaatttccttactctggcacagatttgttcctctgtcttttttttttttcccctgggagtctcactttgttgcccaggctggagtgcagtggcaccatctgggctcactgtaacctcctgcctcctgggttcaagcgattctcctgtctctactaaaaatacaaaaaaatagccaggcatggtggagtgtctgtaatcccagctactggggaggctgaggtgggagaatcgcttgagcctgggggtcggaggttgcagtgagccaagatcaagccattgcactccagcctgagtgacacagtgagatcctgtctcaaacaaacaaaacaaaacaaaaaagacga

SEQ ID NO: 242797 - DNA, 345 bp, Homo sapiens
attccaagtgctggtgaagatgtagggtaaccagaacttacactcatggctggggacagtggaaaatggtacagttactcgagaaaaccatttggtagttgattagattttacatatatgtgtgtgtgtttgtgtgtgtctactcctataaccagctcccaagggaacccaagagaaaggaaggcacaccacaacaagacaggtacaagaacgttcaaagcttctgcacagcaaaggaaacaatctacagagtgaaaagaataagacaaaatatttgtaaactactcatctgatggggggattaatacccagaatatacaaagaactgaaatatctcaacggcca

SEQ ID NO: 242798 - DNA, 379 bp, Homo sapiens
gagagcggaaaatcaagtactcgaagctgctgtccatggaggtgagtgacaccagtgactctgagcaggggacagaacaggactggcttgtgaaggccatgagggaggaacactcagactgaaagggctgagaaatccagagtgtgctgatccagcaaggaacgaatggactgaacaaaactcagcctgctgaggacagaaacctgccctggactgctgggagccggggaagagaggatgggtctgtgctgaaggcccaacaggatcatctcattgcatgattttctttacttttgaagtaaaaggagatttaactttttgccaatcttttttagataatggaggaagaatacatttgctttttaaaaagttccctcta

SEQ ID NO: 242799 - DNA, 367 bp, Homo sapiens
ggaaattctagagctgaaaagtataataaatgaaatgaaaatcatttaaatgtactcaacaattctgagatgaaaacagaacatttgaacagaaaatgcagtgaatttgaagatagatcaagagagaatagttaatcaaaagaacaggagccaaaaagattgaaaaataatattagatgtaatgaaaaaaagaacatgacagaaaaaatattgaagaaatgttggccaaaaatttctcatttgataaaagctactaactgagagatctgctaagctcaacaaatccaactgggtgaagcccaaagaaaaccaaagcaaggaacattatagtcaaaacggtaaaatcaaagattaagagaaaatcttg

SEQ ID NO: 242800 - DNA, 669 bp, Homo sapiens
tgtctgctgagtacctcctctgtgccaggagctgtacatgctgggattcagggtctctttgtaagggtggagctaaagaggttttgattgccatcttgcttctttggtttcctagtggagttagggtagggtgtcatgaagtgaccatatccttggagtaattgggtttctatctctttcacagcccttattcccatcacaacaacttgagctatagtcatgttgatttttaacaatttcagcttgggtaggaaaagagaaactagaaatagcaaaaagcaatgagcaaatgttgtattaggaaagtttaaaattaggaatactaatcttttggtggagagataaaaacacctcatttcctgaaagtcttaagattagagcagcagaattctggattgttatactactctaatcctagaatctaacacagagcttctgtagagttcagtaggtatttgtgaataataagtggcctctcatttctctccttactgggaattctgccacctgattggtgcaggccttggcaacctcctaggaaagcaatggagcactattggctgggggttctttgggattccttgtcttagataccttttccagcccaacactcccaacaggaaatgatggttcatgtctacagtgattcgacacgttatcaggatctct

SEQ ID NO: 242801 - DNA, 724 bp, Homo sapiens
tgtctgctgagtacctcctctgtgccaggagctgtacatgctgggattcagggtctctttgtaagggtggagctaaagaggttttgattgccatcttgcttctttggtttcctagtggagttagggtagggtgtcatgaagtgaccatatccttggagtaattgggtttctatctctttcacagcccttattcccatcacaacaacttgagctatagtcatgttgatttttaacaatttcagcttgggtaggaaaagagaaactagaaatagcaaaaagcaatgagcaaatgttgtattaggaaagtttaaaattaggaatactaatcttttggtggagagataaaaacacctcatttcctgaaagtcttaagattagagcagcagaattctaaaattaatagaatagaaagaaattgtttggttacagtaaactccatggcagtagggattgttatactactctaatcctagaatctaacacagagcttctgtagagttcagtaggtatttgtgaataataagtggcctctcatttctctccttactgggaattctgccacctgattggtgcaggccttggcaacctcctaggaaagcaatggagcactattggctgggggttctttgggattccttgtcttagataccttttccagcccaacactcccaacaggaaatgatggttcatgtctacagtgattcgacacgttatcaggatctct

SEQ ID NO: 242802 - DNA, 392 bp, Homo sapiens
actgtatgtctactgtggtaggctcttgtgattcatcggttaaccaaagatcccatcctcttagaacttatattctaacaggtgagcaatagatacaataaataaattgcagctgggcgccgtggttcacgcctataatctcagcactttgggaggccgagacgggtggatcacttgaggtcaggagtttgggaccagcctggccaacgtggtgaaaccctgtctctactaaaaatacaaaaattagccaggcatggtgttgcacgcttgtaatcccacctactcaggaggctgaggcactagaatcactacaacccaggaggcagaggttgtagtgagccgagattggaccactgcactccagcctgggcaaaagagcaagactcagactc

SEQ ID NO: 242803 - DNA, 1005 bp, Homo sapiens
atctggtaagattttcataacacagcaaggttatctctaatcctaggagatccagaaagaaaaatgaaatgacaaacccatcatgtattttaggctatggtttttaatttagtgaagttttctgatagcagaatttgttataactactggttcaagtatatgtcttgttcactaaaaacagccatactaaatttgtaactataactcagattgtttaaaagaaattcaattaagtttaaaatcaattttaaacctcttacctatcaggtagagaacaaaaaacactctaagaattgctagtagaactaaaaattaattagccagccatggtggtgggcacctataatcccagctacttggggagctgaggcaggagaatcgcttgaatctgggagacggaggttgcagtgagctgaaattgagcccctgcactccagtctgggccacagagtgtgtcaaaaaataaaaataaaaaactgaactaaaatttggcatgatgtttatggagggataatctggcaatttgtatcaatgtacatacctttaacctcaaaattcacttgtaggaatccatcctagagatatactccaggacataagctacatgaggacagggattgatttgttttgttcactgctgcattgccagtatatgcctgctacacagcaggtactcagtagccatgtgctgaatgaataagtgggagaatgattgtgagaggtcacatatgcgcagttattcagtacagcccttcttggattcttgtaaacagaaaaagaacagaaatacatagtgcttaggtgagtaaattatggcacatattacaattctatacaataataaaacaaagaacaaagatgttctgttaagatacataatgatttcagtaaactatcattaatgtttaaaaaaacatcatgaatgtatatatgtactttctaagaatttctctgggaaaatatgagattgataacactggctgcctcgagaggtgaattagaatg

SEQ ID NO: 242804 - DNA, 320 bp, Homo sapiens
gccgtgtaaatttatcagaagaaaaagaaatggaaatgaaactgaaggaactggtcaactcagataaatgtagtttttttctcactaaaaatcagtttctagaacatctaggaaatcaaagatgatgaaaaatattaagatgttttatatatatgtaaaagtctttacagctgattgatcatctcatgcaaaatttgtacagtcactgcaaataaagtcattgcaaaatctttactccttttgctttttgccaacactgacattggcctttacagtctcttgacttcattctgcccttgcatcccttctgttgtcttctc

SEQ ID NO: 242805 - DNA, 494 bp, Homo sapiens
ataatagtaaaacagtacaggatgccagaaggaagggaggagaggggataatactactatactgatgaagtagctagaagaaagaggagtgcttaaggaaactatccagcaggctattcagactgacctctcatttggaacagttctaatgagccttttcagctacaagtgatggtgactgacagttacactgattggagcctgtggcaataggcagtaagtgccatttagggttttgggcacagcatttgcctgacaccgctgcctggtatactccatttaagcagcaattgttggcttgttagtgagtgcttttggacacttagacactaacaaagaaagcatcagcaggtattgttatattctgacatgtccattcttggatggatcaaaaatgaaaacatcaacaaagaaggtaatgctcagcgagcatccattatttaatggaaatggtatatccaagaaagaagtaaactggacatattattattatt

SEQ ID NO: 242806 - DNA, 460 bp, Homo sapiens
gaccgagtctcaccttgttgtccaggttggtcttcaacttctggcctacaccaaccctcccaccttggcctcccaaagtgctggattacaggtgtaagccaccacgcccggctgaattgtacactttaaatgggtgaattgtgtgacatgtagataacatctcaataaagctattgccaaagaagccaaaaagttcttaccgcaaagccctgtgtgagtggctgttatacagcagagtctacgatggggtctgaaaccttctccctgcgttaggaggcctgcctctcccggcacttttcccatttcttggctactcagagatgcaccagccacttcacctgtggctcagctctataatcgacccctgcttccaatccccacgtcctccaagcagaaatacgcctgcccaggatcacaggtaccctagctgctaaggcctccgtggtaatgagcccttatg

SEQ ID NO: 242807 - DNA, 294 bp, Homo sapiens
cctctgtttttaaaaattaaattaaaaaaaaaaaaggcttcagtcagcctttaggcagacacatcatttttaagacctaggtaataattatatttaaaccaaggtgatatggaagattgccaaatcactcagctcagataacctggtgaatagtggtggctggcagtgcccatgatttttcaaggagtttgagcagcagactttcttagaccacagactgtggcccaggatgaattctccccagcccggaatacctgcaagtgctttgtagtaggggaaatgctgaaccgagta

SEQ ID NO: 242808 - DNA, 428 bp, Homo sapiens
ccaacttgctttctccttgtgatgcccagttccctctctctcagtagcgccgagccacagagcacggagggcgtgagaagagctggggccccacatgaggttgccatggcgcggggcacaggggagcctttaagcaggggagtgggatgggcgcggtgtgacgcctgtataatcccagcactttgggaggccgaggcgggtggatcacttgagctcaggagttcaagaccagcctggccaacgtgatgaaaccctgtctctactaaaaatacaaaaattaaccaggtggggtggcgcatgcctgtaatcccagctactcgggaggccgaagccggagaattgcttaaacccaggaggcggaggttgcagtgagccgagctgagattcattgcactccagcctgggtgacagagtgagactctgtctca

SEQ ID NO: 242809 - DNA, 640 bp, Homo sapiens
gtttgttagactttcccctattctgaatcaggtgggagcacagcatggccgtgggaacgagtgctctcagcaaggagccgtggtggaccctgcccgaaaactttcattctccaatggtgttccacatggaagaggaccaggaggagctcatcttcggacttgatgacacgtaccttcgctgcattgagctgcacagccacacccttattcagctggagaggtgtttcacagctacaggccagacacgtgtgactgtagtcggaccaccaatggcaaagcagtggctgctgctcatgttccattgcgtggggagccaggactccaagtgtcacgctcgaggtctgaagatgctagagcgtgtccgaagccagcccctgaccaatgatgacctggtcacctccgttagcctgccaccgtacaccggagactgatctcccctgggaagaggggatgagaggagaagtcttggcttcgcttttggtgagaaagacatgaaaaacactgaagaaagtttgaatttgtggccagacctgcccctctcaggccttctaggcatgtgtctgagggaagtctcctgagtgttagaagtgttattggcaaagcaatccaataaaataagctacctatgatgcaaagcctt

SEQ ID NO: 242810 - DNA, 217 bp, Homo sapiens
tttacataaatcatgatgatgctgaaaggtaccaacccatttttgttttgctctgagccgttggaattgcatacaggaatttgttctggagtcaaaggtgtagtgttccctttgaagtcagtgagagctcctgcttagatcaggcctgtgaggaatggagcaaaaccacatacaggcaaattcccatcctttgcccattaaaaacaaaacaaaacaa

SEQ ID NO: 242811 - DNA, 488 bp, Homo sapiens
gatgatattcttcactcctcatggcccctgcatggattattttctttgtttctctaacctctacttctccaatagactgttccaaaaaggaaataaagagataagcaatatatttttcttagtaatttttttattaaccctattctaattctggttttcttctcttctataaactttgcatttgttgctgatattcatcatgctactatctgaagcctcaagaaacagtctggccaaaaagtctttagacaatggctcagggccttttgtcttataaaattcaacctgcagtgaaattccattgaaagatatattcttgttgtagtgcccaaccctcaaatgaatattcccgaaggatctatctttgtttgtttcatagtcttacactcatgacttcaagtgatatctcccagtctacgtctataccatgtgctcttcatctgacatacacacttgtttttctcttgattgattatctcagccctaat

SEQ ID NO: 242812 - DNA, 301 bp, Homo sapiens
ttcattagaggcaatctaaggccccggcgcaagcctgaagactctgcttctgctggctccccgccggggctcctgccgtccctcttggctctgccctgtgctccaggcccctgccctgccctctcctgcaatccctctctttcagaatgggaggcttaagcaatcaggaggggaagtatggggacaaggagactttcgggactgtggacatgagcaagaactatctgaaggctcgggcactgggacagggtcacagtgccaggctccctttctacaagcagcacctctagcagctggtggt

SEQ ID NO: 242813 - DNA, 459 bp, Homo sapiens
gagcctgtgagttttgtgcatctggagctaaggtgttctgcccaaagtgttggaggtgggcctcaggcaacaaataccctgcttcctcacatccccttttcttccttggagcttgggcctgggccctcacctagtcaggcacaggcctccactcccccacactcacctgtccttcctgaaagtcagccactgggctccacgcaggggtgtcacagtcagagccctgctccagcctcagacctggggcagtcactggaaactcagaagagagaagacaagacaatgaaagtttcccattcaaggaggcatccagctgttagttctgccagcaaaaatgccagccagagagctaaactgccagcaaaagatatttggatggaactttggaggccattaagagcaggcactgcaaagcaattgtagcgaaaagatattaaatgaatccatcacgtctctaaa

SEQ ID NO: 242814 - DNA, 367 bp, Homo sapiens
tctctgtgtgtctcatccagagagagacagagtctgccttgaatcagaggtcatgtggccgtccccgccgggccgaacaggttgcaggagcccttggctttccttcacagagagggcagacaggaatctgcacgcgctaagggaagtttgggagctgcgacgcgtctatctgagcaacgagttgagccttctgataattggcactccttataactcctacagtggcagaattgcctcctgtgagctccgcaattcctcagaacaaatcacctgaatgtctctgcaaatagcagaccatgaggagtgtgaggaggagtggagggggacacaagtgggaactaataaaactcttgttaaagggcctgct

SEQ ID NO: 242815 - DNA, 431 bp, Homo sapiens
ccggagccctaatcacttttccacatgcgcctccggcccggcgcgcgacggggaacgagctgggagcgcccgcgcagccaggaggggggctgggccgcgggaacgctgtccccctcccaggctggaaggcggggataattccccctgccgtgcagcccttctagacggcgtctacccctttaagaaaaatctaggcggaggtggggtgcgacagaaggggtggtgaggcgagggtttccctccctccgtctgctatacccgtctccctcgctccgtctcactctccgtctttcctctccttcttttcctctgtttttcttttctttcaacacaaaagttgggttgtgaattttccgaggtcgccgccgcctcgcccccaccccccgcctctgatctgcctaactataattaaagtgcgttttttgtggcat

SEQ ID NO: 242816 - DNA, 456 bp, Homo sapiens
cacaatgtgtgttaaataaacaaaagctttcttcaaacagaattcccctaagcatttccaggttgttccctgtccagacatagatacaccctgtgcagtcatagatactgttgaaagattcggaaataggaatcaggagccctggagtaacaggcccccagaaaatcagagtggaattgttagtccagaagcttgacaaacatccaccttcattgtcttccaactgtatctctgacttccctctccctagttcattacatcccagtcatattgatatcgttgctgttcttgaacacattaaggagaggcgaatagggtttttagctgctgaaagttagactcgtggctagagaccagactaagtccttttccttcatgtggaggttatgattaggattgtcagagagagttagggtttaattttttcattaaactaataatatgttttgagtatct

SEQ ID NO: 242817 - DNA, 403 bp, Homo sapiens
tcttctcaaatatatgtaataagactatgaatagaagggctgaagacggaaagggtaggatggacacaccacaggctgttgaacaactggcttggagaagcttctgagcctgagtggagaaggacaagaactagaggtgagctattcactctccacaccatgtgacagctaggttcatttgaaacagcaattaagcaatacagaggaccaaacaacattgactaagttggaaaataaagacatatgaaagaaagtctttcagaaaacaagtgcaaggtgttagaagtcatctagattgaagacagagaaaaagtgacaagaaatatttcaactgattcttaggaaggctgctctgcagaagcaaaacaaaataaacaaaaccaaaaaagtaaggaatgccaaa

SEQ ID NO: 242818 - DNA, 541 bp, Homo sapiens
ctaccaacaccttgattttggacatctaggctccagactgtgagacaataaatttctgttaagtcccccagttgatggtactttactacagcggatgtagcaaactcatacaaggactttcatctcctttgctcccagaggctgacgctctgctctgttcggagaatctgccatggtgcaaaccttgctgggaagcagagccaccccgcacctcactataaaagctgaaagccaagatttccctctcccccacccctggcagatgatgctctgttccagggcactggggctagagcactgggcagtttagaatggattctttcgttgcctgcagtggtggctcctaacctccagttgtaatgatgccaggatgccacccagcatttgccagaaacctgaccttggccgtacatctggccatttggtttcacttggttccttccccttttccaagcccaatcctgcagacttcccatggattctgtaagcacctcagcaaacgaggacatcagtgcagatcaataaaaagccgagcatccca

SEQ ID NO: 242819 - DNA, 614 bp, Homo sapiens
tcttttcggatacataaatgtctcaagactacccctcaggaagcaaccggaggttgtacttcactaaaataaaggagaaatagaaaagaagataacatgggacccagcacaacaggcagggagagcccctgagcataagggtgaatggggagctcaggaggacagctgggcagcagacctccagggtgccccatccagatggaatcagggagatggagggctcctgaggtatgtctccatgaaaatgatcatatggagaaatgacgtgatctgtctaaatgtactgcaaagagatttctatttttggcagaaaatttggatgaattaattatataatagatgcacaaaaaactaaagaaagagaagaagaaaaaaaaaaaaaaaaaaaaaaaaaaaaaaaaaaaaaaaaaaaaaaaaaaaaaaaaaaaaaaaatgaaaaaaaaaaaaagaaaaaaaaacttcagggggggccccggtccccatttcgccctatagggagccgaattccaattaattggccgtcgtttaccaacgtcgtaacgggaaaacccttggggtaccccaatttaatccctttgagtcaaatccccttttccccagttgccgtaatacca

SEQ ID NO: 242820 - DNA, 555 bp, Homo sapiens
aattcggcactaggcataaagcaaacagaatcatcacttctactgcagcctaaaggtgttgataattatccagaaaagcaaatctcctttctataaggttcagcggtttgagagttgtgatggggaaggcactccttcggaaatcatcctcactatctagagatatttcagggctggggtactctcctgtgaacaataggaaaatacatacttaattgaaagtaataaaccagggttctgacttttttttttttttttctttgagacggaatttcactctcttgcccaggctggagtgcagcagcgctatctccgctcactgcagcctctacctcccgggttcaagcaattctcctgcctcagctctccagaatagctgggattacaggcacccaccaccacgcccggctaatttttttgtgtttttaatagagacggggtttcaccatgttgaccaggctggtcttgaactcctgacctcaggtgatccgcagcctcagcctcccaaagtgctgggattacaggcatgagccaccgcgaccagccctgactctt

SEQ ID NO: 242821 - DNA, 323 bp, Homo sapiens
gcttgccggcccacccctaacatgtttgtggggacccagtcagaacaggcttatcaatacagggccatataccatctgtttaaaccagtggttctcagctgcagacaattttgcccacacaccgcccccacccgccgccggggacattcagaaataaccggagacatttttttggctgtcaccactggggagggtgctactggcatctggtggttggaggccagggctgctacactcctcacctcccaagcaaagaattatctgaccaaaaatgtcaataggctgagaaaacctgtatctaaactattaaaagctgtaaatcc

SEQ ID NO: 242822 - DNA, 455 bp, Homo sapiens
caaatgtaggctataatgacatatgagacattgtttagaccaactcagtaatcataggtataatcttggtctttttaaaaatttcaagccgaaagcatgagtttagagtacaagggaggaaaagttagcaaggtttaaattaaaatgtgtattctagatctcaacctagatggtttagcctctgtgattacatgagtttgccagtctgaattagagaatatgacacatgtttggggagggagaaggaggatgggtaaccttagagatattaatcaatgatttgtaagcggtaaatctgaagagccaactacaaaagggagatgagggtgatatttctgtctcctgttagaagtattacataaatgcagaattagtgataagaaaaataatttcaattttttatcctctgtcttgtcctgtttgctaagatccttctccaaaggggtactggctct

SEQ ID NO: 242823 - DNA, 394 bp, Homo sapiens
ctgtctcggtggccccactgacatcaggaaacgtttagtgcctgagaagtgtgacctctgacgagttacgactcctcctgaggcctccatttcacaaaccttccaggaccgctgtcagaatgaggtgggggagtagactcaggaccgtgcaagcccatgggatgagctcacagccatgagcggcatggtctaagggaagaaggaaagagaagagaagagaaaagttggctctgctggtctctccctctgggttgttccccttgtctctgtgctcttctctgtctctgattataaaggactcagaatctaaaggataatagatgcagatggatggaacaataaatcgtgtggactgttgataaaacctttgtgcttgaagaaaatacaactgtgt

SEQ ID NO: 242824 - DNA, 840 bp, Homo sapiens
tagtaaagttatttcctctgatgttgtaatggggcagtggggtaacgcacatttgcctgccagggtatgcaaagtaacttacatcatgctatcagcaaaatgagaataatatagtggctagagtaagaccataaaagccaaaatacagaaaatccaaagctgaaggttaaacagaggtaacttcagaacaaataagccacaacggactctagatgtcagtgttgtgccaaataacagcaccagggaagatgtgggcaacacatctactttacaagcacgtttgtaatactgattttttttcttttcttttttttttttttttgagacagagtctcgttctgttgcccagggtggagttgcagtgagctgagatcacgccactgcaccccagcctaggtgacagagcaagactgtctcaaaaataaataaataaataaataaataaataaaataaagtgtttcttttaaactggtattgcctaaggtgtattctttataaaacttagaattgttaaatattttaagattcctttgaaagtgtttttgcattgatggtttaaatcagtgatatcaaactttcctgatcctatgtgcccagaaaaatgggcaggggaaaggaggcagcatggaacctcatttttttgtgtgtatctgtgtgtacacgtgagtgcacatgtgtatatgtgtggggccacatgtgttttgtatacggtatatgcatgaaaatgtacctttgtaccttatacacaaaaacaaattaaacaatggcataagcagcaatataaataaaaaatgctaatactttcctgccatattccaaaataaactgtcttgtgtaca

SEQ ID NO: 242825 - DNA, 853 bp, Homo sapiens
tccttttgtatcatgcgcagagcctaaaaccattggccaaccgtcacgcaactgccagtaaaaatattttccgagaagacccaataatcgcgatggtactaaatgcaacaaaagtatttaaatatgaatcctcagaaaatgagcaaagaagaatgtttcatgctacagtggctacgcagacacagttctttcatgtgaaggttttaaacatcaacttgaagaggaaattcattaaaaagagaatcatcattatatcaaattattccaaacgtaatagtctcctagaggtgaatgaagcctcttctgtatctgaagctggtcctgaccaaacgtttgaggttccaaaggacatcatcagaagagcaaagaaaattccgaagatcaatattcttcacaaacaaacttcaggatatattgtatatggattatttatgctacatacgaaaattgtaaataggaagacgacaatctatgaaattcaggataaaacaggaagtatggctgtagtaggaaaaggagaatgccacaatatcccctgtgaaaaaggagataagcttcgactcttctgctttcgactgagaaagagggaaaatatgtcaaaactgatgtcagaaatgcatagtttcatccagatacagaaaaatacaaaccagagaagccatgactccaggagcatggcactaccccaggaacagagtcagcatccaaaaccttcagaggccagcacaaccctacctgaaagccatctcaagactcctcagatgccaccaacaaccccatccagcagttccttcaccaaggtacaatatcctgggtcccatgactcttatctcccaaatataaattacaagga

SEQ ID NO: 242826 - DNA, 1264 bp, Homo sapiens
tccttttgtatcatgcgcagagcctaaaaccattggccaaccgtcacgcaactgccagtaaaaatattttccgagaagacccaataatcgcgatggtactaaatgcaacaaaagtatttaaatatgaatcctcagaaaatgagcaaagaagaatgtttcatgctacagtggctacgcagacacagttctttcatgtgaaggttttaaacatcaacttgaagaggaaattcattaaaaagagaatcatcattatatcaaattattccaaacgtaatagtctcctagaggtgaatgaagcctcttctgtatctgaagctggtcctgaccaaacgtttgaggttccaaaggacatcatcagaagagcaaagaaaattccgaagatcaatattcttcacaaacaaacttcaggatatattgtatatggattatttatgctacatacgaaaattgtaaataggaagacgacaatctatgaaattcaggataaaacaggaagtatggctgtagtaggaaaaggagaatgccacaatatcccctgtgaaaaaggagataagcttcgactcttctgctttcgactgagaaagagggaaaatatgtcaaaactgatgtcagaaatgcatagtttcatccagatacagaaaaatacaaaccagagaagccatgactccaggagcatggcactaccccaggaacagagtcagcatccaaaaccttcagaggccagcacaaccctacctgaaagccatctcaagactcctcagatgccaccaacaaccccatccagcagttccttcaccaagaaggatgaaacccacccaggagcacagtcatcgcctgcaaactttagaatcacctcaccaactgtggcccctcctctttcttctgacacttccaccaaccgccatccagcagttccttaaataaggtcaccaaggacaaggatatcaaataactactgttcaatctttactcaagtgtggaaattttgcctgaagtcctccacctaaaaacctgatgccattggtaatgatgtttatgaagataagatcaaagcacagaaaataatatatgtatatatatgtatatatatctggttgaaatactatatatatatatatatataccagctattaattctaggaaatggagtattaagggtgcattttatttcattagttttacttttatgcattttcttcatatcatattttgcattcagaattttcataatttgaaaaaaaataaactttttttttcttaaaga

SEQ ID NO: 242827 - DNA, 1139 bp, Homo sapiens
tccttttgtatcatgcgcagagcctaaaaccattggccaaccgtcacgcaactgccagtaaaaatattttccgagaagacccaataatcgcgatggtactaaatgcaacaaaagtatttaaatatgaatcctcagaaaatgagcaaagaagaatgtttcatgctacagtggctacgcagacacagttctttcatgtgaaggttttaaacatcaacttgaagaggaaattcattaaaaagagaatcatcattatatcaaattattccaaacgtaatagtctcctagaggtgaatgaagcctcttctgtatctgaagctggtcctgaccaaacgtttgaggttccaaaggacatcatcagaagagcaaagaaaattccgaagatcaatattcttcacaaacaaacttcaggatatattgtatatggattatttatgctacatacgaaaattgtaaataggaagacgacaatctatgaaattcaggataaaacaggaagtatggctgtagtaggaaaaggagaatgccacaatatcccctgtgaaaaaggagataagcttcgactcttctgctttcgactgagaaagagggaaaatatgtcaaaactgatgtcagaaatgcatagtttcatccagatacagaaaaatacaaaccagagaagccatgactccaggagcatggcactaccccaggaacagagtcagcatccaaaaccttcagaggccagcacaaccctacctgaaagccatctcaagactcctcagatgccaccaacaaccccatccagcagttccttcaccaaggtcaccaaggacaaggatatcaaataactactgttcaatctttactcaagtgtggaaattttgcctgaagtcctccacctaaaaacctgatgccattggtaatgatgtttatgaagataagatcaaagcacagaaaataatatatgtatatatatgtatatatatctggttgaaatactatatatatatatatatataccagctattaattctaggaaatggagtattaagggtgcattttatttcattagttttacttttatgcattttcttcatatcatattttgcattcagaattttcataatttgaaaaaaaataaactttttttttcttaaaga

SEQ ID NO: 242828 - DNA, 460 bp, Homo sapiens
tggccttactcccctcttgatggtgtcctgtggaggcatcccctgccctaaaaagtacaagatccccaaatacacggcctctgacactggacagacgaggtggatggtgacctacgagccacgtgtgctccctgccagggagaagggtgccacctgccactcagggccacgtaggggtgcgctcaggcacagaggaagccagcagccctggggaaggcaggccttgtagtaacaagagggtgcggtgcccctggtttccaagggaggatgtggcttgtgtgagtaattcctgggcttgcagggaggggagaccattaggtggaagaccaggtgggtgctgctggtccagctgagaggggaacgcacccgtggggaacctgggtgggggcacatctggagaggacttctgagccgggtggagctcaaagaggtgaaggtggtgcgcgggatgctgccttat

SEQ ID NO: 242829 - DNA, 824 bp, Homo sapiens
ggcagcctggctcactgtggtggccccatacctgcgcacagtggcttctcaggaatggctggggaaggagcaaatgggagtggccgagagctggcaggtgcaggccaccagggccacatggccccttcctgtcagcagatcccaccaatgaggagcagagcacagggtccctctcgggtccaaagctcctgactctgagccaggctgagggtctcactggctgtgggaccttggctgtcacacctcagcctcccctctgtaaagtgggcttgatagcagtaccccagggtgaaatgcagccagggcacaggcccgggctctgtgaggctcaagagccttggggaactgtcattgtccctgtgtaagcatttccagaaggtgctccctggtgaggctgtgtgggcagagaagcagggaggcctggctccccagaagcaggtcagctgtcaggcaggtggccaggactcagccagaagcttctgcagcaaactggataccgcctcagaggccaggtcctccacggcaaagtactccagctcagggccagggcctccacagcagagtactgccggcaaggggctcggacagcgcgtctactccctcgcggtcccggaggctggagtccaagatctcggtgccacagggctggtttatcccgagacctctctcctgcctggcagacgccagcttctcgctgtgtctgtgtcttcatctcttcttcatataaggacaccagtcccatgggaccagggcccaccctaatggtctccatttaaataaatacctctttaaggaccccatctccaaatacagtcttatctaag

SEQ ID NO: 242830 - DNA, 360 bp, Homo sapiens
atttcatgaataattcattaaaatttcacatctgcaagattagtcatccaaataaaatgctaatgtcaaaaacatgcaccgtctataatattctcatcaagaaatctttttgcatataatgataaatgcttagattagaacaaatgattttataaaaatattctatcaaaagtatgctagataattgcattcattgaagaaaacagaacttcagtacctaaatattccagaaaaaccatcttaattttgagattttaaaaaaataattagatgcatttaggaaatgtgctgtttctttttaatattactctatagtatatattctagggattaatgaatttgagcatcacctttcaataa

SEQ ID NO: 242831 - DNA, 402 bp, Homo sapiens
ccctgggagccagtctcctacaggaagcacgcattctggttggtatccccgtgccgtaagtcctgcaggggccggtgaggggaggcctgggggctggctcgtgtttgggtctggggctcagcctcagaggcccatcgctgctgcttccccatcctctcccccagcctgctgcgtgtctgcctggctccccgttggttctggagctcctgcggaaggagaggtgctgattttcaggattcctaaagcagcctccgcccgtgccaggggattcccatgccctgtgccacgtgtcccagcctctggtgccatgcctcacaatcaaccacttgcaactcttttaggcttttttctttgtatttatctttatgttcctaataatatgctgttgtaattagcccttat

SEQ ID NO: 242832 - DNA, 935 bp, Homo sapiens
ctgaatgctattttaactcacattggctgggtgcagtggctcacgcctgtaatcccagccctctggaaggctgagatgggaggattgcttgagtccaggagtttgagaccagcctggccaacatggcaaaaccccatctgtacaaaacatttaaaaattagccaggcgcgttagtgtgtgtctgtggtcccagctgctcaagaggctgaggaaggaggttcttcctccttccgaggctgcggtgagctatgttcactccagcctgggcaacagagcgagactctgtcaaaaaataaattaaaatatctgattatctggcttcaatgattttggctcctgtgcttgtggtaccatagtggtacaaaaattttcatagtttgaaaataaaacaggtattttgccagtaaaaaaaaaaaaaaaaaaaaaaaaaaaaacatcttttttgggccgcctcgggccccagaaaagagtttttaaaccccactcttttgggcccgcggccccacggggtaaggggaacctgggcccaaagggggctccgaggaaaaccccgggcaccgaacatatgggctggggtccccccccaaataaaaaccgccgggggaaccccggagcgttgcgaacaaccccaaatgggggctcgggaggcctagacgggggcctaaacacgggggcccaaggaggacagaaaattaatccgccgcgcgtgtgcagtgtagagagtacgagcacggtgaagcaagacagagaggacatagcagagagagcgacgacagaagagcgcacgacaggaagcagagcgacgcaagccaacacacaaagccgcaagaaacacggcagccatgaagtagagagaagacagaagctaaccgacgagtacgagcggacgcacctgaacgcagagtactaagcagctcgcaacagagcagacacag

SEQ ID NO: 242833 - DNA, 702 bp, Homo sapiens
ctgaatgctattttaactcacattggctgggtgcagtggctcacgcctgtaatcccagccctctggaaggctgagatgggaggattgcttgagtccaggagtttgagaccagcctggccaacatggcaaaaccccatctgtacaaaacatttaaaaattagccaggcgcgttagtgtgtgtctgtggtcccagctgctcaagaggctgaggaaggaggttcttcctccttccgaggctgcggtgagctatgttcactccagcctgggcaacagagcgagactctgtcaaaaaataaattaaaatatctgattatctggcttcaatgattttggctcctgtgcttgtggtaccatagtggtacaaaaattttcatagtttgaaaataaaacaggtattttgccagtaatgtatttctttctgccagcagccaagtcccaaaccactttcccctctgaacctctgcttacctaaatggtttcaaaattaatacatgctgctttgatttggcagcacacttaatatactgctgaaggaaaacttgtgttgaaagtctttaagataaaaatggtgtgataggccgggcgcagtggctcacgcctgtaatcccagcactttgggaggcccaggcgggtggatcatgaggtcaggagatggagaccatcctggctaacacggtgaaaccccgtttctactaaaaatac

SEQ ID NO: 242834 - DNA, 484 bp, Homo sapiens
atattcccagttttgctttgctttagctatggtgtactagaataagctcacattggctcacaaaaaataactgttaaattatcacaaattttgtgagctaagtgaaattatgttatagcttggaatcaaccaagatttacaccacagaaacaaatgctgttaatccgggttttttaaatgttttctggagacctagctaaacatttaccataccactatgttagcaattgtaataagtatgtaatagtacctcattatcacttcaatttgcattttctgaatgactgtattttcatgggcttatttgtcatatatttttgatgaaatgccttcttaaatcttttggctatttttaaatctagttgttaagttttgacagttttttatatattctagatggaagtcattattggatatgtattttgtgtaaatattttttgcacagtccatggcttgtcctttcattttaaacagtgtctttcaa

SEQ ID NO: 242835 - DNA, 566 bp, Homo sapiens
attctatatattcgggatttcaaccaccaacctatctggtttttcccgctgaaatgttgggtgatggaatcaggagagcagatttggagactctttatattttataattgagagagacaaagagaaaaccgtttgatttgaaaaagttttctaggttccctcaggtagatggaaattttcatcaaaaacagtttattcaaggtacatagcctactagtttcccatttgagagtaccgcagaatgatacgacgtgtactgcttctctacgcagaatgaagtataaaattagcaccaaatagtaactttaatttgtcaggtgctaaactttttacatgctttatctcatttaattcttagaagaaactaattttacaagtaagtgtctggaccaacatctgcaggtacaaagcctgaaaagcgtaagtttgactcctacatagttctcttttgtaagtagattataaatagaaccagccaaaggtaataagttgtctgtgcctaaaaagaaagaaaaaagttagcatcagtagttctcaccagaaggggtgattttgcttaccagggg

SEQ ID NO: 242836 - DNA, 451 bp, Homo sapiens
atctcatttgtgtcacaaaatggtactcctactgattttgtaatgtgaagcaagtactgtgggtcagtaggggtaggaccaggagtgacaagtcaggattttcaggcttcataggaatgacacagctctccaggtgaatctcctggagaattctccataggatctccaggtgagtgaccaggatttcatgtaagcatagggaattgaatgagcattagatggtctaatgctgcggttaagaacaccaacttagccaaactgcctagatagttgggtgacttgggttaagtgacttaacctctctgcttcagtttcctgtataattcttggtagtagaatggagtatatgctgggtgtttggattattaatttggagtcttacaaagctgctatgttacatgattaggcatggaaaacttcggtttttataatcagtgaagtactgcttttt

SEQ ID NO: 242837 - DNA, 188 bp, Homo sapiens
gaaacaccatgggaccacagcaaaggcagaaggaggagtgagagagggaggtggacagaacaacaaacaggagttggctctcattttttcacgcgtgccattttctttaggtttttctagtttatggagtctctttgttccagttgagcacacagataaactagagatctcacaaggcttttgctgag

SEQ ID NO: 242838 - DNA, 463 bp, Homo sapiens
acaaactgtaccctattggggagctaaaattgtaataggtaacaaatataattaactgtcccaaaatacagctaaccaaccaaacttttttttttcctcttctttgagacacaaaccttttttttggttttttcctcttctttgagactgggtctcggtctgccgcccaagctggagttcagtggctcaattatgacttactgcagccttaacctcctgaggcccaggtgatcctaccacctcagcttcccaaatagctggtactacagggacacgccattatacccagccaatttttgtattttttgtagagatggggttttaccatattgcccaagctggcatatgggtcagctggcatatgcctggcctaaccaaaccattttactagcacctttctgtcacttaatgatgagccatttgattcattgacttcactgaacaatagtaacctaaaaaaaga

SEQ ID NO: 242839 - DNA, 457 bp, Homo sapiens
acaaactgtaccctattggggagctaaaattgtaataggtaacaaatataattaactgtcccaaaatacagctaaccaaccaaacttttttttttcctcttctttgagacacaaaccttttttttggttttttcctcttctttgagactgggtctcggtctgccgcccaagctggagttcagtggctcaattatgacttactgcagccttaacctcctgaggccaaggcgggtggatcacttgaggtcaggagtttgagaccagcctggccaacatagtgaaaccccatctctactaaaaatacaaaaatttgccaggcacagtggtgggcgcctgtaatcccagctacttggagggctgaggcaggagaatcgcttgaacccacaaggtggaggttgcagtgagccaagattgcgccactgcactccagccgggcaacagagcgagactccatctc

SEQ ID NO: 242840 - DNA, 516 bp, Homo sapiens
gattcctgcccctcagcagctgggtggctgaagggagctcaggaagctcagggcaaatcagcctcactaatttggagacgccttaccgtagaagttggtcctcctctctccagagcccgccataaagctgggcttttgtggtgagaagaagaaaatgagccatcctcatcccatctcctccaacatctatgccatgtgaggctccagaacggctctactttccgacctggctgcactgcaactagcccttaaccaaggtgtccactgcgtcttcaccccctacctcttgccctccagagctggtaaggccccttttccacgtatcgctgggactcttctcaccctacgcagttctccttagaccaaggcactggaaggcttggcatcaaatggaaaactccattcagaagacactacagttgcattctcttgcaagaacttaaacctcccttttcatacatagaaaaagggaatcaaggtaaaaaataataaaaaagaaaaatatagataataaaa

SEQ ID NO: 242841 - DNA, 471 bp, Homo sapiens
ctacttgggaggctgacgcaagagaactgcttgaacccaggaggcagaggctgcagtgagtcgagatcacaccactgcactccagccttggtaacaaaagcaaaactccatctcaaacaaacaaacaaaaaaattcagaaaatattttagctgctaaaatgaagtataaattaactacgtagtattgatgccatgagatgaactttaaaaaacactttctaatcccagcactttgggaggctgaggcaggtggatcacttgagcccaggagttcaagaccagcctgggcaacgtggcaagccccatctctacaaaagaaaccaaaaaaattatccaagtgtggtggtgggcacctatagtcccagctactcgggaggctgaggtagaagcattgcttgaacccgggaggtcaaggctgcagtgagctgtgattgcaccactgcactccagcctgggcaagacccggtctca

SEQ ID NO: 242842 - DNA, 363 bp, Homo sapiens
tgagaactcatgcatttaatgatactggggtcaggggaaattacactttctgaggtttagctgtaaaacaatctgccatggtcatatttggtgtatttggattcattctacattgagaaaacaggtcatctttgatcacaaatacctgcaaactcagtttgcataatctatttactgacatatttatatcagtgttgaaattctttagccatcaaattaatttaaatgtgtttcagcaccttttcaccccaagatttaaaatattcaccatattgtgttactgaatgttttcacgttttccttgtgcttagcttacctagtttagactttgctaatgcaaccttttgattaactaatgactga

SEQ ID NO: 242843 - DNA, 319 bp, Homo sapiens
agtaacagatcatagccaaaatgtcctttttgaattgtctttgaaaacaaatcattctattttgtgtaagtaaatgacccttataactctgagaatcttattttcctctaggttagaatctgtattttttagatcagtttcattacattgtgctaaaacatgtatataacataaaatttaccattttatgtttacatatagttcactggcattaggtacattcatattgtgcagccatcatcatccattttcagacctttttcatcttccctccagcctggttacagagtgagactccatccaccccctgcaaaataaa

SEQ ID NO: 242844 - DNA, 449 bp, Homo sapiens
tgcacattttatcacattctaataactctaaaatctgagatcatgccactgcacactgggcaacaagagtgagactccatctcaaaaaaaaaaaaaaaatgaagagtatgttaatttataatgcctccagtactatgtaagtttgttatataatttggagtctcactcttgtcgcccagagtgcggtggcgtgatctcagctcactgcaacctaactttgaggttaggagttcaagaccagcctggccaacatggtgaaactgtatctccactaaaaatgcaaaaaaattagccaggcgtggtgacaggtgcctgtagtcccagctactgaggaggctgaggcaggaaaatcacttgaacccaggaggtggaggttgcaaagagccgagattgtgccactgcactccaggctgggtgacaaagtgagaccccaaaaaataaaaattaat

SEQ ID NO: 242845 - DNA, 434 bp, Homo sapiens
taggtattgtttaagttgatattgtataaaattgagaacttatattcatagaaaatgcaggtgattttataaaagtgctggttttactttccatttttccattataactctttcttttctaccattacgtgccctctcagccaccacatactctcatacaaatgctttatgtatgaagtatatagcctcagtggcaaaacacttcccaaatcaaataccattagaatgaatgctacgtaattccaaaaatacatgtatttagtagaactgtatatacatttcttgaaactatttcttttttgagacttaacaatattttaaagcttgtgatccttttgtagtttatgagcatgatgattgggtattcatccatgtttgtgagatgtgccacccttgaaccttgttacgacatcagcacattacccatctgacct

SEQ ID NO: 242846 - DNA, 221 bp, Homo sapiens
ttcatccaaagatgaagatgagctctatgggccatgcaccagtggcggattatttgtcatatcagaagcacaggcaaatttaggtaacatcactttgtccttctaactttagaatctttattgccatgtgtggtgagtagtagtcccaactactcaggaggttcactcgagcccaggaatttgagaccagcctgggcaatataacgagatcttatctctta

SEQ ID NO: 242847 - DNA, 270 bp, Homo sapiens
aggcccccactcaggacaccgaggccgcttgcacggggttccactgccggtgtgtcctgtccacaacctgtgtgattcaggcccccttggctgggctgctaggtccctcagaggcccctctgtccttagcacagatgcctgtcttcccaaggaattcgagggaggccagcagcatgtgaatgcccacaccatgctttaggacgcggaagatgcttagagccaaatgggaattctatgaatataatgttaataaaaattgatttttgaaaa

SEQ ID NO: 242848 - DNA, 450 bp, Homo sapiens
ggctgtagtgcagtggcatgatctcggctcactgcagcctctacctagtgggaggatcacttgagcccgggagttgctaaaaggttggtgtgaaagtgatgggggtttgggtaggtggtagattggtgcctgattgccttgtgctgcaagggtccagagagtctaactactcctcatagactttgaaccaatctctatttttttttctcagcctcaccttttacccccctgacttttgtggtaattggtaccatccatttctgagccttttggggctatggacagggtaaattcgtttgcttcttgtttgaatttctcagctgctaggttttaactttcttgggttggcttaggtcagtgaccactccagatacttaatgtgcaccagaaaaatttgactgtctcttaggttctcgtgtctctcttgtcctatttttgtctttgtgagtt

SEQ ID NO: 242849 - DNA, 473 bp, Homo sapiens
tcagcctcccaggtagctgggaccacaggtgcaaaccaccatgcccagataatttttgtatttttttgtagagacagggccttgccatgttgcccaggttggtctcaaatgcctggactcaagtgatcctctcgccttggcttcccagagtgctggaattacaggcgttgagccccacacccagctaaacacttttaaattgggcaatttttctttttattgttgagtggcaagagttcttttatatattctagatacaagtccctaatcagatctataatttgtaaatagtctctcttattcagcggattggttgtcttttcactttcttgatagtgtcctttgaagcacaaaagtttttaatttttataaagtccagtttattcatttttgttgttgttgttgtttgcacttttggtgtcatatgcaataaagcattgcctaatccaggatacaaatatttacccataatg

SEQ ID NO: 242850 - DNA, 488 bp, Homo sapiens
acacatcttgagtttctctccatgatggcgcagctctcagcgtaaagcagtctatggagtgagaagggaaaaggccccagtaataaaaggcaaaggaagccctggtgaagtgactcatacctgtaatcccagaacactgggaggccgagatgggaggatcatttgagcccaggagttggagactagcctgggctacataaaattatatatatatatatatatatatatatatatatatataaaataatgcagaagttttatatatatataaagttttatatttatatctataaagttatatatatatatatatatatatttatttattttcaagacatggtggcatgcaactgcagtgtcagctactccggaggccgaggcaggagagtcacttaagactgggagctcgaggcggcagtgagcagtgatgactccactatactccagcctgggtgacagagtgagactttgtctcaaaaataaaatat

SEQ ID NO: 242851 - DNA, 594 bp, Homo sapiens
atttattatacttgcttcctccttattagatatcatttacttatcaaacagatagttgacagaagactccagagacatactacgaggaagtgaccagtgttcatctgaaacggatgccttgtttctcagaaatgtcattctctttatttcatcttcgtagttctgtgccttctctcagcaatttctgatttctttatttactgccacacagatgacaaatgacatgcatgtccatgataccctttactcaattcacatgcgatttccaaggctggctataattcccaaaccctcccactcaagaaggtacatttcaggatacaaatgactcaaagtacaatggaatcagtctagctttataattatatcatccccaaactttggtatgtttaacaagcataatcaacaaatctcttgggatatacctcacaaatgaactcacgtactactgttacttctattgttgggataggtatattttgcctccagagcaagacttttaagacactagaggagagggacaaatcttaggcttcttctattctcctggtgtgcctggtatgctactgatattgagcatgtaataagtaaact

SEQ ID NO: 242852 - DNA, 250 bp, Homo sapiens
ccctgtctcaaaataataataaaatagggcccatgtaaatccttttaaacatttaaatattcaatttaatttagatttagatttagcaaatgtaactttatgaaataaaagccaaatgaaggtatatggtgttaattttattgtttctaaacttaaaatcagctttgagaggccgaggtgggaagaacacttaagcccaggagttcaagaccatcctaggcatacatagggagacctggtctctaccact

SEQ ID NO: 242853 - DNA, 553 bp, Homo sapiens
tgagcccagcatatctggttagacaagagattctcaccttgagctggcattggggagaataaaagtaggaagaagcttggcaacagaactcgaaatctacattagaagtggaaggatttggaagtgattttgaaatacttcacaggcagcagtcttcattaccagttgggctttgctagtgattgtgctgtgatttctagactgttaggaaggccagtgcaactgaattcattgagtcctttggccatgggcctgagtcattcctcttgctgctgtgctgtgataaaaggaagagcagacacattggagatagaagcttagacctgttcccggagagctattctggaccagggaataaggagtcggcttttcaatctcacctgcagttcccttgtgaacccagggtgaaaatagttatgaaatgcagagatctttatgctgttacctggtgctgaaaataggatgaaatactttttaatgaccaaagccatgtcaaaatggatagttgtctttgttagtccttttgtgtttcttttggtgctgatagtttttt

SEQ ID NO: 242854 - DNA, 601 bp, Homo sapiens
acaaatgaacaaacaaacatctgcactattacatacaactgtagcaattgagtgcccagattaggtcttcctgatacagcatttagatcgaggtgtcccttctatgtcatcagctttccaaaatcagtgtttatgtctctcatcttcgtggtggactatgggatgggactagctgtcaaagggaggaaatgaataatcaagggaaatcacaatttctccacaaataggttattttcttgtctgtgactggttttcagcatcataggaagtaccgggagccagactgtcaaaaacttggattaaaacatatacatttcttggctgggcacagtggctcacgcctgtaaacccatcactctgggaggccgaggcaggtggatcacctgaggtcaggagttcgagaccaacctggccaacatggtgaaaccctgtctctatacaaatagaaaaattatctgggcatgatggcgggtgcctgtaatcccaactacttgggaggctgaggcaggagaatcacttgaacctgggaggtagaggttgcaatgagccaagatcatgccattgcactccagcctggatgacagagcgaggctccatctca

SEQ ID NO: 242855 - DNA, 665 bp, Homo sapiens
cagccctgatggcaatcttcaaagagggattgcagcatacctggagtagccacagcaccgttgtcagcactgagcccacacaagtgactgttgacacagggaccgtattctgtgtatatctatgttctgagaatattttgttgttgtggtggtggttggaaaagcttttatatgacagtttatggctcacagtggtgtctggctggtggccttcaatgcaatgactcataagaacctctccttcagtcacccttgaagacccaacaaagctggggaaaggaggggaatttcccgataccattgacaatgaagatggacaagctaacggcagaacctcagaaggatctgacttcagatatgcacgcagcgtaccctggcttcatttcacaaaaacagtacccttttgcaaagggaggaagtgactttctcatgacccgaaccagaaaataggcagccacgggactctatgcactgattccaccttggggagcaggcagaacatgtcccctttgtgaccacgttcactggcatctttctggatccagatagagtgcaaaacttagaaacagctgagtggtacgcagagggggtacaggtacagatcataccgtgcaggcaggtatgaccctacaataaactgcccaagatatgtgttgtatatgtgt

SEQ ID NO: 242856 - DNA, 393 bp, Homo sapiens
ccaaactccttacagtccctagaaatgtcatgtcatttcccaccattgtatttttgcatatataactctctttggctgtgtgaatacccttttccagccaactttgaaataattattccttcaagacttaacaccataaagtctttcctgactctgtagggcccgagtgatcattatcttcttttgttaacacagtccttttattattatacttttgcacattctaccccaacactttaagtcatgcttcctgtactacacagtgacctccttggggaaataaattatgtatcattcaatttgaatcttcagtatttagaataatgcctgacatacagtaggtgctcaataaatactgatttagtaagtgcttattatggatgtgtttttttt

SEQ ID NO: 242857 - DNA, 333 bp, Homo sapiens
gacttgactgagtgatatagtaactataggtttcgtcatctcaaaattatataattttcatactagattatgtgatttcattttaagtaatgtctacactgttttgaatatagcattttgatatattcatattgcatattatataatccaaatgaattatttcttaattagaaacaaaccataaatcaatagtgctttgatactttaagagaaaaatgcctaaatgttctcataataaaaaccaagtgaagaaaaaaattaggaaatttaatgtagagacagtgcttatcataactgtatgaatataaagatgttctccttagaacctcaatg

SEQ ID NO: 242858 - DNA, 436 bp, Homo sapiens
cagattctacttttgaagaaacttctgtaaatgtttgggctccacctttttctctgttgccaccataatgcaggttaaataaaaagcaagtaaaagcaaaagggtaaataaatttaaataataaaaatacaagtataggccgggcatggtggctcacgcctgtaatcccagcactttgggagaccgaggcaggcagatcacgaggtcaagagatggagaccatcctggccaacatggtgaaaacctgtctctactaaaattacaaagattaggtgggcatggtggtaccagctgtagtcccagctacttgggaggctgaggcaggagaatggcttggacccggggggcagaggttgcagtgagccgagattgtgccactgcatgccagactggtgacagactgagactccatctcaaaaaaatgaaataaaataaa

SEQ ID NO: 242859 - DNA, 726 bp, Homo sapiens
atttttaaaataatgaactactgttaacatatatcagattggcaaaaaaagtaaaaatgctgaaaatagatttggcatcatctcataaaattaaactgaagagacagaatagtatagtaatcaacagctggttttagaaactacacttacaggtttcaaatcttgcttttaattattaatacgagggtgagtggtattgtttattaagtaattttagtctgactgcacctcagttaagtcatctgtaaaatggagacaatgataatacctcacagacttataaccacaaaagtaatacaaataaagcacttaaacaagtccctggcccatgctatgcatttggtgattgtaagtgatggtaattactgaaaatgtctgtatttgacccagcaaaatcacatatatgcatatacccaagagaagcatcaactagaaacatttgcaagaatgtgcattgcattcagcattgtcaaaatagcaaaaaaaaaaaaaaaaaaaaagtgaaatacatatcaatgaaagaatggaaacaccgtaaatatgtatcaataggggaataggaagacaaaatgtggacatgtgaactctctgtacaacaaatgctatgttgtggtagaaagcaatgatctaggtttgtgtctgtctgtttggagagatgctcagatgaaaacaatgagtgagtaaagctgccatacgaaacattcaagatataatttatgtgattta

SEQ ID NO: 242860 - DNA, 496 bp, Homo sapiens
aagaccagcctgaccaatatggtgaaaccccgtctctactaaaaatacaaaaatagctgggcacagtggcgtgcacctgtagtcccagctacttgggaggctgaggcaggagaatcacttgaacccaggaggcggaggttgcagtgagccaagatcgcaccactgcactcaagcctgtgcgacggagtgagactctgtctcaaaacaaacaaacaaacaaaactatatgacactgtattggtggatatatgatatgcatttggcaaaaatatacagtaacacaaagcatgaaactataaaaccatggaccttagttaataatagttcctgaaaggaatgcagtcctgttgatacctagattttagcccagtgagagcttatcagacttctatcttacagtactgtaagatattaaatttatgttgtttaatgtttaaacagtacagtctggtaacttattatagcagcaataaaaaaatggatacattgaaaatgt

SEQ ID NO: 242861 - DNA, 334 bp, Homo sapiens
actggattatttttggggagagaactgtttaagtgcctatgcccagagtaggatagtggaggcaggcacaagtttcccagcatcaaaatcagatatgatcactccttgtgatatccttcctatgagatctcctggtctgcaccccaactctgttttggccttgataatggttaagattaacatgattttaataaggttaacatgtttcataagctctgaaattatcaaaggaatgaatctgtgatcctaagaccatattctacatagagcagagaagagcccattcaaatttaaaacaagtacatgaagaacttcttttgacatggatctgcat

SEQ ID NO: 242862 - DNA, 667 bp, Homo sapiens
ggaatgttttcttttatctgattagtcatatttatagtagattcactattcactatttagattcactatttatcaataacctgcactcaatagttttggtgcattcttctaattctgtttatttgtttcctgataatagaagtatcacatgcattctatagataatttgaaagtataaatgagtattaaaaagaaagcaaccacatatcatcccccaaactgagattatcattattaacattttagtttattttcaagcatttcctaagtatattttagttatttaatcatattatacagtattcaatatatcttttatttttatagaagtattttctgtattataaaacatgctacaaaatgttttgatggatatacagcatttcaatatatcaaagtcataattgccctaatcctttctgatatcatttgcatctgtgtccccagcaaatcttacactcaattgtaatcccccatgttggagggggacctggtaggaggggattggatcatgggggcagagttctagtgaatgacttagcaccatccctgcttggtactacatacaatatcattctatcacttttaaagtgtgctgtgagacctcacacttttaaaagttgtttaaaagtatgtagcacctcccacttctctctgttgctcctgc

SEQ ID NO: 242863 - DNA, 413 bp, Homo sapiens
atagaagagttcactcatgcttgcttctagtacttgaactgatgtattttttacatttagatctataatacatttggagtgtgttattgtgtgtggtttgaggagtgaatctaattattttttttcaaatgggtatcaagtgtcccaacaccatttattataaaggtcgtcactgtcccagtaacttgagataccagctttatcatgtactaaactttcatatgtggttcgggtatttctggaccttctattttcatccattgacccgtttattcatctgctttaaagaggctttgctgtatgttttaatgtcagggctagtcttcctagagagtgcttccttgtcactattttcctagctattcttgttgtttatttttccttatgaacttttctgatgtatgatcagttta

SEQ ID NO: 242864 - DNA, 321 bp, Homo sapiens
ctgcatgaataaaaaaaaaacacaaaaaaatgtttgggcacagaatgggcttattcttctaaattagatttctcactttgctgtttgtgattcttcaataaacgggtttttgatctatttacactttgtataaatggagaaaaacaaaattaccatggggagggagaaaaggaaatcctgagcagatttgtgctagcaaatgttttagtactctacaactagaattctcctctcccatctcacagcgccagatgctgccttgtctgtgatgccacaggctgcagtggatccccacggcactataaacaaaatcaaaagctg

SEQ ID NO: 242865 - DNA, 500 bp, Homo sapiens
gacacatattgttcttaaattaagaagtagataaactctatctaattcataatccttcctcttcaatattttgcacttctatatgattggatattcaacaaactagaaattaccaaggaaaagataaatatagcacaatatagcctcataacacgtaaatattgatccatgtctgaatgagcatcatacttctatctatttttgcttgaaattttctgagattagaaaattcctggttgatattcaaatctactttaatttttttttaagcaaggaaatgtctgtttttctttgtttctatctaaaggcacaacttgttaaataattggccttcagaatacatgctatttctaaaaattgaagtgactgtttagctaaattagaaagtaatttatcaatccaattggtttcagtcatgtaagataatttgccagtcaagataatcagtattattgataatactatcatttcatccctggaaagattagctcccaaactga

SEQ ID NO: 242866 - DNA, 805 bp, Homo sapiens
tgaggtttcaccactgcactgcattccagcctgggtgacagagcgagactctatctcaaaaaaaagtacttcatctactgaacaaaaaccatgggataccaatgctggaggaagaagcatcatcctcagtttccactaactcaaccacgcatgagatggggacttggtgtccgagagaaaagcctctttttaggtcttcaaccttgatcaaaccatttctgaattcctcatatgaaggggtggcctgcccctccatacctgtgggtatttctagtcaggtgggatgagagacggagaaaagaaataagacacagagacaaagtatagagaaacaacagtgggcccatgggaccggcgctcagcacaccaaggacctgcaccggcaccggcctctgagttccctcagtttttattgattattatttttcattatttcagcaaaaaggaatgtagtaggagagcagggtgataataaggagaatgtcagcaaattacatgtgagcaaaagaatctatatcatgattaagttcaagggaaagtactatgcctggatgtgcacgtaggccagatttatctttctctccacccaaacatctcagtggagtaaagagtaacaaggcagtattactgtaaacatgtctcgcctgccgccacagggcaacttttctcctatctcagagttgaacaaatgtacagtcgggttttacaccgagacattcagttcccaggggcaagaaggagatagtgaccttcctccatctcacctgcaagaggctttcctcttttactaatccacctcagcaca

SEQ ID NO: 242867 - DNA, 435 bp, Homo sapiens
tggttttagggatgcaaagttcacatgtctgagcacacataagggactctgtgaatatgtgtgtatttgttgtgtgcatgcccgcagaatgggatacagagactcactctattcatcagggatttgttttaatcaggaattggcaggcatgggaagagcacgctgtccagggtcggcaaggcctggaaatgtcagagcatcagaatactgaaaataaaagacatggtcagtactcatacatagacatgacacacacatatacacacatatgcagactcacacatgtcaacagctgaatgaaaaatgtctttcattcctggaagcaggagtcatatcactttctccaaagcatgtctttttctatgcaatggtgtgctttaggtgcaagaacactcgagaagcggcaaagataaagttaaacaaatccaagtgtta

SEQ ID NO: 242868 - DNA, 346 bp, Homo sapiens
tggtctagcttgcactttctccctgcccagaaatgtcgttaacattaacaagagctctctctggcactggcagggggtctgcaaacagaactggtttggaatatgcaatgggaggcttgaatcaaagaaaagctgtgatacagactgtggagtgtgtaagacaaactcgataagctccagtcaatactgtcaggaaaaatcacagcaaaactgatttcgatgagaagatgtcattgggctgtgagggatacttggaaaggatgcttcagcaacaataacaacaaaagagtttttcatttagattgtgaagggcttgctgtgtgtgtcatgtttagggacataaata

SEQ ID NO: 242869 - DNA, 324 bp, Homo sapiens
tattctcctgccctctgtgttctcaagctaagtaggtggggtcagcattctccttgccccccggttgttgcctgcctttacacgtccctggctcctttgagacttccatgcctggctttaccatgcttcctcctctctcctgacattcagtagccttctggcactcactgtcattcgctgaagattcagctcatggccaccttctccagttcacctcctgctgtgggtctccaggtgacttcagtatctacctagacagcccatccaggctctggtagggcagtcccttggctttctcatcttgcatttcctttagacattata

SEQ ID NO: 242870 - DNA, 474 bp, Homo sapiens
aaggaagagaatagtagactcagttgatagatgccctccaaagctgtctgtttcaaccccatccagtacttaaattccttctccaaccttacattgtgctagaaaaatccctttcattttgcatgttctctttgtcactttcacccctacgtccttacctcttggtgctatgatccaaggagctaatcactctaccccaaagaatctactcagataatttgacggtagttattgtggctgccttttccccagagctttcacttctccaagccaaacagtttcttataatacagtttactagaggattgttagaaaagttactcagcctcatctgtaagagacagataattgttgtgcctacctcacagggctgttgtggggaccaagtaagataatgtatgaaaaggtgcttagcacagtgcctggcatttaaaaagtagtcaataaatgttcattattgttgacaaagaaaca

SEQ ID NO: 242871 - DNA, 271 bp, Homo sapiens
cagcacagagtgtggcctggcagggacctggagaagaaggcctggccctgccccaccctcacaaggattcccgtctggcaggcaggggagacagaaactggcacccgaaccaccgaaaggatgactcactggctcagcaggcacgaagatctgcacaggcaagagaaacccacggtcagggcacagccccacacgggggcttcagctacctcaggagcattttttttttattgagcgatttcaatgtttaaatataattagtaaatatttt

SEQ ID NO: 242872 - DNA, 420 bp, Homo sapiens
  misc_feature (61)..(61): n is a, c, g, or t
gcaatgggaagatcctgatgctaacttcggctctcctgttagcccactgtgtgtacatgangggaacctctttaaatctccacacctcagaacttctgcagtgatggatgtgttccacggttgtcaaagtgtggtccccaaaccagcagcatcaacttcacctgaaaatgtgttagaatagtcaattatcaggccccacctcacaaccattgaatcaaacatcttgggtgggacccagcaatttgtatttaaccaagcccataaggtgattctgatgtgtgtaagggttaaagaagccctggggttggttcctttcagccgactttctgtgattctaactacagaagcaccctttcatgccacatgaccagaactaatagccaattaattgaaaaaattaattaaaattaagaaatgcta

SEQ ID NO: 242873 - DNA, 517 bp, Homo sapiens
ctaatccatctctgcccttagatctcctctctcactataacaacagcaccttccttataacacattttaggaattaaatagtgctgtgttagtccacttgtgctacggtaacaaccacagactgagtgactgaaatagcatgcatttattttgtcacagttctggaggctgaaagcccaaggtcaagatgctggtagggttggcttctggtgcgatctttcttcctggctcgcagacggccaccctctcgccgtgtcctcacatggcctttcctccgtgtgtgcacactcctcatgtcccttcttcttactggtcctattgaatcaaggccttaccattaagacctcattcaacctcgatgacctctttaaagcccgtgtccaaacagtcacgttaggggttagggctttcacatatgaatttagggggacacaagtcagcccctaacaagtatatatacagtgcccggtacacagtaacttcacaataaatgctacctcttattatgtgatggact

SEQ ID NO: 242874 - DNA, 661 bp, Homo sapiens
aaaatgtagtctccggataacaggtaccaaaactactacactattaatataactattaatcctgcatattccctccagttttgtctcctggttttattacaacatggaaagtagataagcagccattatcagaaggcaatgttaaagaaattacgagcaaattacaagcctgggatttacaatgactggtagggttaccctgggtttgtaaagtttggagaggtaagccttccaagagttaaatgctacctgggccttgacaaccacctggattcatgcttcgggtcatgtgcggaaacttgcccttgctacggttcagcttgtttcactaactcctctaagagtatagtctaattaaaacttaaaaataaaccttagatttatacaggattttgaggagtgaggtgtagcaatatgataaatatatccctataaggtgaaaatatatggataggtaaaaggacagaaacagcacatcttatatccccaataagtgtacttttgtatcttccaaattacctaaaactgcagcaacatggatggaggtggaggccattatctaagtgaactaactcaaaaatagaaaatcaaatattgcgtgttctcacgtataagtgggagctaaccaatgaatacacatggacataaagacagacataac

SEQ ID NO: 242875 - DNA, 155 bp, Homo sapiens
cactaatcataacatcaaagactcttaaaaacttgctagaaacaattacaacttgttctataatcattacaatttgtacacttataagaggattgtctcttaactaccataagcctttgaaagttgaaacaccagaaagagggaatttgcaagct

SEQ ID NO: 242876 - DNA, 359 bp, Homo sapiens
gctgttttggatgagcccctgcacaaggccccagcatctcagaacaaaccaggatggcctcactcatgttccacataatccaactgaactttgaaacaggccagttttcaaaaatccccaagaggttctagtttatctgagttaatgtaacaatgaagtcccctgtgttttaacgctatgaggaaagtaactgaaatgaccagtccactctttgctccctgtttctgctttcttcagcccttttgtgcctaggaagccaacctcatcagctcatttcatctgaacacttactctgttttacagaatgaggagcttctcaattctagaattgcaaataaaagccaattaatctttaaact

SEQ ID NO: 242877 - DNA, 467 bp, Homo sapiens
gcggccgcctactactactattaaattcgcggccggtcgacataaaagaggggattttagagaaggtctcagaagaaagagatgtgggggtttggtgaaactcaccagaggctgatccctttccagcataacacagggattgagaggagcggggtggcattaggccaggtgcataacccagtgctgctctctctggactttctgctctctctggacttgtttgctagctgagctcatccatttacataatttccagtgccatttctcagctgatgagtcctgaacttttgtcttgaggctagacttctccttcaaacagcagtcttaaacactcaacttctttcttgttttttccacttgtcaactcatgaacacctcaaccttgttacatccaaagccaaactcatggcttggagtggtaggtgatggctgtaatcccagtgctatgggaggctgaggtgggagga

SEQ ID NO: 242878 - DNA, 557 bp, Homo sapiens
gattctcactgaagtgcccctgaacccagtaaaggtggtggaatctgtgagtgagaatgctccccagtgtttccccaggtgtcagaccctcagcaaccaactctcacagaaccttcttgtgtgtggacactgatgaggaaactctcaggcagaggtagaactgggcgtggaatctccagcctgtccttcctctcatccttgtcaccagtggactgtgcctgggcaaggcaaccctgctctggatttcccttggctgtttcacaaaacaaccctctagcttcctcatccattaaatgggtaagctcatacttcctgagttacccaacaggactggtgtggacccacaaagagaatttagtagacgtatctcgtaacctgcccagcatttgatatgcacaaggtgaatttagtagatgtatctcataaccttcccagcatttaatatgtatacggtgaaaccttgggggcctaagaccctcacggtgaaggccacccttctgtcctcttcttcctcacacctgctttcctccatcatgtgctctccacagggccacaca

SEQ ID NO: 242879 - DNA, 498 bp, Homo sapiens
aagcggcagagctctagtccccaactccagagcctcctgaggggccggcggggcgggaggttcggcacgggagggtctcctcttcccgtcccctcctccccacgcgctcactctcccggaccttcccgccgcctcgcgcagtcctgggagcaaccgaggggggcggggggccaggaaaggcgcggagggggaagggcagcgtggaatttggccatcttttgacagaaacgaattgaagagccggtctttccctcactcttccctgctgcccaggtcccggcctagccctcaaccttcaaggccacctcctcacaccttcgggacgcagttccaccccgctttcctgtcccttctctccacctctgagtctgcaccgcctgggccatggccggctttctcccctcgcaggagagcagcccccacccaggactgcgctctcctccgccctctgcgaagtgcaggagtcccgctgatgcgccgggggtgcaggggtctcct

SEQ ID NO: 242880 - DNA, 453 bp, Homo sapiens
caccaaaaaaaaaaaaaaaaaaaaaaaaaaggttccccgatagaacttatagttgactgtccagccaaatacttaaaaaaaaagtttatagggagaaaaataccctcccccatccaatggtcataggaaaaaaagtagacaccctttattgccaaggaggaattaaaccctagtgacttgtgaaatgtgagtcacgaaaggtggcacttagagggtccctcagccctgagcgtcactttcccctccatctacctttgttatttcctttctcttttgccggtttccccaacctccttccttttctgattcattccttttatcctgatcttttcacttaatctcgtccaacatttccttctatctcccttttttctttctctaattggctacatatggaataaagtattttgaattactgggttatatctattaaataaagctttatgatcttta

SEQ ID NO: 242881 - DNA, 455 bp, Homo sapiens
cagatgcacgtggttaatgactgtggcaccagggagcccagaactgagattcagagatgagggagacgtcacctccctgcccctgggttttccttccagcgtagccatcaatggcctagtgttatctttcatccagtacgtacttcctgggcacaggcataagtatccagtgctctgtgagaccctaggggtgctgaacactgagtcacatccaggtcctagaggggttcacagctgggggcgatgtgtaaacagagtgaagggcatggccagcaaatcctgtgctggaaaatcagggcagctggagtgaggggaggggacaccccactgtccccaggagcccacacacccagccaagtttggcttttaattcgcctttcttgtgatgtcttttgctgaatttgctgtcatgattgtcccgattaaaagagagagcattgtgtgttccctctata

SEQ ID NO: 242882 - DNA, 503 bp, Homo sapiens
gagccaggctacaatcctttaaatgaagacagacaaggccaaggcaatcccagggcattactacaaagctaaggggtccccaaagaactaaagagtcagctccacaaaaatcccgattcctagcatgaaactgaaatatgaaaccaaacgggcatagaaaaggtatgtgcattcgaatcacatagcagtgactggagtcctgagctgtgtctgaagactgtgagatcacgtttggagctgctgattggttttcagtgatggccctgttgcacagtgccgtgagacttagctccatggccaaagacgatggtatcccctaggagccctgtgaggttgctgctgttctcttaagacaccaggtagccatctgatcctccctgagcaaactaactgggcagacaggtttattaaacctctgttggtccgacttacatgaaacaagagagttattttgttgttgttgttttgttttgttttaaattaaacctgtctttggagcctcc

SEQ ID NO: 242883 - DNA, 362 bp, Homo sapiens
ggaagttgaataggaatttaccaaaggtagaagaaggaaggggaaatggtaaatgcaagggcatagaggcaagagaaagaatgagaaattctgagaaaggtaaaaaactcagcatggctggcacagagggtaatttgtagagggagcaaggacatgaggcaagaaaggggggttgggcttaggttttgaagagctggagtggctgtaaaggcattcagattcatatgcagttgcagggagccagcaggggactgaaataactaggttcaaaattagatagataattctggaaacattgtggaaggtggacaattccaagctaagatctcttgagagagtagacataggtcattaaaaatatc

SEQ ID NO: 242884 - DNA, 484 bp, Homo sapiens
agaaaacacgtgcatttatttcctcgcgtctctcagttacttctccacactattacatcaatgtttctttaaggggtgaggaggtatgcctgcggtttgggtgagcctttttaagtgacgacttgcattccaactcggctagtgggtgggggcagtgggagttgatcgtttcccctacccctgcccaggacccccgttgtcccacttcctcctctttcttccggctggcgagcctggagtggagttgcgggcggtgggcgcagcctccttcgggatgcagggcttcagctcccctcatcttgcgcgcgccaccctcgccccctttgctggtgcggctggtgcttgccccttctcgtccttttctccttcccactccctgcgcgccaaggcctgggccccgcagccgcagccaggggacgagtggccgccttgccttccgcaggaacccaagttgggatcggcgaagcgtggtgaccgcggccgc

SEQ ID NO: 242885 - DNA, 282 bp, Homo sapiens
tggacaagtgtactaatgttcaagcaggggcctgggtgagatggcctcatggtgccctgctggttgctgccttttgctgctcttttacaatccctgtactcaagggttgatttctgacgcctgggagggttggcactttgggaaagaccaatgagatttttacatttgagattttcagcatgtcaaacataggcaagacagaatatcggggagttattgggaatatgaatttgtttgtttgtttgtttgtttgtttgtttgtttgtttgtttgttttgagac

SEQ ID NO: 242886 - DNA, 403 bp, Homo sapiens
caagtcatccgtctcctttacacctgttggaaccggagtggtgagcagggagctagagcacaaagccaagcctgcgtgcctctaagcctccacgtgccacatgccccatcactgctgtccagatgtgaggtgtctcatttattaatcccaaagcagggcatttttggtgaagtgatcgtatttatttatcattatggtctaacagggcttactttttaacttttggagtcagacctgaaattcatcttttaaactagtctattcaaatacgtcagaaatgtcctgatctttttgcttgggagcttgtctttggaaagcttttaaagaaatatttgtgtttgtaggctaaagtttttcacaaatgacacaattgaaataatgaaatgaactcatgaggtaacca

SEQ ID NO: 242887 - DNA, 450 bp, Homo sapiens
tacccccataccccaatacctccctcacagcttttctccctcttgagccattcctgcttgtctccttcacccatgaggctgcatgcctctccagggcaaggagtagacttagttctatgtctctagtgcccacttagggcttcacacagagaggttgcctggatgtgtagctggggctggtgatgaaagggaggtgcaggccaggcgtggttgctcaccactgtaatcccagcactttgggaagccaaggtgggcagattatataaggtcaggagttcgagactagcctggccaaaatggcaaaacccagtctctactaaaaatataaaaattagccaggcatggtggcatgcctataatcccagctacttgggtggctgaggcacaggaatcacttgagcccaggcgctcacgtcactgccctccagtctgggactctgtctcaaaaaa

SEQ ID NO: 242888 - DNA, 290 bp, Homo sapiens
tttgttgactaggagatcattggtagccttttgaagctttgatgtcaggtacacatctggcctgctctaataagatgaaccactcaaagatcacttaataattgtagaatttcaggaaccacatataggtcaattttgacaagtgttgagtctgtttttgaagacccagattcttaagactcctctttcccctcatccttttatgtggactcagtgaattttaccatgccttgacaactcacaccccacccatggcaattaacccacccatggcaaacccacccatggca

SEQ ID NO: 242889 - DNA, 592 bp, Homo sapiens
agtgttgctttgcttactgtgagaacgcagatatcaaataaaaaaaccaaaggtaaactacaatcactagggccttttgttgggttttttaatgggaagtcaattagattagattcaggtatttcatatactaacatcaccttttgccctattaggatctgatggagcattaggaaagaaaggcaagtcatatttgcatttattattagggctaacactttttaattaaattggcttttactaagtatttggctaacttcagaattcagatactacaaatacgtaatcttcagcctgattcaaagttttctttttggggaatatcctttaagttagcagtgatccttatatatagaatcattgagagactaagctaagctattgtccttatcctctagtctagtaaaaggttgtgagcaggacagccatgtaattttcagggcctggtgcaaagtgaccaattctgggacccttcaagcaccaaaccctgcacaggtcacaagtccacccctgactaggatgtgaagttaaatagatagtggattcggttcgaactctgctacttatttatgtcgtttctgaacccctgttt

SEQ ID NO: 242890 - DNA, 286 bp, Homo sapiens
caaagaagattctaaaagaattcataaggttgtctgaagggaaaagtagatgaccccatggcctttttctgcaattttttcatctataaaacaaagtggtaaagactcagtttgttatgaagcacattcataacaaacttcctggggaaatctctggcaaaagagagacacgttattgggatggtggtcctgtattctccaaccttccacatccttgtgccagagctaatagtcgtgtgttagactgttacaaagcaaataaaattaacttgacttttcaccatct

SEQ ID NO: 242891 - DNA, 429 bp, Homo sapiens
aactgagaatgtgtattgcatttcaattagcctctgctaccccttgtcaccctgagaactggtcttgctgaattgtcatgcaatcagcatgacaatgtgatgtcatcagtctgtgctgtcaacagcctgggctgagagacagggagggaaacagcacaaatgacactcattgtcatctgtcttttaggaatgttgtcaaggatgtgttttttttatatcatggtttctatttatgaggatactcagagaactgcctaactgcttttcgatgtaagaacaattgtattactcctgagaaactgttctctttttaactttacaaatctctttgtaagtgtctagttttcccttctccttgtttttgtaggtagacttacatctattctggtatgaagcagagaataaataaataaattaagttaaattaaa

SEQ ID NO: 242892 - DNA, 430 bp, Homo sapiens
tgtcactcatctaagccttgtttttaaagttaaaatctcagatgattctcccctgtgttttctgattcactgtcctatactctaaatggccatcaactcaggaatagagattattcagcctccaagaactacctaatggagcagtttcctccattggtagttattccaataagttactactcattttggttttcattccattacagttttttgatatgattatttgagcctaaaaatgtaacgtaatttggttcctaagagtttattaacagaagacaagttttaacttatgatgaacagtaggtgctgagaattagtctgtgttacttaaaaatttgaattgaattgtatctcatttagaatgagggatttgtgaaagccaaatatattcacattgtctataaaaagtgtgagtggctgaatgattact

SEQ ID NO: 242893 - DNA, 602 bp, Homo sapiens
tggctcacacctgtaatcccagcactttgggaggctgaggtgggctgatcacgatgtcaagagactgagaccatcctgaccaacatggtgaaaccccatttctactgaaaatataaaaattagccaggggtggtggtgattgcctgcagtcctaggtactggggagtttgaggcaggagaattgcttgaacccgggtggcagaggttgcagtgagccgagatcgtgccactgcactacagcctggagacggagtgagactctgtctcaaaaaaaaaaaaaaaaaaaaagaacttgcctttcattacactttcttcccagaccctggcaaacacaaatttactttctgtctctatgtatttgttcgttctgcatatttcatatgcgttgaattctacattatagggtcttttgtgcctttcttcttttacttgcatttttataaaggttcatccatgttgtcaggtgtatcaataatttagtcctctttatggctgaatattattctatctattgatttactacaattgtttcattcatcagttaatgaacatgagtttttttctactttttggctattgagaataaaactgcttcaaacaca

SEQ ID NO: 242894 - DNA, 351 bp, Homo sapiens
caatttatttgctctgttggtcaaaagtcagtgagatgctttgtaaagatgaattggggaagaaggaaaattactctattgtcaggatgctgctgcttaagaactgggagacagcctggagcatcccaggacagttggcattaaacctagctcttatgaacttttaaaaaaatgccatagtttttttgtttgtttgttttttgttttttattgagacagagtttcactcgagttgcccaggctggagtaggagaatcacttgaacccgggaagtggaggttgctgtgagccaagatcatgccattgcactccagcctgggcaacaagagcaaaactccgtctcaaaaaaaa

SEQ ID NO: 242895 - DNA, 332 bp, Homo sapiens
gcgccaccgcgcaaaggaaggagccaggcgcgtgcggggctcgcggagttcttctgaaccctttggatgggggcggaggcgaggggcgccgccaccactgcggcaaacttcgtcccccctccgggaggtgaaattctccaatccgtctccggccggtccgcgggtcggactcttcggaaaggaccttccaggaggagggagcgaatgcaagccttgctcggacgcctcaccggcggctctctaaatctgggcgccttttgacagccattttcactccatcccgtccccacgctggggaccacctctggccccggaggcgcgggcgcggccgc

SEQ ID NO: 242896 - DNA, 310 bp, Homo sapiens
ctctatgttcctgtaatgctcccagaatggtaagtctaatcctcttgagtgccagcttgcagtgattgcctgaggctctgttgtgagaaggaacttgagacctcctgcaaagcaacattatatgtaaaaataatttccgatttgtacatttcactttagagtcaaacaaatagactaacactaataaacatcagctactcaggaagctgaggcaggagaattgcttgggcctgggaggtggaggttgcggtgagccgagatggtgccactgcactcagcctgggcaataaagggagactccatctcaaaa

SEQ ID NO: 242897 - DNA, 314 bp, Homo sapiens
tttttttgagaaagagtctcactgtgtcaccctggctagagtgcagtggcacgatctcggctctcacagccataatcatagcacactgtagcctcaaactcctgagcttaagcaatcctcccatctgagcctccagaatagctaggaccagcataatgtattttttaaatgtccttctccttctttccttttttttttttttgagaaagagtctcactctgtcaccctggctagagtgcagtggcacgatctcggctctcacagccataatcatagcacactgtagcctcaaactcctgagcttaagcaatcct

SEQ ID NO: 242898 - DNA, 361 bp, Homo sapiens
attaaaaacaaacaaacaaacaacaaaactgtgctccaaatgtatataaccctgtagattaatgaaacatttgggccaaagttctgtattctcataggcaaagactctcatagtattaatatattcactgattttaaattatttttaacttaaaggttttgttttaatctgctgtgatgaaatcttggatcactatagctgtaaatgagtagatttatctagatatgttaaatgaacaaatgtaaaatgttcgatacagcacaggtgcttaataagttggcttcagagccgtgtttttccaacatgttctgatgatccaagtttgatacttaagacaattaaaaacaagaaatttaactta

SEQ ID NO: 242899 - DNA, 2922 bp, Homo sapiens
tatctttcactcagacatcacttcctccaagaagcattccagggtccttctcaggtccaattaatctctcaccctctctgcatccgtgacagcccttcctgggaatgccctccttgccacgccaccaactcctttagggcaattactcatctctgggcaccgtcctcccctcccccacccagtgtctcatcatgcctgggacatttcaggtttttttgtttttttttttttaacttgagttgaagaaaagcatgtagaatagggagaattctaagaggaaaggttaagccctggggaacgggatgggacaatttcaccctgtcatcaggaagtgctcctaatagaagggcagggacagggtgtgtaaataaaccagttcaaattctcagagctcactgggcctgtggacctctccaagcacaatccatccagtttacaaagagggaaaggtcctcgcctgaggactcagagccacctggtcattgaagcacagaaggtagagccaggaagggcccctggggattgcctggttccatggttcttgctctttcctcagcctccacttcagttgcatgtccgacacaaacccatcaggaatgcctgtctttacatatggcatctccagctggagggtggagagtgggggagagagagagagagagagatggaggaggtgaggctagcctcctcccaggacaggtaaggaatgtgaggctctgagaggtggtagagacacagggtcacacaaggctggggaaccccatttggtcctactgcctcacagctggggagatgagaagaaccttaaggagggaatggctggcagagctagagtttaaggagcacctctggtcagtagtggactcacatttgaaaaaattctcagagccaccgcacccgccccagtccccacaactcttgctgggtctgacatcttaaatggattttgaggttctgtggaagaagctgcactggagctcaaccttcaagaataggcaaggtttgcacacatggagaccgggggaagggcattctgggcagagggaactgtgggcaaaggcaggtcacatcccaatgtggattagaagataaaagctcagaggagacagaatggggaatgtggagcctgactgatctgagagctgtggctgatgggacggggaacagaacgggtcaagcaaggagggggccttggccctgtgcagacatcttctctgggcctctagatggaaagtagagccagacagactggctccacgttgggccctgtgggctaaagatcgaccctatcagaccctggggacaggggtgggagggtatgaagggccctccaaggtgttcaggattctcgagtccctctcccctccctactccctctcaggcctgacctgaggccaagagaaatgtcacaggtcctccaaggttacgcggctagggcctgactgaagcaggaagcagtttccaaggccaccatccagccggggtcagcaggcatgcccgggcctggaccaggccgcagctgctctgggctttgtctcttcgtgtcttgaaacctcgagaggtcacttgatcttgcctgtgactctgagcaagaggccttacgtcagggcccagccagtcctgccctgactcttctgggcacaagttcttccccacactctctgaggccatcctccctctgatcctatctcttgccactcctgcagccatgtttaggccaggccttgttctgagccctcatttcctgaaaatgtaatctctccacgaccataccgactcacccttcttctttcttatcttcccacgtcccagagcagggccacggaactggagggtggtggctgggagcctgcctgtggacacagataggcctctatgcacaacccagttccatcccttaccagctaggtgacctggtgagtcatgtcacctgatgagtcacgtcacctctctgcatctcttgtgagaattaaatgagattacacgtgaagcccttggccaggtccctggtacacagtgagcacgtagtcagcggctggtgatgggtaggtaaatacccgacagaggctgaactccggggcctctgaccagcctgtgtgagtcacacacctccaaccctcgcctcttgtaccttcatgcaggaccatagagccggccctccctcgcctgtgctcctcctaggaaggaggttgtattctagtgtggatttggggccttgggggaggctttgtgatagcacctagttctttgcgttagcaattgggccgagtcctccctggaggacccaaggacaaaatgacccggctcagctagaaatgctgtcatcacagttatgcacaccagtcctctcccccactgcaaatatgaaaaatattttcttgtgactgtaatatgtcatgatttttcccctggcagttgtgccatctttgtcagcataacctttgctgccatagtgcactgcgtttgtgctggaaggctgggggaagtagataaattctgtgttcacacacatgagctagtgacctgcttggggccaggcattgtatccagtgctgcaggtatcactgagcaagacacacagtgccctgcccccacagggcttgcagccttttacaggtgtttgtttaaaacctccttgccaggcgcggtggctcacgcctgtaatcccagcactttgggaggccgagggaagaggatcacctgaggttgggagttcgagaccagcctggctaacgtggtgaaaccctgtctctactaaaaatacgaaaattagccgggcatgatggcaggtgcctgtagtgccagctactcgggaagctgaggcaggagaactgcttgatcccgggaggcggaggttgcagtgagccaagatcacaccactgcactccagcctgggtgacaagagcaaaaactctgtctcaa

SEQ ID NO: 242900 - DNA, 385 bp, Homo sapiens
taagattattcatatcttatacaattttcctactagtatctcatgcaaaataatgcaaaccaaatgaatttatattaaataaggcggcccagggagaaaatcttgccctaaaaaactaaccgttccaagttattctaaattggcaatgtgtctggagttctgaaataaataactggtgtgaaaaacctaagtttccagattcttcagatcttaactgtaatatttggttgtgtaatcaatccttagttaatctaagtgaaatgcaggttcatttttattagctaataatttcatttgtgttttttatcagacatataattgaacattttctagaaatagcccttaaaatccaggttaattgtcttacctcttttttcctcctttc

SEQ ID NO: 242901 - DNA, 574 bp, Homo sapiens
aatgagatgcagaggtccccaagaaggaaagtgaattgctcagggtcacagagctgtgtgattaattagaaacgcgtattaatctatcctgcagatgcaggcggtcactgtggctccctcagagagagaggactgagcctcaggggcagccagtaaattttcgcctctagggtaattaggagttcagtgattttttttttctttttcttttttttttaaagcacgaaatggggttaaattttttaaattaatttttaaaaattgatttttaaaaggagtttagtgatttttaatgaaaagagcccataagaggcctttgtgatggggccctgggcttacctctcacttattctgaggcagaaattaaagaaaaataaatactgcgtttcttcactctaagaaaagtaaaagctaagtcctagaatgtggcaaggcaagggctaaaaagaaaagaacaagtgtttttctatttagcagctcacttcaaggagttataagataatgctgtctgaaaagccaaggctaaaggaatgggctttagacaactcttccttctccagagcaaggttgaggg

SEQ ID NO: 242902 - DNA, 400 bp, Homo sapiens
taatcaaatgcaatgagaaaaacacaacatcacttctctaaaatttataacctggttataatcaagaggaaacattggacaacagaaatttggagaacttctattgaataactgaccttggaaaatgtcaaggccatgaaagtcaagtagagattgcagaactcattcagactaaaaggagatagagagacatggcagacaatggagtgtaacgtcttctcctgaactggacctttttactataaagacatgagaacaactggcaaaacttgaatcgggtctctgggagaagtatattcaggagtccaccatactgttcatgcaaatttattaaattcattcatgtaaattttctgtaagtttgaaaatgaaaaaataaaacccactttattcttattaa

SEQ ID NO: 242903 - DNA, 482 bp, Homo sapiens
tggtagcgatgaggtctcactatgtgtcccaggatggtctccaactccttggctcaagcaatcctcctgcctgaaagtgtctttattttaccttcattttgtaagtatatgttggctggatatagaattttaggttgaaatttttatttcttacagtactttaaagatatcttctggcctcccttgttcgtgataagaaattaaccatcattcatatcatcattcccctatgtgaaatgtgaccttagttctgactgctttcaaaattttctctttatcttttatttcagcagtttgactatgaaactgttggtggttttctatctccttgcccatgaacaaagtatgaacactgttataaagtctttgctaatgccagcttctggatcatctaagtgctgtttctattaactactttttctctggactatgggtcacactgtcctggttttttgtatgtacaataaactttaattttaaac

SEQ ID NO: 242904 - DNA, 558 bp, Homo sapiens
aattagctacatagagttgccatagagctcagatgccaacatttcagattatctgtctctttgcctttagaactggggactcgtgtttgaacattacagcttgtttttactttcttctataacttaaaatgcatggtacatttttccagatatataggcacacagattttttaatgaagctcaagaaggctcattgggaacctggcctgccctggtttgagcactctgagaagagtcatcttgtcattttcatggtcccctctgagtggtgccctaattttagctttcccattgtctagaacgtttcactctagaagttcttaataaaaattgtttgagactgtgggcctagctaagtgaactttacaggtgtagttcaatacatgatttttttgcctaagctagtttgagtaggatctttatcacttagagaaaccagaagaaagaaagtatatatatatattgtttcatcaaaacaagatttcaggaaccagacaaggatgtcgactctgccagttctgttcaacagtctttaccggagcaacgaggcaaaaaaaa

SEQ ID NO: 242905 - DNA, 192 bp, Homo sapiens
ccttcctccccctccttcattttaaaattgtgaatatatggtgatgaagaccacaatgaatactagtgaagtttggtgctactactttgatttgtgctacactggaagcagctttatccaccattgctttgctttgtccttgtaaatgtcaacatgtgaaaaagtcaaaaaatatcttagtattagtgtaaa

SEQ ID NO: 242906 - DNA, 380 bp, Homo sapiens
cttattcacctatttctccttcaaatcagctcatagaaacaagaattcctcttccccaaagaaagccataaaacctggaaatgttactctctgaccttctgtcttcttccctgaaaaccctcatgtgacaggtgttctgtcctacaccgggaggaagaaatgctacacagagaggctgagaagaatctgaacaaacaggccttgctggatttccccttcagtttattgccatttgcttgcactttttgtcgaatcacatttctacatggtgttaaccaaacataaaatacagttttccctgggtctttgcatcttcatttctgaaggttcccctgtcacataaaatgttgattaaataaatttgttacatttttcccttg

SEQ ID NO: 242907 - DNA, 487 bp, Homo sapiens
aatatttcaatttaatatgcttcagatctgaatttggtggcctcagtagtttagaccataataaactaaaggttttagaaatgaaaatttttaccaagaacaatttaaacttctttatgttagatcaactaacttaaatatatttattttagggtattcaaaattatctaagaagcttagaaagaaattcgtttcagctgggcgcggtggctcacgcctgtaatcccagcactttgggaggctgaggtgggcggatcacctgaggtggggccagcttggccaacatggataaaccccgtctctactaaaaatacaaaattagccaggcatggtggcgtatgcctgtaatcccagctactcgggaggctgaggtaggagaatcgcttgaacccaggaagcagaggttgtggtgagcccagatagcgccactgcattccagcctgggcaacaagagcaaaactccatctcaaaaaaagaagaaaaaaca

SEQ ID NO: 242908 - DNA, 417 bp, Homo sapiens
ctattggtataaatttagggaggaaaaaaaaacaccttgaaaccaaaatatgcaatatggttttgtatgccttatagccagagatgaaacagaacccaacttaatattgccacacaatattcagctgtcacagacgtcgtgctttctctgaacagttctaacctaggccctcattaccaatatcaactttctatgcagttctgtgtgaacactcaggatagactttcatccagcctagttataccagcgtgtgatttgtctaacacagcttcagcatcaactgataggaccttaatgcttgcaagtggcatatggtcatctgctcatcttttacatataagaaaactaaagcacaaaaatgttgaagtattaggcccaagctccatgtttggttagtcaaaattttaaaccctcctg

SEQ ID NO: 242909 - DNA, 512 bp, Homo sapiens
tttggtgcagagatatacatattttctccatatataaataagggttaatattttaaaaaatatttatttgccattggtatgtccttctttgtgaaatatgcaatctgtcatttatcaatattgttcacaggatagtctgtctttttaaaaccgattcatagattctggataataatgttttggtggtaggttatacgtattgaaaataccttcccttgaacatcacactctggggactgttgtggggtggggggaggggggagggatagcattgggagatatacctaatgctagatgacgagttagtgggtgcagcgcaccaacatggcacatgtatacatatgtaactaacctgaacattgtacacatgtaccctaaaacttaaagtataataataattttaaaaaaaaggagatgaagaggtagctgcaggttgactgagcaagggtcattgtctatttgaagtttcaaaggtatctctgaaaataaacacagttttttgcaagagtgaa

SEQ ID NO: 242910 - DNA, 316 bp, Homo sapiens
cagtaggacagtgctcattgtggatgaaaagtatcatctcttattccgccaatctcacttctcacagcctttttagcgtcttctgttctgagttcttctggttggtcacctcctgcttgctgaatgtgggcactgcattaatagtacacatgctgaggacaaggggaatcagccaggagccactggagatgttatcatggcccccagagacggaagatgaggatgggacctgttttcaccacccacctccttccctttttcctcttgttaacttcccaaataattttataactttaaatgattttatcaaactttg

SEQ ID NO: 242911 - DNA, 395 bp, Homo sapiens
gagtctcactttatcactcaggctagagtgcagtggcatcatgatctcagctcactgcaacctccggcccccaggttcaagcgattctcctgcctcagcctccacagtagttgctattacaggcgcgcaccacacgcccagctaatttttgtatttttagtagaaactgggtttcaccatgttggtcagtctggtctcgaactcctggccttaggtgatccgcccaccttggcctcccaaagtgcagggattacaggtataagccactgcgcccagcctgcatgagcttaatttcaaaagcagtaagaaaactatgctctcataaaactctgtctctaccccagttcagttactgatgtcacaatgttacatttaggcactatgtgtccaaaaac

SEQ ID NO: 242912 - DNA, 363 bp, Homo sapiens
cagtctctgggcctaaattggaagtatgaaccaaatcactgactcctggtgttagatttgttagagtcctcagaaataatctagttcaacctcaagcctaaagccagactgtcctcaatcacattaggaagaagttttcccacccctgtctgtggctgggaactttccagacaggcaggtcactacttcacagtgcagcccaaccatttgttttccaacattaagaatgcggggccaggcatggtggctcacgcctataattccagcactttgcgaggtccaggcgggcagatcgtttgagcccaggagctcaagacaagcctgggcaacatgacaaaaccttgtctctaccaaaaaaaaaaa

SEQ ID NO: 242913 - DNA, 505 bp, Homo sapiens
taaactttttatgtttaagtgaagtactatttatcatgtgtttatggaattttctgcaataaattcatgtgtatggatggatttatgatatgttgaattcatcaccagaggttgaactgtagagaagtcctttaagaggaggcattttatcttcctattatattttatcaattttaagatggactcaacccttctacacacacgcttctttccatatggatattcagtttttcttgtaccatttgtttaaaagattttattttccctcgttgaattgctttggtgtctttgttgaaaatgactggaaaaatatggatctgtttctgagttttattgagaactggtcttagatgtatcagcatgtttaaaatgatgttctatagattgtgatcctcaatcaatttgttcacttaaggcagttctgtagttattgtttgagaatgtataaacatcaaaagcgccatcgtatacctgtagagaattactagtgcctctaaaaggaaga

SEQ ID NO: 242914 - DNA, 447 bp, Homo sapiens
tgatgctaaaccattagaaaccacccctatgatccaatcacctcccaccaggccccacctccagcagtagggactacatttcaacttgagatttgggtgggaacacagatccaaaccatatgagtggcactaaagaagacactgaagaacatcacctaagagccaggcatggtgggtcactctcacaatcccagcacttcgggaggccgaggcggatggatcacttgagatcagaagttcaagaccagcctggccaacatggcgaaaccccatctctactaaaaataagaaaattatatgggcttggtagtgggcacctgtaatcccagctacttagggggctgaggtggaagaatcacttaaactcaggaggcagaggttgcagtgagcagagattgcaccacttcactccagcctgggctacagagcaagactccttctcaaaaa

SEQ ID NO: 242915 - DNA, 371 bp, Homo sapiens
tagttcattatccatactgtgatgtcttttgaggacgtagcatccagtggactaaggtacaactttcaagggcattttgtcttaggttctttcttccttccctacacattttgacttgtagaatgggtagctgctgggaagttttccctacaagaacttgacgtggaaaaattctgattacatcatttccaaatcatcctttttcttggctataaatttcaaaaattgttaaacatcttaatgttctttgacatcacaccattattattttcactgaaatgatgactatcttgtttagccattaatacctttgaagccagagatgtcccactggagaaactaatataattcaaatttaaacatttgctaaa

SEQ ID NO: 242916 - DNA, 554 bp, Homo sapiens
agtgcttaataagattactttgaggattaaatgaggtgatacacattaagtgattaacacagtctaaactggagcaaactctcactaaatgctagccattagtattcatccacttcatcttagtagaactctttaaagctagcctggggatattttgatttcacagcatttgtgaaagtgttgcttttttaaaaacgcctgaactttttctgtcttccctgaaacatacaaatcaatgatcaagggtcttttgaaccgagatagaagctggaatgaagctaaataaaaatatagactattaagattcctggaattgcgagtaagagaagtgttggagagagagctcctctgtcttaggagaaagggaatagggccactgcacagaccctgtttgtgaaaggcatagagggcacgagaatcttagtctcaagtggccccagatgagcaaacaaggacataccccttaaagagacctagctatctttatgtagagttatggacttgagagagaagaaatatatatatatcatttagagaatgggaacatcatgttt

SEQ ID NO: 242917 - DNA, 106 bp, Homo sapiens
tggccctcccaaagtgctaggattacaggcgtgagctaccgtgcccagccttgtctcctgtttatagaatcacttgaacccaggagtttttgagacttcatctcaa

SEQ ID NO: 242918 - DNA, 410 bp, Homo sapiens
cccgggatgggtgatttgagggcttcttttggctcctacccatgtgtctaatttccctttcttttccctcttccttctctttccctgggctgagacaatcatagaatggtgattaaacatgtagaacaaatcatggttctgccacatcagctgtgtgaccttgtacaaggtggtttacgtttccttgccttagtgccctaatcatacattggttatggtgataatatacccacctcgtggggctgctgcataaagcatttagaacaatgtctggcacacagcaatcactgtgacaccagccaacacaatttcctcttctcctccctctcacattccctgcttgacagcatcctgaaggactcaggggtaatgcctttgttaagcaaaataaatatctgaacacctgcatc

SEQ ID NO: 242919 - DNA, 142 bp, Homo sapiens
tgcacagaatgaaataatttactgaagacaaagatgggcttaaataaaaggcacagtttatataggaaaggccagataaattctagagtatttttctttatagttaccaattttcataactggttgcttttctaatatccac

SEQ ID NO: 242920 - DNA, 817 bp, Homo sapiens
tcagagttatgctttcagtattttatctcatcaaaaggaagaggaaagacgctgtacaggcaggcaacataaagtgctttaaaaaacactggtttatcaaagccgggatctaagttcaaatcacatctataccacctaaaaactatgactttgggcaaggggtgtgggtgggtgggtgtgtgggtgtgtctgttttaatggggagaaagggggtctcactatgttgcctgggctggtctcctcaggtattctggtgaatactgatcaacccacacgtgtgaagaaatgacaggaagccaggaaaagaaccaaatgaaagttctgtgataacaaaggcctgatgcacaaaagggccagcacccacgcctgttccctcagccagactgaaaaagctgcatgatacatagagcagtggatacactgcataaaagggccttgccttagaagtcaaaagtaaatcagttctaggctgagcactgctccaaacccatctaccatatcttaaaaagataaaattgtttccgactagcttaattgtgtgacagaacaaagtgtaacacttacaggaatacaaaaatatacagcacccaacaaggtaaaaattcacaatgtctgacataaaatgtaaaattataacacaggtaatatattaggaaatacccataatgaagagatttattaatcaaccaaccagaattggcacatatgttagaattagcaaagacatgaatgcagttattatattacgcatgttcattaaaaacatatataaatggaagacatgaaacacacacccaaatccaacttttagagatga

SEQ ID NO: 242921 - DNA, 630 bp, Homo sapiens
gagttaataaaggatgaaactatacttttgtgtttctgttgtcttgtagaaagctcataggtaggaagaacatacgctttggagcagaaagaactgtgttcaaatccattcttctactcaacctctgtgaccatgagtgggttgtttagcccgcctaaacctcagtgttctcatatgcaaacctggagaatgtctcgtagggtcattgtgaaatccaactggtaggttgccttatattactactaatttgcgctattaaaggcaagctgatataaattagaactcttctgaatgggccttctatatttaaatgggctttttctaggaagtgtatatttgtaaacttgtcttgaatggaaaaaaagaaaatacttgtagatttgaatgaaccacctgagaagatctcattgtagtctgtcataaatcaatttctctgaatcatctgctatatattagcaagataagatctgctttcttagtgttcgaatacagtactatgctccagagaaaaagaaattgctggctggggaataagtaattaaagccagtgacaaaactttctaaaactcagtggattaatttcattctaaaacttctgaggttgttaccagcacggcactctctcattcc

SEQ ID NO: 242922 - DNA, 524 bp, Homo sapiens
gcagccaaatgggcgcagttgtactccagatctctgactttcacattctgggtgcaaaaaaagtgaatgggatcaatttctccatgaactgaaacaggactttgggcaagaaaatggatgcctagaatgggcaatgtgctctgggacagaagattgtataatacaatataagacaataatacaatagcaggagaagatggaggagagggacccacaggtctacatcccttctcaagtgcaaggagaaaagcaatattcctcacagcctcaagaagcctgtggccccgcgagcagggctaggcacagcaacttccactgctgcatgcagttaagccacatattgaaaatggaaacactttttctttgccacagagcaacacagggtgcctggctcagggcataaagaaagaggtgaggaaagtcaacagctagtccctcccagccagggtcacccgttgctgctcagcctggcaaggctgaagttcaccagaggctttattaaacacagtctttactagaataaa

SEQ ID NO: 242923 - DNA, 462 bp, Homo sapiens
ggatgctgcggggttgggagtgacgcccagcaagaactgcagagtcggcagccccaaggacctgtcctccacagaaacacgcacacaaagataagcaaaagccgtcagaatcaactttgtggaactctgggaaataatcaaagatttacagcaagcaagcaaaaaaaagtgcactaatgacttaaatacagcatttgtggaaatctcagtcaaacctctagctgaccatgagctacaggaccagggacttcagagaacacacattgatgaagaatatagtcttcaactagagtgcctcctaatgttggctttgttggaagctgggccaacagtatttgctagtttgctttgtggtcagctatgccttttcattggcttaatgagaagccaggactcctgaacctaagtctcaagttcatttttcaagtctaagtgttagacattaaatgaatccctatgata

SEQ ID NO: 242924 - DNA, 432 bp, Homo sapiens
acctgtggtcccagctactcaagaggctgatgtggaaagatcacttgagactgggagatcgagggttcagtaagcagagatcactgcactacagcctcggtgacagagtgagaccctatctcaaaaagatattttagagataaggaagtaattctggaatgtttaggtaggtcaaagacatattggtgaataaattaatgaatgaacgaacgaatgaaaggtgtctctgaggtatatgtgcttggaagggaccataattcctgaatcttggaattatgaaattttcaccattagatgtgtgatatttttgtgtcaagcagtgcctgtctcaggagccctcttaaagaggtgaaatactttgagaagggagaggcacagaagtggctgctaaactggcaaatggctattttatgagcaacactggtaaaaaaa

SEQ ID NO: 242925 - DNA, 507 bp, Homo sapiens
gttttatctttttgttattgagtagcaggagttctttattctgcataccagatccttattagagatatgatttgaaaatattttctctcattctataggttgtctttttactctcttgataatatcctttgatgcacagaaggttttaattttgatgaagtccaaattatttatgtttttcttttgttgcttatgctttaggtattcatatctaagaatcctttgtgaaattcaacttcatgaagattttacccttatgttttcttgtaagagttttatagttttagctcttatatttaggttgctgccccattttgtatatggtgtgaagtatgtgcaatttcgtctttttgcatgtggatatttagttatctcagcaccatttgttgaaaagactattcttgccaggcacaatggcatgtgcctgtgattccaactaataaggaggctgaggcaggaaaattgcttgagcccacaagcaagtttgagcaagacccccatctcaat

SEQ ID NO: 242926 - DNA, 638 bp, Homo sapiens
tgcaaatcatatctaatacttgtatctagaatactcttacaactcagttataatctgcttaatatgaaatcaacagcattactatgctgagctgataaaatttcagcctaaagcaaagatcttgtttagtttgccagtgctatcttagaatcagcaaacttaggggttttgtaataataaactaccttgtgcactggttcatatttggttcaataaatgcttgttgaatgaattcaaggctctagtaggcttctaaaaggaatgaaggcacagatcctgtccttggggaaataagatgtgcccaggaatttctaatacagggaagacagtaagtgatactatgggaaaggcatttagagtgctcttggagtttggaggaaagaaggaattgattccagtttggggaatactgccttggaagagatgggtttaagattgattttaaagaatttggccaggcctggtagctcatgcctgtaatcccagcacttcgggaggccaaggtgggaggatcgcttgaagccaggagttcaaaaccagcctgggcaacatagtgagatcttatctcaaaaaaagatttttttggagtaattatgcatacttcttgcatttttatttccctcttgtgaaaaaaaaaa

SEQ ID NO: 242927 - DNA, 433 bp, Homo sapiens
cctttccatataaaattgtactcatagatcattttaaagtaacacatttttttttcttaaagagatgaaattggaaaataaagtggtaatagtgtgtttaatttgtaagtaaaccctaggaacacaattcattttactttgttattatcacaaaacagtaaaaatttatcttgtttttaacagattccgattattaacaaatccgatttgtatcctatttatgtatttgtcacatacgtgaaagtcgtctttttcttcttgctagagacctaaactgtgatgatcaaattgaacagtataaacaagcaattagatgattaatttgctacaacctactccgaaatatgagacattttatccacttatgtatattcaaggccaaggttatcaataaaatacaggcagaagttatgccgaatgaaaaataagacat

SEQ ID NO: 242928 - DNA, 377 bp, Homo sapiens
aaaccaagaaagcagcagctcacagcatgtttgcacaacttcatgcacatcttatcaaccttactttgcaaggacttcagccttccattcttacatcaagctttcccagaagtttcctacccagagatgacaaagtggtaggaaaagtctccacagctcatagactgctatgaacttcaggcgccttaaagcaacagatgcatgtttcaaagtgatgagaggcaagaccccaacaagcagcacaaacagaaatccaggactaaacacaggaagttatggtataaaacttcacgagtcttagaaattaggatccttacccccacctccacgcccttgctgacagatatgaaaataaactttacactccctaattcatg

SEQ ID NO: 242929 - DNA, 365 bp, Homo sapiens
ataatgtaggcttctcacaagcaagtgacacttctactcccactgcctttggagaaagaaaatttttctcttgacctacttttaaataaaaagaaaaaaaataaaatctgccatactacatatatactactcccaacttatgaagagaaggtaagtgcccaatataaatattacagctaaagaaaaccagaaagaatgaaaattattatagaattaaagttaaaatgcccacaaaagccaggagagcagaaccgatctaaaaatgtaattctgggtgcaaagaagcagattaaagggtctcatttctttactagataaagactacaagatccatgctcttctgtcctcaaatgtttcccaaattc

SEQ ID NO: 242930 - DNA, 605 bp, Homo sapiens
gattatcaatccaaactcagatcatgtcagttctctattcaaatttacttagggtaaaagccaaaatccttacaagacccaacaaaatatggcccctttacacctctttgatttctctcactaagcttctcttgcccttcctgccacatcaacctcacctattccactcacagtcaccaaatgcactggaatcttctgtagttccgacatatcaatcagactcccaactcaagacttttgccattgcccttttttcacctagaacatccagccataaacccctatatttgcatggcactttctcaccttcttcagctctttccttaaaatgaggccttctctggccaccatatatgaaatagatccaacctgctaaaatttccatccccagtactccttatccctcttactacactgtattttcttctacagcaattatcatcaaacatacttcattatgtacttgtttatctgttcgttctctgcacaaccatctctacaccctgcctcacaatactatgtaagctccatgaggataataactttggtcactggaatatccccagccttgtatattgtagatgcctaataatatctattgaatg

SEQ ID NO: 242931 - DNA, 461 bp, Homo sapiens
taggaggactggcagtttctgctatggcctctgggagccatgagctgccatgaaaaaggtcaaactactctgctggagacacccacctggagaagccctgggattccatggagaggcagacggacccagctgagctcagtgttccagccatccccacgaaagcaccaggaacctgagtgaaaccatctcgatcctccagcatagcacaatcagcagctgaagatcactgagtgactctagtcggcgctccatggatcactgaaggatcacccagctgagccctgcgcaaatttctgactcacaaaactgtagacgatacaatggttgttgtttgggggcagtttgttatgctgtagcaataaatagccagaagagaccaagaggcagaagttgtttgctgaaaataatgcaaaaattataccagcccttgcccagctacctccggatttcttgctacatga

SEQ ID NO: 242932 - DNA, 404 bp, Homo sapiens
tcgaggagaagaaagggctatggtgagagcagacagcactgccagagtttatgggacaaaagagccaaatggttccttttagtcagaatggatgccagggaaagtagcagaactcgagttgccatcaaagggccatgcccgagtggccatccttcagagtatgatgactccaacagaaagaatcaggtcctcggatcagccagagggtgcatctcctctgccagggaacgagactataataggggtctccaaggagcccccaaagtatctcatttgccacccagaaggctatgatatcatatgaatgactactactaattaagactattactcctccttccccttctctccctcacctcatcctgagcttgaaaagtacgcaaaacagtaaacacagaaagcaa

SEQ ID NO: 242933 - DNA, 317 bp, Homo sapiens
ggtcattatttttattggataatatttcccatcctttcactttcaacctatatgtgtctttggatctaaacaagtcttgtttagacagcatatcattgggtcttggttttcatctattatgccaatatccacatgtttattggagagtttaattcatttacattttaagtaattactgataaggtagaacttcaaccattttatttgttttctgtatatcttatgccttttttattcttttcctccactactgccttttttgtgtttaactgatatttcataataaatgtttttgattccctctttatgaccttatg

SEQ ID NO: 242934 - DNA, 423 bp, Homo sapiens
gggtcccggtcccggctcgtcaagccccagctttatggtggctcctcagcctcccactacgtgggtagaaagtttccagccacgaaagtgaaagtgaaatgcaaatcaagcctaccgggaggaaaagcctccttgcagcctgaagagagtacagctgctgcaaatatgcactttatttttcaattacagaattgatgcgctcgtaggtgtcacaagataaagaggtgaattgttctgttaaacttagctccctatcatcctcttaacattcccccgccagctcttataatcactcaatcgttcattgtataaagcttttaaagcttttttaaaagttcgaatacactttttttttttcaaaaatgcactcattccgtaaacacttggaaaagtacttaataaagtacatttaattttatgcca

SEQ ID NO: 242935 - DNA, 645 bp, Homo sapiens
atcttcattcagtgaggtgacgtgatgacctttagattaacgaaggagttaatagttctaacatccttcaacttccagcctgaggtttttaccagtaactgctgtgttgtaggtatacaagggagctctttacaactacatttctccccctcccagccatggtgcccctaagttgagaaaaactatcgcagctgtcagtgccgtatagttacttttcagaactgctgcagcagtacatatccagtgtaggtttgtgctaaacattattctagtggctaggatggaacaaaccaacaaaataccattgtttcaatgaccaggtacatacagaaaataaacaagtatggaatttaatttagatggcaataagtgctgttaagaaacataaaacatggtaggaggacagggactggcataatcataggggatatgttgattttaaatagtggggagggtctcctatttaaatggagtcctaaggtgaaggggcattaaacatttgagtatctgcagggaagagcattgcaggtggagggagcattcttggcctaataaatggcaagcaggtgaatgtgaactgttcaagaaccttgtattatcttgcaagttaaaagggttggtaaaaattggtaataggccaaggca

SEQ ID NO: 242936 - DNA, 417 bp, Homo sapiens
tagaagtcaatgcaaagacaaattacaactcaaaatcataaagaaggataagcataagatccagactgatctgattcatagctcaaaatgtaagcattgaaacatttctgttttaatcagtagtttgttaaaggggccaggcgtggtggctcacacctgtaatctcagcactttgggaggccgaggtgggtggatcaccttaggtcaggagtttgagaccagcctggccaacatggtgaaatcccatttgtactaacaatacaaaaaattagccaggcgtggtgcatgcctgtctgtaatcccagctactggggaggctgaggcaggagaatcatttgaacccgggaggcggaggttgcagggagccgagattgtgccattgcactccagcctgggtgacgagcgaaactccatctc

SEQ ID NO: 242937 - DNA, 460 bp, Homo sapiens
gatgtttccaaaacaactgccctctaaggtacaggctgaaggaggggcagaccaagccggccccagctgcaaccccaatgtaggctggagcagcgcagtgggacaggagggttcacagctgccagagctgggcagatgccctcagggaacaagcccctggggacgtcatcctccaagaggaagggccgggacgtcagtgttaggcggccctgggcaagattcttgtcttcctgggcatcctgggaaaacactgtctaaacgtttcaatcaactgtcattcactcccgtaaatcaatcagagaacaaactccagtgagagtacccggtttctaaatccttcaagagtatacggcatgtgaataggtgtttcctgtcttcctcaaacctcctaccccatcactcagataatgacataataaaattaacaaacctaagttggcattaggaagacggatgtgaa

SEQ ID NO: 242938 - DNA, 324 bp, Homo sapiens
aaaacaagctggggaagtgaatttcaatatcgcattaactaagatcaaagtgcaattcatcaaccttttttccccatcccgcaccctgtgctttctctactcagttactcactacaccctgctggactaaaagggtcctccagcattttctttcttacacagtgaaagacattctcttggcattaataaatgttcacttaataaataaaaagggccgggctctgtggttcctgcctgcaatcccagcagtttgggaggccaaggcaagaggatcgcttgagcctaggagttccagcctaggcaacgtggcgaaacccagtctca

SEQ ID NO: 242939 - DNA, 696 bp, Homo sapiens
ggaaataagagcagatgggctaaagaaggaatgggagatggagagtccagaccagatgctgaaatcataaggacagggcatagataataccaggacaattttctaccatgaacaaaaacatgtcagcatagccagagaagcagaggcctgaggccataacttcccaaaagggactctggagaaatccatccaggaccttcagtgaatcctccctactcttaaagatcccttattacctctcactatgaaagccatgggcactttggtgtctccactaatgcaacaatacagtgctggggtcatagtgattcttagtaagtgcttgcagtacgctcattgagcccaattcctgtatttgataactagatttttcccaattcagtgcagagggggggctcccactaaaatccaaaccagctaaacccaccacctttcacctactaggctgcaagtgccaaaggaatggaagaagattcaaaaccagacatggacaaaggtccagtagctccagggtggatgtctaagtccttgaagaatataaggaacagctcccgggctgtgttgaaagctccaattttattttaaaatgtgattaggagctggggaagctgatgctttttgaaacactcttgactccagcatctgtagcagctctgaattatttggcggcttaaattgcagcaggcaagttgaaca

SEQ ID NO: 242940 - DNA, 420 bp, Homo sapiens
tgactgaacacttggatatttgtttgggcctcacagtttttaaaggattctgataaaacagaaagtccagaaaagagcaatcagtatagttgaaagacctggttatgttttccagaaaaatgagaagacttgggattccaggtctgcacctgcttctcctctgattcttctttaccagctatccatatttactccatcctgatgagcttcagctaccactctcgaagtgtgattcttaaatctctatctgcagttcagaactcttctgaataccagaaaccataggtccaattgattgttgaccattgccatctggcattaaacaggacttcaagcataaatccaaaactgaactcatcagatttatcccaaagctctttttccccttgacaattagtcaaataaaaatataaaccacaa

SEQ ID NO: 242941 - DNA, 377 bp, Homo sapiens
atgtttctgttttccacactgtccagcaaataccatttatatgtggcattgaatgagatatgaaatgttttcagaagcatgctgaaaaagggcattcaaagttatcctttggataatgatgatctaaaactttcttttattatcccatgtgctcagagtaaggggcaaatgaatcagttgtgaaatatgtgttccttgtaggacacaggcactcttgagatctatagcttcaataaaaaggtaatttatttaaattactgcctctttaatttataatgttttggggatttttaataggcatgctctgtaagggcactggtaatcagctgtttctgattttgcatgctcttctatctctggtaacaaaataaaatctt

SEQ ID NO: 242942 - DNA, 725 bp, Homo sapiens
ctttatagcatgagaagaagctatgcaaagacattgtggtgaatggcagaactagtactagaatctcctcgaacagactattactctgcattaaatggggaaagcattatccattgtagaaatggccagctaactcattgccttttattcttatatgattcttcagtgcttcatgttgcaatccttgagtcaagctggagaaaaatgattgcaaattgtactggtgctgtaattaaaagggatttgtcctttgcaaaaccttaaatgataaatgataatgcatgaaggcattctaactagccaacattaaagaaaccatatttccagcaaaggtaaaatctgttagtaagtaggatagcatgaattcagaccttagcgtttgtgcaatttgtgtgtgatggcaaagttaatgccctattccaaagtgatggattttaatcatgaaatctgtaataattcaaatgtcttaattactttggttcttaaattgtccatatatggtttagaccagagttgaacaaactagcccatggatcaaatctgtttttgtatgcatgagctaagaattgtttttacatttttaaatggttaagaggctgggtgcagtggctcacgcctgtaatcccagcactttgggaggctgaggtgggctgattacttgaaccaaggagatcgagaccagcctgggcaacttggcgaaacctcatctctacaaaaaaaaaaaa

SEQ ID NO: 242943 - DNA, 528 bp, Homo sapiens
tatgaaatagatggtgatagtttatggtattcatactttaaaaaaattcttacttggcaatataaaaagctagcaattcaactctatgcaggcctcctacaattacaaaaaaatatacatttttttttcaccagttcgtgacattctgaagtcttataacctgttggtgaatcatactaaatcatcatcatcattactgccatcaccataatcaccattactattacctatatggtcctgtgctgagtgttcacaggtaacaaaatgtaaagatattgctctcctagtgcctatttaaaaaacaaaaaaaggctgggcacagtggctcacgcctgtaatcccagcactttgggaggccgaggtgggcggatcacctgaggtcaggagttcaagaacatgctgaccaacatggcgaaaccccttctctactaaaaatacagaattagctgggcatagtggcacatgcctgtaatctcagcttctcaggaggctgaggcaggagaatcgcttgaacctgggaggcggagg

SEQ ID NO: 242944 - DNA, 449 bp, Homo sapiens
tttaaaatgttttatatgttaaaagaaaattagttcataattctaagaaaaactagtaattagaagtaaattgttatgtttcgttttttaaaaagctgcatggccaaaaagtaattctaactgggcataattagtcccaggtttgatctttgcagaaaaaaagaaaaaagaaaggtaataaatttgctgtggatatgctactcagtttctttttggaaacaatataaaactatgaccataatctcaaatgtcctagtttaaaagttttgtttgtaatgtcatagaaattaatatgatgggccaggagcggtggctcacgcctgtaatcccagcacttttagaggctgaggtgggtggatcacctgaggtcaggagttcgagaccagtctggccaacctggtgaaaccctgtctctactaaaaataccctagaacttaaagtataattta

SEQ ID NO: 242945 - DNA, 435 bp, Homo sapiens
ccccgtgcccagtccccttcctgcccttgcttccagggaatgggccctattagccatgccctgagcaggacacacgtgcagccctagatctgtagacgcaagactcactccaaagatgggattctcagctcagggagggagggaggcagcccccagggcccaccggtggaaggaatgtgggggccttcgaatgacctgcaaaggtggctcctggccccatcctcacctgagccagatgtgtgaatacagacgcccgcccctggcagcagacagtgggaaggagacacagggggctgattcttgcaaagttgagtgtcatttcttggcttgctctgctcctgcgtatcaaagctgaccacagcctggtgctcattgagacctgtgtctcaagggtttcctagtttaccgaagagctggctccggtgggctgtaggg

SEQ ID NO: 242946 - DNA, 358 bp, Homo sapiens
atgacaggaatgtgaatggctttgcaactttacttcatcttctctacttacatagggtgcataccaagtaaatgactttataacttgactttattctcttcatttacatagggcatacaccaagtaaccaattgaaaacctccagagggtattgagacccagcaaattctgtaactgaggcccttgagctgcttgctcaggcccactcccatcctgtggagtgtgctttcattttcaataaatctctgcttttgttgcttcgttctttccttgctttatttgtgtgttttgtccaattctttgttcaaaatgccaaaaacctggacatcctcaactagtaacaccaccccagaggtta

SEQ ID NO: 242947 - DNA, 1170 bp, Homo sapiens
aggcccacccatggagcacatggacagatcagcatggacttcatcccctctgaagcccataaaaatcctggagtcagccgcaacttggggatacgacctgcctgtgggaaggagctacccactctggctctcgtcttggctgtgagctgcacacttgtacggatgacctgcctgtggaaaggagctgtcctttgtatgtctcctgggaactgttcaactgctcaatgaagctcctctctaccttgctcaccctccagttgtccgtgtactttgttcttcctggatacaggacaaaaactcaggacctgccaaatggcaggactaaaagagctgtaacagaaacagggctgaaacatgctccccaccacatcccgctcaccacatcgtaggcaatggggacagacgagttgtagcctttcatggagcacagacctaggggatccctgagccagggctgtgacaccctctgtggagttctatggttcttggcatctccaagcttccgaatgctactgcatttcccttgtccagatatggatgcctgcagcagaagctgtatgtagcacatctggtccagctgcagccttgcacagagccatcacctgtgttggcatctggagctgcctgccctctgcagcagctagcctgtctggctgtgcgcaatggctgggccccattctcactcatttacacacctctcaccactctgtgcctggctcgcccttggcaggtgtgggatctgggctggtaacaagacctgagcacagcctgctgggccgagtgggtggaacaagcccagtgggcatgagcaatacttaggcagaaggcgccaccagccacagaggtttccagctggtgaagtgacacctcaaggatcctgtgacacagagaaacagcagtcgaatctcactgggaacataaggaatgcttcagtgagtgactcctgccagagttagatttcgagaagcataggagatggttagacggagaggggttaatttcctagcaaagagtgctagcagtatatgaaaagtaggagaataggaaacaattctagaaacagtaggatgtgttgagaggtggaaaacaaggaccaatattgggagccacctaaaaatgggatgaattccctattaaccaagtgtgaaataaattcactttgaaatgaca

SEQ ID NO: 242948 - DNA, 440 bp, Homo sapiens
aaaaagagcaggacttcagcaactggagatgaccgtctggatagaccccatcttgcccacactctgcccacatcaaagactcttccttgcaagacactgaggactgtttggatcaggccaggagactccccttgtccaagtcactctccttggactatattgttaaccgctccttccctatccccttttctcttgatgttaaatgtactttgatgtggaatgtgtaatctataacatttatatattgattaagtatactaccatgtatggttggcagtattgactgacttgtggagtgacttgagcctgtatgcccacagctcttattaccaagtgaatggggaaaactaaggagaatttgcctccttgagaaccccatgtggcttgtggcttttatgactgaaatagcatcaataaaagcctgacgttgtagaaagaca

SEQ ID NO: 242949 - DNA, 465 bp, Homo sapiens
ctcttttgagatgtcttcttcctcatccctttagaacatggagctagatattccagggaaatcattaggcatagagactagagatagactactgattaagaaaagttttagagtcgatatttagtaaattatagataagtgacagatgttcattgagtattcagctatcaaggaacaaccagcatgccaggtattgtggctcactcctgtaatcccagcactttgggaggccgaggcaggaggatcacttgaagtcaggagttcgagaccaacctggccaacatggtgaaaccccgtctctactaaaaatagaaaaattacctgggcgtggtggtgcgcacctgtagtcccagctacttgggaagctgaggcaggagaatcacttgaacccgggaagtagaggttgcagtgagctgagattgtaccactgcactccagcctggtgacagagcatgactccatctc

SEQ ID NO: 242950 - DNA, 518 bp, Homo sapiens
gattaagatactttatgaatgaattggtttcactgttcccatgtgatgcagaattatagttgtggtttccagcgagatgactatgccgcagttattttcttgtgcttgtataatgagagggttttggtgtttctgctgtgttctagacagttacactatacagctcattttcatatcatatttcatacgcaacaccatattgtggtgagttttctgtaaaagtaggatcaagggacgaggaagtgggaggacaagacagtggaaggccagagttgatccaagccatggaattttggatggagtggatataggttagatttagagaaaaaagcgggtgtctgttggtttcttctatccttggaggagtaagtaatttgtacaggagttattacagaattgcagggagatttgtctactgggcaacacagaagttaagttgctttccttatttcccattttctagagactctgatactgcattatgagttggtaaaacagactaataaaacaagaaaatc

SEQ ID NO: 242951 - DNA, 314 bp, Homo sapiens
ttgtaaggtgcttggattaggttagggagaggtgtaaggtagtaagtgggtggaacttttccagttccaagtttgtaattcattccattccttttctaagttctttttcatttttaaaagctcagttaaagataatagccttctttcccattctaggctgtgtgtgagaaaaggtgttaatgtgtatgtatgtattttatatacctaacaatgcaatggatcatctttaaaatcaacttatactttataataaggacatttaaatagaccaagagtctacataattatgacacttaaaagtttagaatttttta

SEQ ID NO: 242952 - DNA, 421 bp, Homo sapiens
atttgctaatgtttaggattttaaaaatgttcattaattgtattagtctataatttttaaattttgtattgtctttgtcagatttgggtatcaacgttacgtttgttttataaaataaacttggctatttccttggttttctatgctttagaatatgtagtatcattgggattaactggtcattgagggttttatggaattcctctatgaaaccatctgggcctgatgtgtgtgtgttgtttttgataactttctctattttttctaatgaaaatttctctctcttatggggtcatttttggaaaactattattttccttagaaattatctatttcatctagatttttcaaatttatttgtatttaaaagtttgtaaagtagttgcttaccgtgattaaaattttgttgttgttttatgat

SEQ ID NO: 242953 - DNA, 400 bp, Homo sapiens
gaaagtgctttccatacttaaagaatgttctctttttgttttaaaaccacatacgaaattatgccacaatcactttgggattctagggcagaaagagttaattaaattgtaatcctaggctaggcgcagtggctcacgcctgtaatcccagcactttgggaggccgaggcaggcagatcacaaggtcaagagatcgagaccatcctggccaacatggtgaaaccccgtctctactgaaaatacaaaaattagctgggtgtggtggtgcccacctgtagtcccagctactcgggaggctgaggcaggagaatcgcttgaacccaggaggcagaggttgcagtgagccaagatcatgccactgcactccagcctggtgacagagcaagactctgtctcaaga

SEQ ID NO: 242954 - DNA, 356 bp, Homo sapiens
gtggctgtgcctatctcttgccaggcactgctgaaagaatgaaacagcaaaactcttgccttcagggaatttgcatctccactgtctctacccaaattctggttctcatcgtgtacattttcccagcagcctgctaacaaccacccgtctcttccctcctcatcctgcagccacagtgacctttccaaagcataaatctgatcatgtcactgcctgattgaggccctgaaacagctccctctggcccatgccagccgatctcaaatgacgctcagcagaaaacaggtgctctaagttgaaccaagctgggcatcactaatattaactaatgatggacttttcttggttgtcagaaa

SEQ ID NO: 242955 - DNA, 386 bp, Homo sapiens
aagatattttcactggttatagaattcagggttggcaatttcttacttttaccattgattgattgactgactgattgactgactgactgagacggagtctcactctgtcacccaggctggaagtgaaacgccatcataaaaaaaaaaaaaagaaagaaagaaagaaagaaagaaagaaaagaaaaagaaaaaaagatattttactctcttctggctctctaccatgttctgataagaagtgagcaattaatcatatcattgttcccctatatatggtgtgtaattttttcttgctgctttcatgattggttctttataatcttcggcttttcacagttttaccctctgatgtaactcagtgtagtcttccttgtgttcattctact

SEQ ID NO: 242956 - DNA, 360 bp, Homo sapiens
aatgggttcacttgttgtattaaaagtccccacctttcagtaaatggaatttgcattatgattcagagatgtgtgtctagaaaacatcttaaaggcttcggatgagtagctggcagagtgggtgagaagccaataaaaaacaaaggccccacagcctggtccatgcccatcggcctagctaactctcttaattcagttcttgtggatttctgctgttaggaatcaatagctaagtatcattgaattgcttttctagagaaagtgttatcatcatactatgcatctgtgtgggtcttcaagttaggttttggtcataaaagttttatggctttccggcaatgcacagtaaaccagtgataa

SEQ ID NO: 242957 - DNA, 247 bp, Homo sapiens
aaaagagagagagacagagaataacttgtgaactcttaattcttaatacaaattacatttggttgagagatcagtatatccgtatttccccatctaaagttcccatagccatcagtcaagggagggaggagaagaagcactttccagttcatcctggagggggtggagttcagacactgcttctaagagcagtcccccatctcttcactcaccctgctttattccccagccaccctcaccctcattt

SEQ ID NO: 242958 - DNA, 364 bp, Homo sapiens
attacaacagactgcatggccctcaaagtagaaaatactatctggctctttaaggcaaattgaggctgggcacggtggctcacgcctgtaatcccagcactttgggaggccaacgcaggcggatcacttgaggtcagggatttgagaccaggttgaccaacggggtgaagccctgtctctactaaaaatacaaaaaaaaaaaaaaaagctgggtgtggtggcagatgcctgtaatcccagctattcaggaggctgaggccggagaatggcttgaacccagtgggtggaggttgcagtgagcggagatcacaccacttcactccagcctgggtgaaagagtgagacttcatctcaaaaaaaaaaa

SEQ ID NO: 242959 - DNA, 594 bp, Homo sapiens
catagtaagcctttttcagcttcaaattgggtccgaaattagattggtgtgtagaatccaaagggtctcatcttaagcttccctaacatttaagggactcagaatggagattcatcccaaaccaaatggggtgtaaatatgagaagaccacatgtttataaaaacagaacatccaacaattcattcaaacacctgcagcctttatttttctgatacttaaggtgctgtgttatagagtgccctataatcctctaagttatgaaacaggtagaacaagtattgatccatccttgtagtcaatgatatatctatgttgttgctctgttgattagtgtccatgaaatcactttaaaacgtgatatctgaatgtttcaccaaatatcaatattttaaaggaagggttctttgtactaaaacttatagaagcaattaggtacacctcactacttacttctcctcttcccctaaatcttccatttgtagaatcatctagatggacactgcaccacagaactttctgcagtggtgggaatgttccatactgtcctaatacttgcaagggatggctactgagcactcaaaatgtgactagtg

SEQ ID NO: 242960 - DNA, 473 bp, Homo sapiens
cgtgtctgtgcagcatggcacactgacgtcaggcccacgtgcatgcccaggtggccagtcacacgccaggtgctccctcagtgttggccaagtgagaggagcacaccttccgggcgttcagacacctccccgtggcagacaccgttcgttgctaccaaacagccacctccttcctaatgggctcccatttttcagtgctgggcaaaggtcccttgatcttggagttgcagcctctttctctccaaggagggcggtgaccagcctgagccagtcaatccagtgattggttcaggagtagcctgtgaccaggagtcctggtagtgaacgactggggcagccctgggggtgaggaccttgcgcagccgtcacaggccctgattggacactgggcagctgctaacccagtgtctccagctgcctacctggagagctccaagcgtaagaaaataaaccctgcctgttgaagccaaagc

SEQ ID NO: 242961 - DNA, 472 bp, Homo sapiens
tttccaggcgtcaggtggtgtgtggtccatggcagacttctctcggcagacacaaagggttgggtacgcctgcagtttcatgcaggtcaggcctgggtgcctaccactcacaggaggatgatttctctcttcttgttacctgcctgcattttcccatccccaggcatagaagataatatgttatgccccgactgtgctaagaggaataagaagatgatgaaaagattaatgacagtagagaagtagcagcaacctgtttgaatacaatgtactaaaggagggatgtactttcagatcatgtaacctattacgaaggagtggaagaggagacaatttgaatgaatcctcatgatctacaaaacaaaatcatagtgactaggactccacagtgaagatggttgactagtgacacagccccatctaaagaatccctttctgtatgtctgaaaacccattaaaataaagtcactgc

SEQ ID NO: 242962 - DNA, 270 bp, Homo sapiens
atacgccgcccgccggctggcggctggggggggggccagccccccctctccttctgtgcggcgctggtactaaaggagggatgtactttcagatcatgtaacctattacgaaggagtggaagaggagacaatttgaatgaatcctcatgatctacaaaacaaaatcatagtgactaggactccacagtgaagatggttgactagtgacacagccccatctaaagaatccctttctgtatgtctgaaaacccattaaaataaagtcactgc

SEQ ID NO: 242963 - DNA, 259 bp, Homo sapiens
  misc_feature (16)..(16): n is a, c, g, or t
atttacaatattattnatataatgaaatatattaataatattctctgtgtctttagtactaaaggagggatgtactttcagatcatgtaacctattacgaaggagtggaagaggagacaatttgaatgaatcctcatgatctacaaaacaaaatcatagtgactaggactccacagtgaagatggttgactagtgacacagccccatctaaagaatccctttctgtatgtctgaaaacccattaaaataaagtcactgc

SEQ ID NO: 242964 - DNA, 250 bp, Homo sapiens
cgagagttcgtgtcccagatcgttatttatataattccttcctctagtactaaaggagggatgtactttcagatcatgtaacctattacgaaggagtggaagaggagacaatttgaatgaatcctcatgatctacaaaacaaaatcatagtgactaggactccacagtgaagatggttgactagtgacacagccccatctaaagaatccctttctgtatgtctgaaaacccattaaaataaagtcactgc

SEQ ID NO: 242965 - DNA, 428 bp, Homo sapiens
taattactgccactgggtttgtcgtgagccatcgcacctggcgaacctacctatatctttctttgaatgtgctcagaccaagggtcttatcttaaaggaatatcagaccagagcaccagacctatggctgagaaacaccttttttaccccagcacacattttcccatccatccattcatccatctccaacaaataaccttacacagcttccccactctgaaaggtagataccatatctgtctactttatctccaaatcatagtccatagccagcagagcgtaaccaccaaaggaatatttgttcaataaataagtgaacagttataaaatgcccactatattggcatagtcatacatatatgatgaagcacagtccctgccttcttgatactcacagttgtttttcaggatagctttgtaccccatca

SEQ ID NO: 242966 - DNA, 470 bp, Homo sapiens
tcacatccaacaaagtgcagcctaagaataaagaacaggtctttaaaccgcatacctttaattaaggtgttcttattttttctgatttggctggaaacaggcagagaccaccccagataaccagttctcagccttgcgtgggacaccacgagtcccacgtgtttacgtgtttaaggcactggcaagcaggggaatttggtttctgggaatgtgctgtctttgtgaaaactgtgaaaagtcttccctgctacattgaaataatcataaaataataatagctaatgttgaacacttactatgtatcagacacatgctaagcattcaatatttctcatccagtttctgaatgaaaccttcgcaaaccacataatgtactggtactattagctacgaattacatataagaacacccgaaagttgttgtcatttgcccaaggtcacccagctaataaatattgaagagattcgaa

SEQ ID NO: 242967 - DNA, 188 bp, Homo sapiens
cattaatgtaatatgtccctaaccattttaactttttttttgtaaattttaaaaaaataaatagccaaattggtggcacacaccctgtaatcctagcactttgggaggccaagacaggtgtatcacctgagatcaggggttcaagaccagcctgattaacatagtaaaaccgcatctctactaaaaaa

SEQ ID NO: 242968 - DNA, 628 bp, Homo sapiens
agatgaatatccacaattatctttaaaagctattaaaatactctttgctttccaactacttatctgcatatcatcagattttctttatatatttcaaccaaaacaatatattgcaatcaattaaatatagcagataagtaagcttcttccatgaaagagatttacaaaatgtaaacaatattattattctaactaaactgatctttatctgaaaaatatttttcatagaaaatatgctatttaacacataggtttattattttaaaataaattaatgcataaatattaaattttttctcagttttaatttctggttcagtatatactgatagataaaatccatataaacaaaacctctttggggtctttgttaattactaagagtttaaaggggtccttagactaaaatgtttcagcacctctaatctactatactcccatctcatctctacccacatggataatttttagcatctagtcatattccttattttctaccctttacaacaacctttgtgaactcaatatccatattcatgatccatatgagactaagaccttggagttcttcctcctcctaaacttcattccttgacaattgcctaccaggaaagccatttctttcttt

SEQ ID NO: 242969 - DNA, 412 bp, Homo sapiens
gaagtacttttatgtggcttcagcaatggtggctcaacagatgagatggtttcaagagagattacagactggcaaccacccttgggtctgtctgttccttcctttttttccttttttatgaacatgggctgttacaatcaagtcaaacacatctcagcagctttgagtctttgggccctacctcccgaagggaggaccaaaggtcaccttctttgttcatctaacagatgagtaaaagatacactgcagcccccagatgatctctgcctcattccagaatcaggatcaactttgaaacaattaacaagttgtcgtctcttagtcctagaggacttggagtctaattcagttctactttagctttttccaaggtcgtgccctaactttatgcctgcagttcttcatcttaacc

SEQ ID NO: 242970 - DNA, 687 bp, Homo sapiens
aacaactaagaatcaaatatataaaaataaccagaaaaagaaaacaccaaaatggttattctcttagttcatgattttgaaatattttgaaattttcagattgaattttatcctcttaaggttcaagttgtatttacagccaacaaatctagatatccagatatcctggttctatcaaaaggggaaagcctcaaattcttttgaacatccaggatgtcttaataaactccatgtgacaatttaagagtaagggaataaaaatcaggcagatagaatttttaaaaaaatacacatgggttagaaaataaaggtagagagaggcttggcacagattgctttccattttgccaaggcctgaaacatttaggcaaaaaataaaataaaaatagttgaaactatatgccaagttccaaatatgatttgtcttttcaatatgtaaaaatactggagttaactttttctggaatgaactcgagcagttaacaatttcttaaatgagggaaaaaataaatataagaattacaatatgtttgtgctgactaatctttgactgggtctgacttaaagatcttgtattcttgaacttatgaacttaggtttgaggcagaacattagcagaggattcctcttactatttagtacactgtttacgtgtggagttaataaacagcaaacttacaaaaagag

SEQ ID NO: 242971 - DNA, 945 bp, Homo sapiens
tttaaagaaaaggccttctaggatgctgaatgcaccaaatgtaaaagaactataagtgtccctgggaatgaatgactcatgtacagcagtcttgaatggtctaactacttattcatagagcaatacagaaacaggactcacttgctcaatcatttctttggctataggccaaatgcctgtacaaccatttaaaaaaatcaatttcacaggctaacgggcatggtgggagccagagctatgcacactggactcagaacagaactgggcagcatcagctttataagctgatcagttcctactatcttgaagcaagaggtagctattgttgagtcactagacagctcatttaggtcagagttaaaatccatattcataaaactgcctaaattatacagagtctacagtattttcgggtttaattatctttgggctaataaaaagtaagatataaataaaatggggacatattaaaatagttttgtttttaaataaatcatgagattctctattcactttgtctcagcaactggagactaccaatacccttgatggaaatgctatgagctaaaggaaaacccaacagtcttagattatgtatcagatgtgcatcttgtggccccagtgtgttcatgccaagtcacatggtccgcctcgctcccccatccaccactggggtgggcacctgagtaaggggaacaactctatgagtaaccagaaacctacaccagtgttcctcaaactctaatgtgcaaacaaatcaccagggggttctgttaaaaggtaggctgggattcagtaggtctgcagtgtgacctgagaagctgcatttccaagaagatctcaggtgatgtccttgatactggtccccagtgtgcacttgaagtaacaaggatccagacatttagcctgacaggcatgaactgagagagaatgtaagaaggcgaa

SEQ ID NO: 242972 - DNA, 401 bp, Homo sapiens
tttaagatttgtgtttgagtgctgagtctttccctttttggggggatgactttggtcaaaaggtttggtcacttaagatttctgaagtttagttttctgatctgtaaaatgaaataataattcacagtcttataggaatgaaaagggaatgtatgaatagacaggagtttaattttgggataaattttactggttgtttcatcttcatcttgttaggctcttttaatttaggcagatgttagatgatcagatcaacttggaaaaacaatatttgagggaacatagaaaatgtcaagattcttaaaatgacttgtactatctattaagatgaagagtttccaaggcgaataaaaaaggctcatgaaacaacgagcagttatctttgaaccagagaggaaaac

SEQ ID NO: 242973 - DNA, 395 bp, Homo sapiens
catcagagctgtccactttgggctaaaatcatccaaccttatcccctcaatggatgtaggctgccacaggatgggcatgaccttgattgaagcagccctcagctgctaaagtgtggacagctatcttctgaccgcagtccccacagctagtgagcacactctcactgaaagggtatctaggccgtgtacttccatgcttactacacactcttttgccctggaacattgtaccattgtgccttatcttatttgctttttgattgttggacttatttgcattctataagtttcataagcaacttaataatttttgtcttattccatattgtgtgctcagtatacagcacaggcttgacacacagtgtgtactcaataaataataggttgaatacatg

SEQ ID NO: 242974 - DNA, 354 bp, Homo sapiens
gctttttattgtaaaatgggaaaaattaatacatttagtttccctaattaataataatttaatttccctttgctactcttcagttaaatcttcttttcttaagaattaattttcaggataaactttaaatgttctttataattttttcatttgttaacattagaatggtgtgatttcttctgatttttcattcggaaattcaatattctatgtagaggttaaataggattttgtaagtcagctctcctgagacttcatgtttgtaaaactgtctgtgtatcccacaaaactgatacaaacaaactcgcagcacaactcctgagatgtttgatgaataaaaaattaaaactgtat

SEQ ID NO: 242975 - DNA, 522 bp, Homo sapiens
gtgtgtctctgcctggtgtgccaggcatgtggccctgggtctgcgtgcatgcatatgtctgtcctccaatggacagggcgctaggatgcctctgagggcaagcagtgtcctcagtggaggatggacgcaacacagtagagatgccactcaaggccgtgctaggatggaagggtgctgcttattatcccactctttccccaagggtagtctcagctcctaatgcgcaatgtcatctggttttcagaagaaattgggattgattgtggcttttcctggggtatccccatgataacaagtcaccagtggctgtagacatcccaccctggctggtgaggaaatgggctgggcttctgcctctggctctgcccttggctgtgacctaggcaggtcatctggcctctctgagtacctcctctatcactaagattaactgaggtatgcagcagcccttaggactgtcaggggatcaaaggaaacccagtcacataacagtgggaatcataggacagaaaagaaagaaaa

SEQ ID NO: 242976 - DNA, 579 bp, Homo sapiens
ggaatctcaaaaaacgaacaaaaatttgtcaaactggcatattcttgggtcagtctagaatcctattgcaaggctttttctttctttaaatgggtagtttggaacaaaagcagaggcttggaggaaattgctgctatttggctctagttggttttattcagctgagttttagcttaaatttaccttacttggaataaaatatagaaatgttcagaaaacgttccccttatagattttatgaaatgtaaattcttcctttatattctctttgaattacatcctttggaaactcaagaatgtgctatggatctttgttaatctctttctcatttagtcatttttggctgagctctaccaaactttccaatgtgttactcagtttggggaattattctgattcttttggttaagaaatttaaggttaaaattgtcaatgtttgcctatttttttttttaaaaaaagaagttggcagcaaaagtcactaaactcccagattttgagtgaactgattaacatgtaatttcagtttttatggaaagaaatttggaatgttgtctacttcctcctaatttaggtgc

SEQ ID NO: 242977 - DNA, 304 bp, Homo sapiens
atctcctctgttttttttccctcttgccatcagaaaatattttgaaaagttaagggctttttatctttatgaaatgtgagcacagaagaagcaattctagtcaaaatatagtcctgactcgactgtttttatttttaaatattttcttatgcttttaattgtattcaaagaattactaggtttctagtttcttggtgctgagaagagatttgctaattcaatattgtcctcaaaaaaacaaagtgaatagaattttactacagaaagggatgccaattatatatacacaatttaaaattttttc

SEQ ID NO: 242978 - DNA, 631 bp, Homo sapiens
atataagatcatttttttgaatgttgtgtttgtcatatccttaagaacatcactgaaaatataactttataggcaatcagctaggtatgctctgccagtgtctccttaggcttctttctctagaggggtgagggtaatccttccctggggtagtggccagggaagacagtgtcagtctcttgtgggagtgaactggaaaccgtttgacctaggcgaggagctgaccctgggggcaagcctgtaccaattcccccatctccatccttgaatcaacctttgatcccggaacttgggatgaaataaacagataattgtctattttttttccttctcttacaccaaagttgaaaggaagtaagaatccagggtgagagcaagccatttgttttctcctatttttatacttcagcagtgggcaccctccctgaagactatgggaatagaccttactttaaggaaggtccctggaagttgttcatttcctgcataatagtccgttgattcttgcatttgctgcacttacgttctagttcattaaaagaatctaggctgttccttgggggactcatcaaaaacccacatttttatgttatttcagttttaattcagtttttaaaaatttatgcagaaa

SEQ ID NO: 242979 - DNA, 375 bp, Homo sapiens
ctgaggtggagggattgcatgaacccaggattttgagaccagcctgggcaacatgatgaaaccctgtctctaaaaaaaaaaaaataaatacaaaaattgggcgggcatggtggtctgctcgtttagtcccagcagctacatgggaggctgaagtgggaggatcgcttgaacccagaaggtgaaggttgcaatgaggtgcactccagcttggttgatagaatgagagaccctgtctcagaaaaaaaagacactgtctgatttacaggctgtattttgaggcaggaattaaatgcagtagtttttattataaatgtgtcagatatggtggctcacgcctgtaatcccagcactttgcgaggctgaggtgggcagatc

SEQ ID NO: 242980 - DNA, 751 bp, Homo sapiens
accctgacttctggagagggagagggatggagattgaattcaatcaccaatggccaatgatttaatcaaccatgcctgtgtcatggaacacaggaaacctaaacaacataaaaatccttaacaacagggtttggtgagcttctggattggtgaacacattgaggtggtagaaggctagagttcaggagatgacatgggaagacatggaagctttgtgtcccttcccatataccttgctctctgcatctcttccatttggctcctcctgagttcgtgcctctcaacatccagcagaatgtgggaatatctatgccttgataggtcttcagttactcatggtgaaacatattgctgagttgagtaaatatttccttccataaaggtaaataagcatctcaagagcaagtttctacattttgtatttccctgttttatttctgtaaaattgtgcaaccaagaattatgacctactgatattagaataaaatttgcagaagtttgaaaaaaaaaaaacaacagaaaacagtaaaaaaaaaaaaagaaaaccagagataataaaagacaaaatttcctccgcaggaggatggacgcagcggaaaaagagggcgcagaagccacatagaaagggggggccacacgacaacacgtttttttgcacgccgttaagagggggaggggaacaccgcaaggtgggggagaccacgcggggaagaagactgcatggagaagtaatatcgcgcaaaattcccag

SEQ ID NO: 242981 - DNA, 453 bp, Homo sapiens
accctgacttctggagagggagagggatggagattgaattcaatcaccaatggccaatgatttaatcaaccatgcctgtgtcatggaacacaggaaacctaaacaacataaaaatccttaacaacagggtttggtgagcttctggattggtgaacacattgaggtggtagaaggctagagttcaggagatgacatgggaagacatggaagctttgtgtcccttcccatataccttgctctctgcatctcttccatttggctcctcctgagttcgtgcctctcaacatccagcagaatgtgggaattctctgagttcctgttttggtgctaatcttcagtgtgtgtttctgaaagtaaccatgatgacaggaagcatatttttctgtatgcctatgactggtgtctgactaccctactggtactagagattaaaagacactttcctgtaattaa

SEQ ID NO: 242982 - DNA, 709 bp, Homo sapiens
accctgacttctggagagggagagggatggagattgaattcaatcaccaatggccaatgatttaatcaaccatgcctgtgtcatggaacacaggaaacctaaacaacataaaaatccttaacaacagggtttggtgagcttctggattggtgaacacattgaggtggtagaaggctagagttcaggagatgacatgggaagacatggaagctttgtgtcccttcccatataccttgctctctgcatctcttccatttggctcctcctgagttcgtgcctctcaacatccagcagaatgtgggaatattgctgagttgagtaaatatttccttccataaaggtaaataagcatctcaagagcaagtttctacattttgtatttccctgttttatttctgtaaaattgtgcaaccaagaattatgacctactgatattagaataaaatttgcagaagtttgaaaaaaaaaaaacaacagaaaacagtaaaaaaaaaaaaagaaaaccagagataataaaagacaaaatttcctccgcaggaggatggacgcagcggaaaaagagggcgcagaagccacatagaaagggggggccacacgacaacacgtttttttgcacgccgttaagagggggaggggaacaccgcaaggtgggggagaccacgcggggaagaagactgcatggagaagtaatatcgcgcaaaattcccag

SEQ ID NO: 242983 - DNA, 1034 bp, Homo sapiens
accctgacttctggagagggagagggatggagattgaattcaatcaccaatggccaatgatttaatcaaccatgcctgtgtcatggaacacaggaaacctaaacaacataaaaatccttaacaacagggtttggtgagcttctggattggtgaacacattgaggtggtagaaggctagagttcaggagatgacatgggaagacatggaagctttgtgtcccttcccatataccttgctctctgcatctcttccatttggctcctcctgagttcgtgcctctcaacatccagcagaatgtgggaatatctatgccttgataggtcttcagttactcatggtgaaacatgtaagccttgaaaaactttttgtatggagttgtgctgggaagcagttttcccaccagggacaacatcttctagtccttttacatctaagtagtaccatgagactggatcatgccaaagaaatgttttggaagtgagatgtttcactttggaaccaaggaactgaaaaaacagatagagggagcccaagccaagaagagaggtctggtatcaaagatttgctgaattcacaattgaagaggcttatgtcagtcccttagaaagaatttgaggactcctcggaaaattgctgagttgagtaaatatttccttccataaaggtaaataagcatctcaagagcaagtttctacattttgtatttccctgttttatttctgtaaaattgtgcaaccaagaattatgacctactgatattagaataaaatttgcagaagtttgaaaaaaaaaaaacaacagaaaacagtaaaaaaaaaaaaagaaaaccagagataataaaagacaaaatttcctccgcaggaggatggacgcagcggaaaaagagggcgcagaagccacatagaaagggggggccacacgacaacacgtttttttgcacgccgttaagagggggaggggaacaccgcaaggtgggggagaccacgcggggaagaagactgcatggagaagtaatatcgcgcaaaattcccag

SEQ ID NO: 242984 - DNA, 487 bp, Homo sapiens
tataaatgctttaatttctctttattaaaataaaagcaaatataaaaatatcacctagaagataatatagtacaataataattatgtggtaatctgaatctatacctccagctagcatcatcaaaatctaagatggaagctctgggaatgggtagggtgaaggaatgggtggaaacagtatgagtggaaatgagggctgggatggatttcaaggcatctgacttggactactaatcatttgaaactggggtttgtttatgccctgaaaatgaaatgttattagtcaagtgaggatgattattattttaggtaatgctattccttaaaatatttagctaagtgacttcatggcttttaggcaattacataatttctgcattttgtttgtttttgagcctggttgtctctgagttcctgttttggtgctaatcttcagtgtgtgtttctgaaagtaaccatgatgacaggaagcatatttttctgtatg

SEQ ID NO: 242985 - DNA, 441 bp, Homo sapiens
acctaaaggcaagaccctcaaggttggagacgaagtatcttctggatgcagactgggaaaagtgattagcagcaaatggtcaagatgaatgggtagagacaaaacgtggctcaccaggagggtggtgactcactaatcttcaagaatgtatggctaaagattcaaagctccttactaaaatttagaaaaggcccataatggaaggaactaagcaagttttgccttttgctacctctgaattcattatgttgcctgtacaagtagaacacatagcaggaactgtgttttaatactaattacaattattttttggttacatagataaatgtaaataacattaaagatgtgatttgttcctggacgccatttttattttttttgtcaaaaggagggaaaaagaatggcatcaaaataccaaggttttgtttttttttttcctta

SEQ ID NO: 242986 - DNA, 434 bp, Homo sapiens
ttaacaggggttcttgctctgtcacgcaggctggagtgcagtggcatgatcgtagcttgctgtagcctagaactcttggcttcaagtgatcctcccacctcaacctcctgggtagctgggattatagatgggagccacatttttttctattattctgcttccctgtcctgccttacagaaaagtagctgtggaatgactaatatcctctttgctctcttcgtttctgctttcttcagccgtcctctgcctacaaagctaactccttctgctcagctcatcagaacacttattatattttatggaatgaagtgttgcccaattctagaactacaatacagccaactgagctatttaaactgtttgttgtaattttgtctgttgacaacataaaatagatcctttacacaatatgttcatgttgacttgaaaatct

SEQ ID NO: 242987 - DNA, 1734 bp, Homo sapiens
aaaaagaaagtgagctaccaagaaaatatgaggcaaagtgaaggaaaagctcgagtcaaaggaatcccaagtctcaccaggtgatcctttaaaaattggcactacttataaaaaacacaaagtgttgccattctcaccccacgcttaagatcaaggagggtggcacattctctctctccctcaagtcaaaaagaacaggcacattctgtctttcccaatctttttctttctgtcatcatcttggaacttatcaaaggtggccaaagtgcatccactctttagaaatagccaaagagctataccaaagacatctttatgtcaggtctgcttgaagtttcaagtctttaagagttgggaagagtaagaattcctttggaccatggtgtctgtcctacagccaggtgaaaactctccagactcataccatgaaggtatgcatccaaataataacaatgtaatgaaattcacttttaaaaaggttagacatagaaaaagaaaatcttaaattatcagtatctttaccagattacaaaggtcatgttttttggttcaatagtttgtattaatgcagactaatatcagttagtaaattttgactagttttcttataagcatgataaaatgtccttacaggctttgtacatcagagcagaaataaaaagtaccattttgagattagacactttcctccaaagaatgtgggaatgcctgtttgtaaatcattttaatgtaaatgaattccaccaaaatacagcaaatgttaacataattacagtgtctacaaaggaaaatcaccctatcagaattatttaagtgtaaaggcattttaaagtcttgtagttcaagaatgagatataatcaatttatactacatagaacgtcttcagtctgaccaaatgaatcctgaaacctcacctgcagtagtaacactcacctagttgccttaactgaattccagaaagtcccttatggcttaatacaatttgatcaattactacatttaaaagactcaagcatcagtaaaagtaaccatgagttgattatattaagtctcttccaaataagaatatattcttctttgttttttttaaagagtgatatgatagaacatagttccaaggcattctaaaaggaatgtcttttggggaagcaacaaacaaaaaatatgctttttgtttcttgcaatgtataaaacaagcactgacttttatgcatgaagacaactgctttcctttggaaaaaaaaaaaaggaaaaccacaacaacaacaataactataatctttggtaaaaattcatctctttggggaaaaaatttgggaaagaatgggtaatccatatgtaatagatgcaaatcacttacctttacaaaacagctgatcttctggaatcagccttatgaagacatctgcactgtttttatttgttctgaccataaacttgctttctaaatgtcagtaaaagccttctaacttaatgaggatttggaaggcaatttccattttatggcctcaatctcagaagagatgtaaatttcatacctgaaccctaagtaaatatcttttctccatttggcacacaaaaatgtgagagctcaatatgtagtatttgttcctgtattaacagaatgcaattcaaaacagcatattcagtaatgaacccttaatgctaagtaaaaagaaaaaaataatatagtgatctggggtcaattatgggaatccgtattgggagttgtt

SEQ ID NO: 242988 - DNA, 492 bp, Homo sapiens
agtcttttcttttgcttttctttggggttgttgtgtatgcaagagttcatgtttcctaattcacatttagcaaccagtgtgtttcttgtagtccttagaaataagttcacagaaatcaccatgacattcttggctcttgaaaattcttcagttttctaatgcattcacacttataaaacttttttactgaaaagaaaaaacagaataaaaaacaaaaaaacctaacacacatgcttattattttgttttcagtttttgcatgtgcaaagttctatttttaaatgtaacttatttcaatatggtcttgtcctgtccttggatttaatttagtagactttgtctttgaatgaattttcttatgaaaatgtggcaattttattgtatgtatgtacaaaatctgttctttaaaatgggaatagttttatatagaaatgaaatatcaagaaatctaattcttgactatgatgaaggatttttgtataaaaaaaaaaa

SEQ ID NO: 242989 - DNA, 374 bp, Homo sapiens
cattgtgttacaattgcctacagtgttcagcacagtacctgctgtacaggtctgtagcctgggagcaataggctattccgtacagcctcagtgtgtagtaggctctgccatctaggtttgtgtaagttcagtctacgatgttcacacaaagaggaaattgcctaatgacgcctttctcagaacgcgtccgtattaagtgacgtatgactgtatatagatatacacatctatccgcatatgtgtgactgctatgtgtgtgatgatttgtgagtctgtgtgcatccatatgtctgaacataggcacacgtgtgtagatatgtctttgtccatgtttctctacttcagtgtttgcatgccacgcggatgctgagttc

SEQ ID NO: 242990 - DNA, 704 bp, Homo sapiens
ccaggtggaatggcacgtccattaaatctctttttctttgcaatttacccagtctctgatacatctttatcagcagcatgaaaatggtctaacacaggtctctccccaaaaatatagagagctggaggtttttcttagagatatgaataaagggtgtgagtgtgagtgtatgtgcaaaaatatggataaaaccttgaaagtgctgaatggcctgtagcaagaagtgatgtcttctcatagatgggtggcaggggctggtggccgggagagagagcagtgggacttgggagcactttttgtgggtatgtaatggagattccaccagcaacaagctaaaccactcacaagcgggcccagaggaagtaaatagaacactgtggttgaaccatccttggccttctgcagcaaggatctgcaacctggaaggggcacagaaacaaccaaagatgaaggctctcagagctgaggagaggccaggtcagaatatcagaagtcaagaaactgcagcacctctaacacaggggaggctatgaagttcatggttctggatgtctgctccctgggttcaaaccttggtcctgccacattagttgtgcaacttggaaagttacttggcttttttgtatctcagttttctcttctgttaaatggcactaataataaatgtctcacatgtccattgtgagaattaaatgaaaaaatat

SEQ ID NO: 242991 - DNA, 505 bp, Homo sapiens
gtatccacaatagcatatgataaacaaataaattgttttgggagtggttatatgattgagttgagatttttttttttattccatgtttgacttagggggagaaagtagacattcccaaagtatatcctgcattagaggtagaaaacaacccagaagtatgcagggtgagtagaaggatatgtaaacatttccttccaataatcaaaaaaatagataatatacatgagattaagagactattacaaaatctttgaacctggaatgagtagaagtagtaagaggtacaggtgggggaggtaggattggtagattaagacattgggattccagtaaatatgtatgaaattgctgttcctggagatttgggaatgaatgagctatgtagctgtgtacatctaggaagggacagacacttttcttttgctgttatttttgagagaccatctggtggaaggtacaactaagggaccccctttagggtattttcttgaaggcttgagttgaa

SEQ ID NO: 242992 - DNA, 159 bp, Homo sapiens
aggaggtgagctcaggaggcaatgcttgctcgccactcacctcctgccacggactggtactggtccatggcctgggggttggggacccctgtagcaggtactatgacaggaatctaaaaagaaaaagacctaaaattttggagccaaacagctctgtgg

SEQ ID NO: 242993 - DNA, 430 bp, Homo sapiens
ctctctccataattctttcttttctgctcataatcaccactctgttttccatctctataattttgtcattttgtgaagctacatgaatcgaataatatagtatgtgaaattttgaggttttttttatattacttaacataatacccttgagatccatccaagttattgtatatagcaataatttttccttgattgctgtgattaccttttgttgcattgtagctgaagagttttacatttaaattgttgcaatatccactcaataatggactgaaatgaaaaccgattgaactgtgcacatgcattgtgaaaacagtagataagaaaacacaattggaataactacactttcttcaaatctaatgacaaaatctagaaggaatgaatagcttccctaatgctataatctgagtctgaaaacttccttcct

SEQ ID NO: 242994 - DNA, 477 bp, Homo sapiens
cagccaggtgtggtggttcacactgaaatcccagcattatgggaggcagaggcaggcggatcacgaggtcaggagatcgagaccatcctggccaacgtggtgaaaccccatctctactaaaaatacaaaattagccagacatggtggtgcacacctgtaatcccagctactcgggaggctgaggcaggagaatcacttgaacctgggaagcggaggttgcagtgagctgagatcgcgccactgcactccagcctggtgacagagagagactccatctcaaaaaaaaaaaaaaataaaacaacaacaacaaaacacacacaaaaccaaagaaacgtcaaaggggaaatgctacctgaatgagcaaggtcaaagcacagagtgtggcagaaacacacagggacactcaaccctattcactcatttgacagacaacgtctgatcaaatttaagggattttcctattaagaaaaaagcatc

SEQ ID NO: 242995 - DNA, 412 bp, Homo sapiens
gaggaaagacagagagcaacaatgatttttttttttctgattaaagaaaggctcagtagatttcaaatacacaaacagcacattttcgtataacttttccccttaaaaaccaatatctatgctatctgaggagagacagatcaaaagtaaggaacttggaagggcatttgcctgctaatttgctccctgacagacttctcttgacagagatcaaaagctgaaaggaaaccgcctgctaaagcttttgatagataacggtccagagactctgtaggattctcattttttctctacatataaggcttccacctgtctgaagtggaagttttcttctcaagtgtgaagatatgatcaagcttatattaattgccaatagacaaatctaatgtccaataaaaagttacctgtaagt

SEQ ID NO: 242996 - DNA, 846 bp, Homo sapiens
actagagtaatgcttgcaaggaccttgtctgtttcacatgctggttgttccatggtggcagaagtgggatctgatgttctacatcttgcataactaaaaaggtagcatgcactaaacttggaaagatcttaaatctgtaccctgaaaattatcccacattcgtggaaaaattagtatgcctattagtattgtcaccatgcaagaactgcactggcaatgaagacagtgatgtaagaagacagaagtgagtccagacacaggatccattgtctaagcaactgatgggagaaatggcttcgtgactgtcctgaggcaatggtggtgaggcaggaattaaacacctcccagggatgaaatggtgtcaccttgtattgtgtttcaccttaattatctccatgagaacttcacacatgtattaaaaaaacccaacatgacacattcgtaaggtagttactatctgttgcagaatttcatgtattatatttgtgccctaagttagccattattatcccaattttatagttaagggaatggaaactcaaaaaacatatggcttgcttacagagctacacaacttgtgggagaggagctgggattgggactccaattttgggactctgtgttcatcatgttttttggtcccccatgttccccttctttaaatgactgagtacatgtcatttcaaaaacttgtggccttgggcaatggcaggcagaataggaagtaaatatgtctcattttccctttgtgatttctctatggttccataaagaaataaacacatttaaaaggttagccatttgcctttgcctgagtaaagtataaagttttttaaaaaagcattt

SEQ ID NO: 242997 - DNA, 316 bp, Homo sapiens
ttattaaacaaagctacatgtttggcattttggagggatgggttcaaagacatggcccttacccttatagaattaaaatttagtgagagagactgactgttactgtgtataaaaggcatgcagtagttaagtgcccaaggtgagatgtaagtaaagagagtaccataggcatcactaaacatcactggagattcactgttaaatcccagtaatagcgagataattgttcctttttcctttaataataacttgcttttttcttgaattgattttagtaatctgtatttttaattttatatctctggatattagctga

SEQ ID NO: 242998 - DNA, 961 bp, Homo sapiens
tagagtgtacagggagatgtgggtagataacatgcaaatatgtaattttataaaagaaacttggcatgtgtggatttaggtatgatcagggactgctggaattaatcccctgcatatgtcaggggaaaactgtatttgaaataaactgaaatcacttaagccttcaccacatggtttacattcatagagtttatttctttttctttttttttattttttttgagatggagtctcactctgttgccaggctggagtgcagtggcgccatctcagctcactgcaatctccgtctcctgtgttcgagccattcccctgcctcagcctccagagtagctgggactacaggtgcgcaccaccatgcctggctaagtttttgtattttagtagagacagggtttcaccatgttggccaggatggtcttgatctcctgacctcgtgatccgcccacctcggcctcccaaagtgttagggattataggcatgagccaccgtgcccaagccatagagtttatttccaatgtgatttgtttaattttctcaggtaaaataaaattaatgaatgctttcccacattccacacatttatagagtatctttccaatgagtccttttgtgtctgtgcaaggagctgagagaactcaatgcttttccacattccttacattcacatagcttctttgcggtatgagttctttcatgtccttgaaggaaacgggaatgagtgaaggctttaccacattgtttaccttcataaggtttctctcgagtgtgaattctttcatgttgtagaaggcaagtgagccaagagaatgctttcctgcattccttacattcatacggcttctctccagtgtgaatcctttcatgttgctttaagtgaccaaaatgactgaaggcttttctacatgtttgacactcataaggtttttctgctgtatgatttttttatgaagagaaagg

SEQ ID NO: 242999 - DNA, 450 bp, Homo sapiens
gtgcagtgggcagaataataattcccccaaagatatccatgtcctagtacccagaacctgtgatatgttacattacaaaaggaaattaaagttgcagatgaaattaaggtagctagtcagcaagccttaaaataagaatattatccaggattatctggatgggcccagtataatcatgtgggtgtttaaaagcaaacaggaaagcagaagagtgggtcagagagagaggcaacaagagaaagagggcgagagatttgaagcatgagaagaactcaacctaccattgctggctgaagacaaaagaaggggccatgagccaaaaaatgtgggtagcctctagaagaagggtgtccagtcttttggctttccggggccacattggaagaattgtcttgggtcacacataaactacatgaacactaacaatagctgatgagcttaaatttaaaa

SEQ ID NO: 243000 - DNA, 394 bp, Homo sapiens
aagtggggaacatcctgtaagggaggtctaagtatggaacccattttacaggtgaggaaattggggctcagagatactgagaacttacccaaagtcacagtgaatatgcggcagagctgggttggagcctgggctccctctgccagtgaccctgcttctgtgaggagagaagagcactctcaagacctcagaagactcctgggcagaggagacaaatcccatcagcttctaaaggaatgaaggcagggtgcagtggctcacatctgcaatcccagcactttgggagctgggagtctgaggcaagaggatcgcttgagcccaggagttcaagaccagcctgagcaacatagtgagacttcatctttacaaaaaaacaaaaaccaaacaaacaaac

SEQ ID NO: 243001 - DNA, 414 bp, Homo sapiens
actacagctcatttagaaccaaagggagtggcacaaatcacctgttttcctaattctcccatttccagttataaagtaagacattctcataacctggagttttttcttcaggaagcatgtaatattggtggcgtctctttgtcatactttgaatttactagctcctagtttcagttggttcttcaacaagggaattaaaagggtcagatagggtagcattttccaggcaaaaagacacagtataggcaccatagcagtttgctacatactgtcctaagtcctcttagggtgtcggccttttgttctcatctaaagaagtttgcgcttgaacctaggaggcggaggttgcagtgaaccaagatctcaccactgcattccagcctgggggatagagccagactctgtctcaaacaa

SEQ ID NO: 243002 - DNA, 403 bp, Homo sapiens
tctttttctatggtctagaatgatttgattttaaaaacattgaaccaggtgtagtggcttagtctgtaatcccagctatttgggaagctgaggcagaaggatcaattgagtccaaaagttaaagaccagactgggcaacacagcacaaccccatctctaaaaaatatttttgttggatttatttctagatattttacattttgtgttattgtatccccttaaaattaggttttgtatctgtcttgtgttaatagaaatgcaatcgacttttgcctgttgattttatgtctagcaatcctgcaaaatttttaattttcttataatttgtagcagactctttgagttacccatgtagagaattattgaatttataaagtatgacaattttattttttcctgagta

SEQ ID NO: 243003 - DNA, 689 bp, Homo sapiens
ctaaataaatgaaaatcttaacattttcccaaaaataagtaatttttaatactcatgtaaactaaaaataatacacactccttcccaaatgaaatttaaatatgtaattttctggagttactgtagtaatagtttatgatatgaataatctccccttccattaatactttttttattatatgagttagtttcttacatggttttccatagtcacatttgttaaagagtccagttgatgggcaaattagcaatcttatcctgggatgcatgaagactttccaaggaaaacgcagacaaggaacattctatccacaaatagcagaatacagtgttttcaaatgttcatggaaaatacaccaagacagaccatagtctgaaccactaagaaatctgaaaattttttttaaatttgaaacatatagagtatgttctctcaccaccatggaatcaaactagatatccataatggaaagaaaataggaaaatctctggacacttgaaaagtgaacagtatgtttctaaatagtggttcaaagaaataaaaatacattgaatggaagtacaacatatcaaaattctgagattcagctaaagtattactcagatggaaacttacagtactacatgcttatactggagaagaggaaaagtctaaaattgatcatctaaaatcctgtctcaaaaaaaaa

SEQ ID NO: 243004 - DNA, 591 bp, Homo sapiens
ctactactactaaattcgcggcccgtcgacatagtttatgatatgaataatctccccttccattaatactttttttattatatgagttagtttcttacatggttttccatagtcacatttgttaaagagtccagttgatgggcaaattagcaatcttatcctgggatgcatgaagactttccaaggaaaacgcagacaaggaacattctatccacaaatagcagaatacagtgttttcaaatgttcatggaaaatacaccaagacagaccatagtctgaaccactaagaaatctgaaaattttttttaaatttgaaacatatagagtatgttctctcaccaccatggaatcaaactagatatccataatggaaagaaaataggaaaatctctggacacttgaaaagtgaacagtatgtttctaaatagtggttcaaagaaataaaaatacattgaatggaagtacaacatatcaaaattctgagattcagctaaagtattactcagatggaaacttacagtactacatgcttatactggagaagaggaaaagtctaaaattgatcatctaaaatcctgtctcaaaaaaaaa

SEQ ID NO: 243005 - DNA, 249 bp, Homo sapiens
cccctttgggggtgggtgcaggtcttttcagggtcttgggctttctaactgtggtgtgtagttggcgggtttccttattctgcgggcacaaaggtgggcgtagggccgtggcttatgagcttttctccctgcagaaatgggtgaaatctgaaaaaaaattatagatatgtttacgtgttagctccaaagaagaaaataaatatgagaattgatattagtacatgtttaataaaaagtcctctgaccctc

SEQ ID NO: 243006 - DNA, 127 bp, Homo sapiens
gaagtggtctgccatctaacatgtctcaattgacattgaaattgataaaaagaaaataatccaggccaattggttcgtatttggatatattctagaaacaacagtgtgacaccttctcccactttct

SEQ ID NO: 243007 - DNA, 398 bp, Homo sapiens
tgccatttaacgtgatccttggaaaggtatttttataataactttagtttttaaatcaaatatttagaatgtcatggagaaagaacaatgatattacaaatgccatcataaaggaaccttagggagactattttaaagaaattttgaatctaaatatttaaagcttttcttattttataagtattttatgtatttgattggtaaggtaaagcacatacgtattgttaggtaaactcgacttaaaggaaataatacttttaaatggctacttaagatttcaaattttataaaaatatttaggaaaagtatttttccactttctaataagcagaaatagtttgcattacattttttcatttcagaactaaacagtgctattattcactacattaagccta

SEQ ID NO: 243008 - DNA, 489 bp, Homo sapiens
tgcagatggaataagtttgctaattagctgaactcaagataagaaaattatttggttgggcccaatataaccacaaatatcctaaaaaataaaaagaggaggtcagaaggatgtgatgtgagaaagactcagtctattgttgctgggtttgaagatggaagaaaggggccaggagccgaggaatgtaggtggcctctagaagtgagaaaaagcgaaggaacagcttatttcctggaggtcccagaaaggaatacagccctgctgataccttgattttagccaactaagacaagtattaggcttctaactgccaggaaatgctccgggcttagctcacacacccttttctttcataaagttcacaccattccaaccagctggaaatgaccaaccctctttgggacttaccacattgtagctaactcatggcccttatcactttccttttggtcacttgtgttctttgcttgattgtgtaaagtggaattt

SEQ ID NO: 243009 - DNA, 437 bp, Homo sapiens
gcgacactaaccaacccagtacagctgttaaagttctcaagaagtagacaaacgaagagttgacaaataaatgtagtacaagtggattcaaatttagttcagttttatctgagtgttcatagacattcggagtatccctttaaaggatgggtaggggccgggcgtggtggctcacgcctgtagtcccagccccttgggaggccgaggtgggcggatcagctgaggtcaggagtttgagcccagcctggccaacatggcgagactccgcctctactaaaaatacaaaaattagccgggcgtggtgacaggtgcctgtagttccagctacttgggaggctgaggcaggagaatcgcttgatcacaggaggtggaggttgcagtgagctgagatggcaccgttgcactccaacctgggtgacgagcgaaaatccatctca

SEQ ID NO: 243010 - DNA, 335 bp, Homo sapiens
aaatattccagtattgatgatttctaggatttctacatcatttaccaaattttttctctcctggtggttttccagctcagtcagttctaaataatttatcaacagattttgcaaaggctccactccacttcttatcagttctaggacctgagggtattcttacctatcagtggagatatattattccctttaaagataagggatatgttgtgcagaaagaatggtgaataataagtaaaaatattcctatggattataggagcctataatatatattattttgaaagaatgcctaaatgctgaaaattacgacttactgcactaatcatcatgcc

SEQ ID NO: 243011 - DNA, 455 bp, Homo sapiens
acttttataaatatcttttcattgtactctttgttaacattctccagagattgcaattctaggtctttttgtttgaagggacagtttaactttcaaggactcccatgaacttgtgcgttcctcagatttagtgtactcaagtatccctaatctgaacatccaaaattcaaaatgctctaaaagctttttgagcaccaacatgatgctcaaatgaaatgtccatcggagcattttggatttccaaattagcggtgctcaactggtatatattctgcaaatattccaaaatccaaacaaatctaaaatctgaaacatttctggtcccatatgttttggataagggatattcaaactgtttttgtgttgtaatgaaacaaacattggtgctatactttgattttttttcaatctttttaaaacatggatttataataaaaatatttttacttggctgt

SEQ ID NO: 243012 - DNA, 1147 bp, Homo sapiens
cgaggcaggtagatcacttgaggtcaggagttcgagactagcctggctaacatggggaaaccccatctctactaaaaatacaaaaattagctgggtgtggtggcacacgcttgtaatcccagctactcgggaggctgaggcagaagaattgcttgaacccaggaggcagaggttgcagtgagccaagatcccgccactgcactccagcctgggtgacagagagagactccatctcaagaaaagaaaaaaagaattcttatagctcttctatcctaagcattattcaagatacagagtacatactgaacaaatccaagttgacctatggaaagggatttaggttaagtatgaaggagaactatgtaactacaaattttcacaaacagtggaacaaattattttaagtttttttctcttattaagcagtggttcttaacctttgtgagagttgcataagccctttgagtatctgatacaagacaatggttttgttcttctcctgcagaataatgtgtatgtttgcatgtacatatggttctccatatacataaaagggcttgatgaaccccctaaaaactggttaagaaccttgcagtggaatttgcaggctagtatctgcaagagtgccaggcataaaaccacctgcagtctcagggctaaaaggatgagattttctcaaatcttgattattttgaatgtttaggcttaaataactaatcatctagagttccacagatgcctaaactatgaagtttttataaaactagagtttgactgaatcttcaactagacagactcaactttcccagaataattttattataatcaaaccatgttgaaggttctaaattttatttaacattagatatcttaaaacttgtagaatcctaaatggcctataaactataatccaaatgaaaggcatattacaaatattgctagctaaaaattaataattttttagtggcagttattttgtgctttttttcccccacatttaaacagtagactttatcttaagtggcctggtatcttctgttttgaaagtcttctaattaaaattctttggtccttgatgtctgtcagcattttttaactaaaggtcacaacccattaacaaccatgaaattggtgttgggaagaaaaa

SEQ ID NO: 243013 - DNA, 387 bp, Homo sapiens
taatttttgtattttgagtagaggcagggtttcgccatgttgtccaggctggtctcgaacttctgacctcaaatgatccgcccacctcggcctcccaaagtgctgggattacaggcatgagccatcatgcccggcctcaactgattttaaaatagagagagtatgctggattatccagatggattcaatgtaatcacagggtccttaaaagtggaagaaggaggcagaaaagaattaatagtagcagccacaagagaaggacttggctcgactttgacgaccttgaagacagaggaaggggccaggagccgagtaatgtaggtggcctcgaggaactggaaatggtatagaaatgaattctcctctagagcctccgcaaaaaactag

SEQ ID NO: 243014 - DNA, 512 bp, Homo sapiens
agcaaacagtggattccttccttagctagtataccactttttgcattcttttattttcaacagatagtaattttgcagctttttacttcttcaaccaaaccttctaagtaactttgctttccattaacaacaaagccgctcattaaggtggaagttctgtgcttgatcttaacaccggaaggagaggagtctatttaccagctaatgtaagtacttcttattagacagtcctagattttctaggagatttgaagagtctgctgacagtggccagcaaatcagaggaaaatcatttctgtagctaggttcttttttcatggatgtcctttaagaggaagctctgccgtggcgatgtgcgttccttcctggcgggtggcctccagtagctggccttctgttggtccggttccagcgtattttattaagtgaaaaatcctgtagaacagatggcacttacaagtttctgcccatgtagcactctgtttaatgaaatactatagttttgcttcatt

SEQ ID NO: 243015 - DNA, 401 bp, Homo sapiens
atgactaagagtttctgttgtgctgcatcctcaaatatcagcatttgatgtcagatgtttggattttagccattttaataggtttgtgctatctcattgttgtactaatttgcaattttaaaatacaaaaggttttaaacatttttttaatatccttatctgtacatctcctttggtgaagtgtctgttcagatattttgcctgtttttaaattgggttgtttgttttattattgtggaaaattcaccgttctttgtatattttgaaaataaggcccctatcaaatatgcattttaccataattttatcccagtctatggcttgtcttttcattctctttacattgatatttacagagaagaatgtttaaatttttaataataaagttcaacttatcaatt

SEQ ID NO: 243016 - DNA, 474 bp, Homo sapiens
tgtatagcccttgcttttgttaaacccacagaaactacagggggcaactaggaagtgcagggtggtatcttgaacaaatgagattctgagtcgatggacccaaatctagtcccatatctgctttggtttctgtgacattggggaagctatataaccttactgaactttacagatttcctcatttgtaaaatagggctaataataattttctcaaaggcattttggtttgtttaaatgaggtaatccaggtacgcaacagtttcttttgagagaaaatatttttctttaaaaaattttttttttactttaagtaccaggatacatgtacagaatgtgtaggtttgttacatggcacgtttatacctatataacaaacctgcaagttctgcacatgtatctcagaacttaaagtataataatttaaaaaaagaaaaaatgtaaaaaaaaagaaattaaaaagagttggagcataga

SEQ ID NO: 243017 - DNA, 477 bp, Homo sapiens
tgtatagcccttgcttttgttaaacccacagaaactacagggggcaactaggaagtgcagggtggtatcttgaacaaatgagattctgagtcgatggacccaaatctagtcccatatctgctttggtttctgtgacattggggaagctatataaccttactgaactttacagatttcctcatttgtaaaatagggctaataataattttctcaaaggcattttggtttgtttaaatgaggtaatccaggtacgcaacagtttcttttgagagaaaatatttttctttaaaaaattttttttttactttaagtaccaggatacatgtacagaatgtgtaggtttgttacataggtatacgtgtgccatggtggtttcctgcacctatcaacctgtcatctaggttttaagccccacatgcattagctgtttgtcctgatgctctctctccccttgcccctgcccagtgtgtgttgttc

SEQ ID NO: 243018 - DNA, 806 bp, Homo sapiens
ggggccttctttcgccagtaatgtcagaaaggacaaaggaaacactctcaagttcaaacctaaggcttgggccagagttttaaaactgggttggaaaaaaaacactgctgttgtttcttctatttttcctgatttgctgctgttcagtctcttattctagagaacttgcattgtcaaaatgaagccttggctccaagcaggaggtagagtgataaaagcacatcttctagaaagagatttgtagatgctgaacagataaatccttcctcaaaatgggcctttttgactatagttctcatttctgcacttatattctcatcgcttcttcaaaggattgtaaatcctctttttttcccaaagggatgtttcacattctttaaagtgtgtgtaaatgtttctcttaaggacttgttttttaatttttattattattggctttctaaatatattgcaatatcttacagatattgtattaatcacagctaagtaactggcaagttacttgcaagccggtaggcaatagctaagtttttcaccttaatttagttagtcataatcatgttattgatgtgccccacagtgatcactgagccaacagtcgattgctgagataccatttctgtttctaagtgcagttatccttcgctctgatttatccactgtaagtctgtcccctgtgtctgatgggcaatgaaataatatagaataatcatatcatatttcacttactgagagtttactatatgccagacattgcactaagcccttcacatatattttcatttgttcctcatttaaaaaaaaaa

SEQ ID NO: 243019 - DNA, 336 bp, Homo sapiens
tcccctgcatagcttggcctacatttcttgtttcttgcttaaatttcctgacaaagtgatgttaaaaatagagacaaattactaaataaatacatgcatatgcgtcatctaaggatacacagcaattttcagatatagcccatattaggatttcaaaagcagttgattataaaattgacttgcaacaataaaagctcaactataggatacgtcaataacacagacttgtcttgtcaatgtttaagatgactacttccaatttaacctccttcccattattgaactgtagcagtcaccatcccatagtcccatttttcaatcactgacttttatatg

SEQ ID NO: 243020 - DNA, 593 bp, Homo sapiens
actctttttataaggattccagtcgtattggattaagggcctgccctactccaatgtgacctcatcttaacttgattacattggcaaagaccctatttccaaataaggtcacatttatagttaccttaccagggtttaggacttgcatgcatcttttggggggatgtaattcaacccccattagatcatattatacctttacctataaaccttcagtggcccctgtggtctgctgaattaactgtagatgcttcatcttggtattccagaacttctgcactaataacaaatataataataataatagaaatagtcataactgacatattgagcactttccttgacattattcttagcattttacatgtatcaacttactgaatcttcacaacaactctgtgggttaggcactattattattcccattttatagatgtgtattaaacaaactgagtaaccaactcagggctctacaactattatagtctgagatgagattcaatcctagccagcctaactgcagtcaccactatattatactgcccatcttaactttttagcttcatactttctcccctacttatacagaaaaa

SEQ ID NO: 243021 - DNA, 375 bp, Homo sapiens
ataaccttatgttaaaagagtttcatgttttcttgagagcctttcatgctaaaatttctaaaagcccactggttgcacacagtggcaaaatgctacagtgatttaacaaccccaggcaaaattaaataacaaagctaagatatgatggagtacatttcttatccagtcgtaaagtaatctgcaatttcacaagttagaatttggtcaggacccagatgttaatttcagtaccaggcagagtgtactcaaggtttaacttatatcaaacagagacgaggtttccaggaccagccattgaaccccatgttggaatgcagtagcttttcctaaagcaaaatagcacactaccaacatcattgttcagcagcaccatag

SEQ ID NO: 243022 - DNA, 481 bp, Homo sapiens
tcaggtgagtttgagtgctgttcactggctcacccatcgatatttcatgcagtcattaatcgttcacagattatttatcctctgcacatgccctctaatattcctttatcttagttggttggcttgagttataagttccaatgcctacgagaagcagacccgtaatatagaaattaagagtccccaccatccccatttaacatagcactggaagtcctagccagagaaatcaggcaagagaaataaataaaaggcattcaaataggaaaagaagaagtcaagctatctttgctgatgatatgattctatgcctagaaaaccctaaagactgtgccaaaaggccctagagctcataaatgactttggtaaagtttcaggatgcaaaatcaatgtacaaaaatcagtagcatttctatacaccaataacattcaagctgagagccaaatcaagaacacattcccacttacaaagagccacaaa

SEQ ID NO: 243023 - DNA, 473 bp, Homo sapiens
gcacaagaccagaaaaatgaggcccagattggtcaggacttgactatgtcactcagtaaaactagagatgagtcttacttctccagtaagatcagagctgcaggctggtggtctggggtccatccaacctgagtcacacatttttcctaggacttcctattggactcagcagagactcactaaattttgaggtgtgacagagaaaggagccttcccttctaaggttctcctctgtttccccctagtctaacctctcacacggacaccaagatgtctggcctgatattaaggaagtcagctcacacaacccttcaaaattcagaagaaaatatatgggggttgctgcagaatgagctgccctgtctttcaactccatttcaggccttctgaagagccatctgaccttgcagcctctgccagttcttttcctcctccttccttcactcttacaggtgccttctgccctgaactgg

SEQ ID NO: 243024 - DNA, 585 bp, Homo sapiens
accagggttgactgtagtccaaggttagccttgctgccctctcagctctctgctcaggcttcattttctattgctttcggtagccactgtttctaccaggacattcacagtctggaagcagcatatggggaagaccccaagcctggaggcagaaggcagtgatttggatcccagctgaattgctgacaagcttctggctcaagagggccactgaatctctggcctgttattttctacctccttccacctcctttttaaaatgaaggtgccatgatcaaataagatataaaaacatattgtaaatattcccctttgccaatcagtccttcacttagacctccttagtcagttccctggtaaattattcctctcaaatcaaaattcttaactttatcttccttatatgaggttgcactattgtagagaactctcacagatgaactaattcatgctaatatattaatggaaacgatactcttccttcctccaaaaaactgtgtaatcacttatatattaaaggaagacattatgaaagtaagtgatttaaataaaggaatagtctttgatcaattaaaccttgaccaa

SEQ ID NO: 243025 - DNA, 361 bp, Homo sapiens
aagattttatgagataatgtataaaataagttcttaccaagtatcagctatgatatttatgatattttagagttattaattatactgtgaggattaaggaacttggcagaggaatacagtaggtgcttaaatggtatcctaaaatattatttaaaaataaatgacagtaatgggaataccgcaattacttttgcaccaacgtaataatagtaggatatttaaagttgagatcacaggaatcagtgcagatatgtctcattttaaccagcaggtggcgctcatgtcgtgtttaaattctgaacaaccttaaaaagtacatacatattcatattttctatttttaccagaaaaagtaaggaaa

SEQ ID NO: 243026 - DNA, 315 bp, Homo sapiens
cagcattccactggaggctatatgatcaaacagcaaactgtttatcatgaatgcaggatgtgagcaaactcaccattgctcctgccgacagaaggttttctggaggcaatcactccctggtgctgaggttatctactgcaacatttagagaatgtagtcttgcaagcctcctctggactgagcagctgacccctacttccactgcacccccccaactatctcttttgcctaataaatgcagagggctgtgtaaagctcagggcccttgtccactagaggcaaggtaccccctgaccccttcctccgaatatactt

SEQ ID NO: 243027 - DNA, 375 bp, Homo sapiens
gagttttacttttcattctctacccttctatgacagttgaatttttgaatttttaaatgaataaatgtgtgtgtgttgtgtatttttaaagttaacatacagactgagcgcagtggctcacgcctgtaatcctagaactttgggaggcgaatcacctgaggtcaggagttcaagactagcctggccaacatggtgaaacccttgtctctactaaaaatacaaaaattagtcgggtgtggtggcgggcacctgtaatcccagctactcgggaggctgaggcaggagagtcgcttgaaccaggaggtggaggttgcagtgagccaagatcatgccactgcactccagcctgggctgacagagtgagactctgtctcc

SEQ ID NO: 243028 - DNA, 474 bp, Homo sapiens
ggaatattatttatatgtaaaattgattgacagagaggcatgtaaggatgactaaaatgaaaagcatgagcctttttagggttagaatatcgggaaaactgaggcctgagctaagatgtgccataaaagctaaggacagtagcctagtccagtgatgtatgcctgaagttccagctatttaggagaccagggcgggaggatcacttgggcctaggagttcaagttcagcctgggcaacatagcgagacccttctgtactaaatacatacatacatacagctaaggataataaaagccctttgctcaagatacaaagacatttacaaagaaacatttgggccaggcatgatggcctacacctgtaatcccagcactttgtaaggctgaggctgcaggattgcttgaagttcaaaacagcctggagttcacaacagcctgggcaacaaagtgagactctgtctctacaaaaaattt

SEQ ID NO: 243029 - DNA, 450 bp, Homo sapiens
ttactcaagtttcatcagagaagtgggcatttgaggtaaggatgatgaacataccgatgaagcaaagaccagggtggaaagcgtctcaatctggcccccgagtgcccctcctgccttgatatttcgctgctagcatccaggcagaatcagaagctcaggggaggtgagcccagagaaggcacaaccctctttgtatttagggctttaagagaaacatgagcaaaatggaacacatttggggacagaggtgtctggaagagagaagtcttgcctgaaatttcaagagaagtggactgtaaggggtaaactatgtgacaaatttttaaaaacatcaataccaatactttttaccaatgtgaaaagacaacgtgacttgttctgtgagcgacagaagatttcagggttcagcaaatggcagatacagaaaagtgaatccttaggtaaattaaa

SEQ ID NO: 243030 - DNA, 916 bp, Homo sapiens
tataattgcaattacttttgcaccaacctaataattcagtatccctaaaaactgtcaaaaattgccaatgctgcctctatctcaagtcgtcacggcggggtattggggaaaattttcaactagtaataaacctcattggctatgatactgccactgtgcaaagcttggaaaggttctcttttaacagctgctacagggatccaggggaggccaaacaggcatggaagccctatactgcttctcaatgagcaaccaaggggcaaagatgcacagccctcctaacagtctcgtgggacatgccctggtgccggctccaggattttgctggggctgccagtgtgccttggagcaggtcagctgcatggtccctaggagctggggatggagacttctctccccagtctggcagaaggaagtccatgtactctgagaaaggcaccaaaggagggaatgggaaggaaaagggcccattctggagcaggtctttgcgatgaccagagaaggggccccctccctcgtgggaaacacgaggttcaaagcaacgtacaagctaggggaaccaactggccccacattcaggtgacctcagccctgggaggtcagcacagggtggggatcccagaacaggcccatctcacacaagctcaggggtggggatgctggtgggctgggggactcggaaaagcatgattagaaaccacaacaaattcctaaggttaaacatggattttttcagaaggcatttgtggagttttacaaatgttgatgtaccctcagtaaagggcaaaaatgctctagacttaaaatcatgttgatgtggccatccctagggagattttgtttccattttgtttgtttcaattgatttgtttccattttatttcaagcagcctttctttcaaactcaagccaaaaa

SEQ ID NO: 243031 - DNA, 641 bp, Homo sapiens
ctacaaggtatttcttttaactttctccacccccagctcccagcagtcaagagtcaagccctaagtcttgtcctttctgtcagaaatagatacaagaaggatacagcaaacactgctataacacctctctcataggattcaaatcagtgtggagattattataggctccagatgagttaggatatctttaagtctcaatttaataaaactaattgttttcctgtgctttaaatatctctccattctatataaatataatatagatctaacagatgtagtcttgaaatagatggctataatgtcagtgaagtatttttttccttatttatatacattataactttccttatttatgtacattataattttaaaggcctgatagtcataattattgatgttcagattggtagttatttctgtctcttatgtattcaactataaacatttaatcaagtttatgagacctagatatttagcagagttttggagtaaattattttattaaacaaagaatataaaataaacatttctacttatgttcctgttttaatttacctcatttatatgcatcttgatattgcattttcatattctaaaaactatttttaaagacaggttgattcagaattacagtgtacttg

SEQ ID NO: 243032 - DNA, 671 bp, Homo sapiens
aagcgcgtccagagtgaaataggtgccaggagcccgcagacttcaaattaagtgattaatactggcagccattcttttcacttctgcctccctgcctgcggtctgagctgtggaaagacggggctaccttcctgctctttcttgggcctaggacctgctggggagttgatgatgtggtttttatgctcatgaaggccttgagtttaaacatttgatttgtatcttcgctctctagttggggttttgattgttgttcttatcctgacaggttatcttagcctcatcccaggcaggtctcccctcacgccctcacggagcgtcagccagctggctggtgactggcttctgtgcggtgtggtcctacagaggaacgtgggggcccggaactccctcttggctaaatccatacctaccaaaattttgttttaacatctctgtgtgagaagatgaataacgtttaacttgtggaaatggttttttaaaagtatcctcagaagttgaggtttggagaaattactgagcatttatttctaaactcttgtctctgcagattggatggaatgcacagtaccttgtgtgtgtgtttaatttttgcttctcactgatgcctgggtggattttatttaaattaaaacctatggaccgtattgttttggattgggctaaaccgc

SEQ ID NO: 243033 - DNA, 433 bp, Homo sapiens
caactatgtgttttacaaaatgttctattattgcataaaactgtctttgctctatcaccttctaaagcttcttacactctttcttggtgttaagtcaaacctgcaaatgctttatctgttctccatatcattagagctccatcttccatacatattttaagatagaccttccctccacaattattacccccacagtcttaatgtaaccagtgaacatggacagcagcagtccaatatacattcacattatcaaaacatgatggaagctgtagatatgcctaaatgtccatgttggttaaatctagacttaagaggctctgctcctcagaagttggacttctgaaaaatgctgaacgagaacaagaatcagaagaagaaatgtgactttgatgagattccagtttttctagataaaccttttcttttttacaaa

SEQ ID NO: 243034 - DNA, 458 bp, Homo sapiens
caagaagagacagtttctagaattccatgaagccccgtagtgcctcccctgttaatgaacatctcattgcagctgttctggagttttctaaagtcagaagttgctaatattgagattgtaataacataatcccaatacagacttgccctcttcttccagagaaggtccaagattcagctttagcttcaccatggagtaacttccccaaagcacaagctaaactctgcctcactttcctcatccacaggaaatgggatgacagtttgcatcctaccaaccttacagattattctgagaatgaagtgggagagaatgttcaagagcgagcactgaagagtgtaagccctcttacaatgccaggcacatctgcagaattatctagtccctggcacaggctgattaacaatgaatttacactctgaggaaactaagaataaattcctcagtcttttcttcgg

SEQ ID NO: 243035 - DNA, 670 bp, Homo sapiens
taaaagcttactacttcagtttcaacactgttatcacccatctgctaatttccacaaatatacaaataaatgaaggcaacaagtgcagaaaacagtacctaaatagggtgatcactactttacagatctatctaaacctaagtttctctggataagcactgcatgtagagagagctgcttataaaatagagaaacttccatcatttataccaaattaaaaccagtatgtttaaagtataaaaaccactcacttcagacataatatcttatttcacaaaaattgcaacattttttatttttatttttttatctagacagggcttcaatgtgtttgccaggctgtttttgaactcctggcctcaagtaatcttcccaccttggcctctcaaaatattgggttagaggcagtagaggccatgcccggccaaaaatggaaacttttgaacttcttttcttaaagaatcttcagtccattcacaatcatgaataccattatggcttcacagtagaaaaccatttcaaataatttttaaaaacattaaataagccgggcgcgatggctcacacctgtaatctcagcactttgggaggccgagggaggtggatcatgaggtcgggagatcgagaccatcctaacatggtgaaaccctgtctctactaaaaaatatac

SEQ ID NO: 243036 - DNA, 630 bp, Homo sapiens
atatcattataattgctcagcctcccaataagattttattctcttccttgtgacagcgaagggcagtacccaagagaggtatcttccttatttgccctcaccccaccactccttggactccactttcctattatctacatggcagtagaaaagccaaacactaatatcaactagacaaagaaaggaaagtaaattaactcttactttcttcttttacttttttatgaaacagagtcactttatcacccaggctggagtgcagttgcacaatctcagctcactgcaacctccacctcctgggttcaagcaattcttgtccctcagcctcccaaatagcagggactatagacgcgcaccgccatgcctggctaatttttgtatttttcggtagagatagggtttcgccgtgttggccaggctggtctgaactcctggcctccaatcgcccacccacctcagcctcccaaagtgctgggattacaggagtgagccaccgtgcctggccagctctcactttcatggtgacactagaaggactgataccaggattttcccacagactgtctgcccatctggggagccgtgactctcagacttaaatcaactacaaagaataattgtttgtagttg

SEQ ID NO: 243037 - DNA, 580 bp, Homo sapiens
taatctgtaactaagaggcaacaagaaaaggatgtgttctaaggatcacaaacttattctaagagttaaagaccccttatttagcatctgcgaggcaaaaggagaatgcaattaaacccttttacaggaaataagcataacctataaaatgactttctatacttgtgtctttttcatcactacaaagagtaggcactggtgattagataacactttctaggatgtgagatgacagcaaaaaagggacagccctacttacctttcggtctagaagagggctggaaagattgcctttctactgataacagacaagttacatgtgacagtgatgtggatacacctgcagtgacccctgcctatgtcccagcagagaggccacgagcccctgctgtcaacttcctgggaaggagacctctggaaagttggtgtttccaccattcaagttccctcgcacactccatgactgaacagcggtgtaaccttcagcaagttccaagtttcttaagctctctgagtcccagttttacttcctagtatgttgtaagaatcaaatgacagactgctggtgacacatagtaat

SEQ ID NO: 243038 - DNA, 317 bp, Homo sapiens
tgagctttgtcatttctctgagggaatcactgtcatttctcttccaggctcaaagcagctccccctgccccgtgtaaagcgctgatgagatggcaatttaaactgctttgatgaccaggtttcattaggtaagaaggcccgattaagcaacggtggcccaaataacctcagtggttcagacactgtttttcaaagccagcagaagtcttgccaaattaaaggatgtcaggatgagatgctatgaatatcagtttccttctctctggcaatggagaggattaattaaatgcctgtgaagtgctttgaaaatttaagct

SEQ ID NO: 243039 - DNA, 329 bp, Homo sapiens
gaatatcttgggggttcaataactattgctgagcccaggtccatgggcttaaccactactctagcctgctctgtgaggccaggggccaagttttgctcactatttctgaatcccaagtcccctgacatgtgtctgctgtaaaggacatgttcagttaatgctgaaaaactctgtgcaaggggcatctctggatggatctaataacttaagatttccaggtcacaaaaattcagagctgtgagaatccctggagtatttccagaccaacacactcatttttcttttattgttttgtttcacagaataaaaacactcatttttaatgtagg

SEQ ID NO: 243040 - DNA, 513 bp, Homo sapiens
cctcaaaagtggggaagctgacagtgcagccttctgtctgtagtcaaagttccaagagtcccagagctgatggatgtggagtctgatgttcgagggcaggaagcatccacctgggtgacagagcaagactctgtctcaaaaaataaaataaataagaagaaaaaaaataaagacttctacctcaactagagcacagactccgtgtgaggatatctgattttcagtatcaaatgctctcattttctagtgtcagatccctcatttgtagagtgtaaggctttggctctctttacggctgctcccagctctaatgttcttccatcttctctgcagtcatctcacatgcagggctctttaggggacagcaactttattttcacaaatcttacatagcccaggtgcctgcatgggttcactctgtcctttgaataaaatagtctcaaataaatgcttttgttatgaaatgagagcaacagaaaacagaaagatgaggcatttaacttaagcaaccag

SEQ ID NO: 243041 - DNA, 380 bp, Homo sapiens
ccaagtacataaaggatgcaagggtttctcaggagatcctagtaccgaacagacaccgaacaaaagctggttaaatgaccgttctctgtctcatcaaaagtaaattaacaaacgagctggatagctagtacaatttctactcaggtcttatcctagcatgactaaatatcatactgcttatggtctctgccagagaagaaaatttaagaaatgaagatattgcaaagatgggtaagaaaatctaaaatgaaatgggagtggaagttatttacacaggaataagacgacattaatgaagaaaccgtgcacgcagatataattgccaaatatattgtagcactatgggaggcctaggttaatcacttgaggatcaacctgag

SEQ ID NO: 243042 - DNA, 930 bp, Homo sapiens
gaaagagagatcagactgtcactgtgtctatgtagaaggggaagacataagagactccattttgaaaaagacctgtagtttaaacaattgctttgctgagatgttgatcatttgtagctttgccgcagccccttcctttgacccaacttggagctcacaaaaacctgtgttgtataaaatcgaggtttaagggatctagggctgtgcaggacgcgccttgttaaccaaatgtttacgagcagtatacttggtaggagtcattgccattccctagtctcaataaaccaggggcgcaatgcaccgtggaaagccacagggacctctgcccttgaaagcagggtattgtccaaggtttctccccatgtgacagtctgaaatatggcctcgtgggatgggaaagacctgactgtcccccagcctgacacccgcaatgggtctgtgctgaggtggattagtcaaagaggaaagcctcttgcagttcagatggaggaaggccactgtctcctgcttgcccctgggaactgaatgtctcggtgtaaagcccgatcgtacatttgttcaactctgagctcggagaaaagctgccctgtggcgggaggcgagacatgttggcagtaatgctgccttgttattctttactccgctgagatatttgtgtggagagaaacataaatctggcctacgtgcacgtccaggcatagtaccttcccttgaacttaataatgatatggattcttttgctcacgtgtttgtttttgttgttgctgttgaacttccccttattatcaccctgctcccctactgcattcctttgtgctgtaataatgataatcataatcaataaaaactgagggaactcagaggccggtgccggtgcaggtcctaggtgtgctgagtgccggtcccctggacccactgttgtctccctat

SEQ ID NO: 243043 - DNA, 313 bp, Homo sapiens
ctcatccctcacatcagcagtctatctccctgagcaagttgtccccatttggggcacctaacctaaatgctctcaacctagggaagctgtgctgcaatttctttagggcccaggctgacaccatctagaggtactttctcacacaaacgtgttacagatttgccaactactagacaaggagtgcacacttttgttgtgagttagaatatagacctgaacttggcatgttaattgtagagctcatttttaatgtgctcagagacctaggccacgcacagtgcataaaagagtaaaggcctcagtctaagtaaga

SEQ ID NO: 243044 - DNA, 585 bp, Homo sapiens
  misc_feature (455)..(455): n is a, c, g, or t
  misc_feature (536)..(536): n is a, c, g, or t
  misc_feature (568)..(568): n is a, c, g, or t
gggagacacgttttgttttaatatagggggattaaaatgatctctgagaccccggggctcccgttttgaatgccgagcactggagtaacaaacccaggagtgggcccagtgctttcttcttcaaagccctacttaccacaacaaaatactttgcattccaatccagaagatggctatagaacagggctttttgtctttctataattctgaagggttatgggtctgaatcttgatgggctgcctgtagggactaaaatcaagcaagatggatttgtcacaatcctggtgatacatgttatattttgcaaactgtattttatagtgagcctttgaagaaagacacctgattccatttggaaaaacactccagaataccatatctatatctatattgtttacatcattataaagtttaaggtcaaactgaatttaaactttcatagggtacatttttncttttatggtcagtgctttttgtgtgttgcaagaaatctttacctacccatagaattgccttggtgcctttgtcaaaatcnattgaccatatatctgtggatctggataatcnaattatgtcattggatc

SEQ ID NO: 243045 - DNA, 431 bp, Homo sapiens
caacttcacagaaaccgttccccaacgtgtctctgcataggctgcaacagagtcaaaagacaacttgggagtttgaagatgcatctcagaaggagaaagaagaaacgggacttggtcgcggatcggttaggacacagggagatacagaatgaggagagtcttctagaatccagacaaagacagacagaggaagggagggagaaaggaaatggagaaaagagacagacagaggaagggaaggagggagggaaaggagcagcgagggaggaagtgaggaaggaaatgagaaacagagagagacagaattttaaaaatctagagaaagaagtataaagaaagagagaaagagacatagaaagggaagaaagatgaaagagataaagaataaggaaagaaatagaggaaagccaggaggaaaaaacaaaggaaag

SEQ ID NO: 243046 - DNA, 414 bp, Homo sapiens
ccagtcagtgtccccctccccgtgaccgtgctgtactgtgattcttacatgtattgtatgactgttctctcataaactttgttttcatgaggcagacttggaaagatcttaagacattagtgaaaaaagcaaatcacaagccgggcgcagtagcttacgcgtgtaatcctagcactttgggagggtgaggcaggcagatcacttgaggtcaggagttcaaaaccagcctggccaacatggtgaaaccccgtttctactaaaaatacaaaaaaattagccaggcgtggtggcggacgcctgtaatcccgctactggggaggctgagccaggagaattgcttgaacctgggaggcggaggttgcagtgagccgaggtcacaccactgcactccagcctgggcgatagtccgtctca

SEQ ID NO: 243047 - DNA, 392 bp, Homo sapiens
tcaccatttgccactcttgtctgtgattgagacacccgaggcccattcaggatggagagtaattttttctctgtcttaacttgaagttttaaatagaccacagacgccaagtatattttggttcagcttttaaatagaagtcgcaggccagccttcgtgccagcagcgccatcgctggcagcatcctcctcctcccctcacgcggagactgacttggggagagtcaggaaacatttgagagagcagctgccgaggtggaggctgtgatgtatcttggatgaatctctgtgcaaacagttctttgggttcaagacctagtacagggcgatcctttttgttttttctgtctgaatcattttggtggaataaatagcaaaacattcccacaatag

SEQ ID NO: 243048 - DNA, 518 bp, Homo sapiens
agcgatactgatttctacgaagcatgaagcttttgagctggggtggcctctatatacatctatgtggcattgtttcctgaggtattaatggaggactagaaaatatctcctggatcgctatgaggattctctttaaacacacagctgatacatctatgctaatatactgcgtttcttgttttacatctctccacaaagcaaaatggtacaagagatggcctagttcgccttacgaatgtcaacatccagcttagccccaagatcattcctaaagactaagtgttgcaaatatcaaacatttaaaaattaagaatggctgcataaaatctaatacagaagagcaataaaataaaattagtcatcaatggttaaaatatgttatacattaggatagttaaaacaacattgtacaggtacatgaatagacaaagagacaatagaacagaatagaaaataaagaaacagttaccagtgcatgacgggtttgccatttgaagtggcattttaaatcagtggga

SEQ ID NO: 243049 - DNA, 805 bp, Homo sapiens
gttgagttcaatgctgtctcttcatctgtttctgttataactgcaggaagcagagggtttctgacttctcaacatggtaaaacaaacaaataaacaaacaaaaaccaaacaagctcctcagcaaaatagaggcatgaataagaggcaaacatacatgtagacagacaaattattgttgtgtgagactcatctttgatttcaatttgggaactgagttgagttcaatgctgtctcttcatctgtttctgttataactgcaggaagcagagggtttctgacttctcaacatggtaaaacaaacaaataaacaaacaaaaaccaaacaagcccctcacccacaggtgactgtcaagcctttgttccctttgctgccactgaagccagactggcgcatctgagtaggtttctgggctctctcctacctctatgaagtaattctaggctcactgagaagtgactcctcccactacagctcaccccctaatgcatcaggcccacaactgaccagaatagacttcctttctcttttctgtctgctccctatggagcagttgagaaggttcatttgcatacatcttcatttattgtccttccaaagcctttgataccgagcacgctaagatgggtatcctcattttacaaagatcaaggcagagagaagagaagggactcgcctaggatcacacaattgacatgtcatcgctgtaagtattttaaatgcaggtatgactcccaaacctatgctctccagcactctgcttccaggttttcaggtcctgattgttggagaagagagggcaagggg

SEQ ID NO: 243050 - DNA, 343 bp, Homo sapiens
caggggccagagcctgaaccaatgcccgagagaccaggcaagccgctgactactgtgagcctccgtatcctggtctgtgaaatgacggtgaagacgtggctcctgccacccctgggctcagcagatgaggcccacagacacccaggaggggtggacaacctcttagaagtgagaatgcacaacagggcggagttcgcagacaccaactggcacagtgttcaggaggatagtcctgttctagggtcacattttcccctgttaaaatcagtttcctagttccaaggctctgaactcacagggctggacatttgcatttgaataaagggcagagtggagaattaca

SEQ ID NO: 243051 - DNA, 333 bp, Homo sapiens
tgggagcttggagaacaggggagtgactggggctctgaggtggaccctgttgatgtttatatggagatgtcagcaggacatccaggtgggggtgctgacaggcagcagcagacagcctggagctgagagagaggctgggtgggggatactgaccaggcctgggaacctcacacaagggagccgcagggttcagaatgtggccagctggttgttaaacacagccattattaaaactaaatgatgcaagtgtacaattaagtaacaccaagaaagcaaaggtaatttttaaaaactagtaaaagaagagcaaattaaaaccaaaggaagcagaag

SEQ ID NO: 243052 - DNA, 515 bp, Homo sapiens
tagacagtctcactcttgtcacccaagctggagtgtaatgacatgatcgtggcccactgtaaccttgaactcttgggctcaagtgatctttccagctcagcctcctgagtatctgagactacagttgttcgctgccacacctggctaattttttaattttttatttgtagaggtgaggggtctcgctgtgtttcccaggctggtctggaacccctgacctcaagcagtcctcctgcctcggccttccaaagtgctaggattatagatgtcagccaccacacccaaccattcctcttttcataagtcacaaattaaaataacttaggtgtctaaaatgactcaaacatttttaaagagtcacatgaacctcattattctctccacatatatcttaagttggtgaggaaattatttcttacccttttaaggtaattcatcaagaaattgttatcttagaagaaaaatgtcttgattttggggctaatttttagatttgtactgagttatttcttttt

SEQ ID NO: 243053 - DNA, 406 bp, Homo sapiens
ggcttgtatccagtaaataggtgatggtgagcttgcgaaccatgttttatagaagagtgacataattatatttgcgtttcagtgacacgtctctggcaactgtacgaaagatattatcatctaacatttgttgagtacttaacaatgtgctgggacccgtgctaagaattttgcctatgtcatctgatctcgccccaacaataatgctgtgaaatgggtactattattttcatactatttttactgatgaggaaattaaggtttagaaagggcatgagcctggagtcaggaagaaagtctacggttacatgttactgtaatcatggaatttctagaattacaagcaacacaggcaataatgatcattgactagaaggacatttggaaaagaaaacccagcgtttga

SEQ ID NO: 243054 - DNA, 392 bp, Homo sapiens
aatttagactgatcacaacttaacacatctaagacagtgaacttgaattttacattccaaaatatattacctcttcccatatgaaatacatgtaagaaaataatttcctcttaagcttttttatgtgatctaaagaaatggcaaaatattgggaggctgaggcgggtggatcacaaggtcaggagatcgagaccatcctggctaacacggtgaaaccccgtctctaccaaaaatacaaaaaattagccaggcgtggtggcgggcgcctgtagtcccagctactcggggggctgaggcaggagaatggcgtgaacctgggaggcggagcttgcagtgagctgagattgcgccactgcactccagcctggatgacaaagcgagactccatctca

SEQ ID NO: 243055 - DNA, 443 bp, Homo sapiens
attgacccttaattctgtgtgttatttgaggcttcttaccaatcagtttccctacttatctatgtccttattctaactcctcctactcacactttagtcctggattcaaaacccacctcctccacttctatccacactgacctctgtcccctattcctatagcatactcacggtacatctcattttggcagcttatttatcaagtgattactatgtatgctcaagtgaactagatgttttgtgaacactaagagaatgagataaggtccctgacctgaaggagggaacgttgctgttctgtcatgctatgtttcctgagagcaagccatgtatccacaggaaaatggaagtctacaggttcctccaggatgtctctgtgctatgtacatgctggaatttcagaaagacttgctaaattgaattaaattctctctctctctcca

SEQ ID NO: 243056 - DNA, 478 bp, Homo sapiens
gtacatcaacaaaatgtctaatttagatgtacactaggtttctgtggtctgattgggaccttaagaattgagtaccaatcctggttttaaaaattaaaaatagagatatttagagaatgcagttggaattttgttttgtaaatgaattcctaatgactcaaaatatttgcgggtttttttttattaaacttaactattgcattttatatctcaactcaaatttgtttaaatgtggctgagtaaaggacatttaacctcagcataaatacttgttagaattacttaatatttctacctatatgtgaatgtgtgcatttgtgtgtaagatatatacagagtaggtactctttcccttttggatttcagtaagaagttatgttgaactctaggattcaaaactttgaattgccagcaaaaccgtgtccaaatggattgtatgttttccctttataaataaagaacattgtatatcatttaa

SEQ ID NO: 243057 - DNA, 846 bp, Homo sapiens
cgacagagcaagactctgtctcaaaacaaaaaagaaagaaagaaaagaaacagacacatagaccaatagaacagaatagagaccccagaaacaaatccacacacctacagtgaactcattttcaacaaactgccaagaacatacactggggaaaagacttcaataaatggtgctgggaaaactagatatccatatgcagaagaatgaaactagaccactatctctcaccagatacaaaaatcaaaaaaaatggattaaagacttaaacctaagacctcaaactgtgaaactactacaagaaaacattggggaatatcgccaagacatgggtctgggcaaaaatttcttgagagtgtccctatgggcactgccatcatggcagaggtttggggctaaagagcagagaatttgtttcctgaagaagtgaaagttcaacaggcagggaatggatttcagatttgcatctggatctagattctgttcatctattctatttacatataaatactttgaggggaagatggtggataggagatagggcttacatgcagctcccacttggacagacagaacagtgtgtggagagtcacaccatggacttttgctccaggaaccaccacaggagcataccaggaaaactgaaggaattcacagacacttggaaagaagcggcaggccactgcaaattctgagagacaggtgaaaaactctggtgctctcttgaaagtgccacctcctggctggaggccaaccacctcaggacattacagcaactcatgacagatcccctgctccaaggaaggagaaaacaacagctaattctactgcctccaacatcctggctaa

SEQ ID NO: 243058 - DNA, 440 bp, Homo sapiens
agagccagatttgttattctgaagtttaactttcattttacaggactgtaaattgtggtctaggagcttcacctgaatatctgtgatcacaatggatactcaaaattattagacatttttaaaaagctgatttaaaaaacatgatgctggctgggtgtagtgcattagcccaaagtgctgggacgtgacaggagtgagccaccacacctggccactcgcaagaccttttatctgaaaaccagccaagctttattcacgacacacttcttcccttcactctcccacttctgtggtcaactccctgcagaactcccaaactgccgttcttttcgatagctcacgatggtgtatgagtgtcaatcatctgacccttcttggagtctcatatttcgtggaactcctgtgcaaacatatattattaaattttttttcctcctgtc

SEQ ID NO: 243059 - DNA, 406 bp, Homo sapiens
cttatttgatttaactattggacttaattgaacttaacaattaccagtggccatttaaaaaaaactaaagaaatgagactgtaattgacaatgggtcacatacttaaagttatatgatcctttttggtagtgctgcatctgttttaataaggactttaatcatctaagttgttctcaaactttatggatataagaaacactaataacatgcagattcttgggtgctaccactcaagctctgattccataggtctggagggaggcacaggaatcagtatcattttaaggagcactactgcttattttgcctttgtggtctatgggctgtactttgagaggtctgattaattaattaaaggagaagattcctaaaatttgagagacaaaataaatggaacacatgaga

SEQ ID NO: 243060 - DNA, 421 bp, Homo sapiens
tcctaaatatcctgattggttatacagtcatttggattaccatgagtccatgcaaatttacgacctaaaagaagctggcaaattgggttaatatttaaataataaccaatctgttcatttattttgatatattttatttagaatttggggtgaggagaaggtaactgtatctgcaataactgctaatggactttctcaatctagatttatggcagtgccattggatctatggaaactctgagaagtggctttagtttactcctgacagtgtctctggttttcaatttttgttctaccctttcattatcttctgctgatgttaaaagtgccttgatcttccttttctcagatttctccaataattattttcatccatctggtataggcttggaaacagatgctgtatgctcacatatgctca

SEQ ID NO: 243061 - DNA, 412 bp, Homo sapiens
atgtatatgtcctcagttatttttttcagtaagttttggctaaaaggtatagaatcctacactctgatagctataagccataagaatatttctctagaggaggtgtcagaacttgctagggcagctatttttgagtatatcattatgttatttgtgtttcttcatgtgcttttaaaaaaacttaaatagtgtgaaaacttttctctcctgatgtgtgagcctttccccttcacttatgtgactggaagtggtactactagaagtgacagcactttaaagttaaaagcttattaaaacatacctcccgtgagtaccactctaacaattacagtggctgtgtcttctctgtcctttttgctgataaaacttaggggaaaattcctggcagctaaatcatggccattttattaaa

SEQ ID NO: 243062 - DNA, 1190 bp, Homo sapiens
attgcattcatcaaaatttataatctgttatataggctctttgtgacaggaagcaattatattaggaagacagcttcagattctggttctaagctttcatgtgggagttacaaacttgtggccaatttagccgcctacagacaagtgttgggtagcccacactacgtttttgttttctaattgatttctttgttgttttttgtttttttctgagacagattcttgctctttgcccaggttggagtgtagtggcacgatcttggctcactgcaacctctgccttctgggttcaagtgattcttgtgtctcagcctcccgagtagctgggactacaggcacccgccaccatacccagctaatttttgtaattttagtgaagatggggtttcaccattttggccaggctggtcttgaactcctgatctccagtgatttgcccgccttggcctcccaaagtgttgaggttgcaggtgtgagccaccatgcctggcctctaattgattttttaatgtcttagatggagcatgcaatccctggttcttcctattgtgttaaattcctggcttgcttaggctccggtaagtagtttgggaaccgaagcttgattcttgtccatgaacttgttaatgcttcactgaaattgttaatcatcatcaaataaatatttaagcacttattcaaagataaaaataatgggattttcaaaattatcttcaagtttagcaaattatgatgtgaacgttatgaataatacttttaaattgctcactttaagcccttagcagttttgtgttttacagggctataatacatttcagaacctcatttaagcatttgagaagaaattagctaatgtttatctgcagggcatagttttgagatcataaaggccgacaatatttggtcaaattaactttgttcaggtttttataatatattagcttcaacttggcattgtcagtgactgaaaatctgtttgtaggataggtaaaactgcatggttctctcgcctgtggtgcatgtcctattttagcatttttggctgataatagttatttggtcttgcggccagcagatattttgctgtttattatagataacatggaatctggccagtcttttgaagccattatgtaaaacttaattatgtaaagccattatgtaaagattaaaataattttaatcatggt

SEQ ID NO: 243063 - DNA, 819 bp, Homo sapiens
attgcattcatcaaaatttataatctgttatataggctctttgtgacaggaagcaattatattaggaagacagcttcagattctggttctaagctttcatgtgggagttacaaacttgtggccaatttagccgcctacagacaagtgttgggtagcccacactacgtttttgttttctaattgatttctttgttgttttttgtttttttctgagacagattcttgctctttgcccaggttggagtgtagtggcacgatcttggctcactgcaacctctgccttctgggttcaagtgattcttgtgtctcagcctcccgagtagctgggactacaggcacccgccaccatacccagctaatttttgtaattttagtgaagatggggtttcaccattttggccaggctggtcttgaactcctgatctccagtgatttgcccgccttggcctcccaaagtgttgaggttgcaggtgtgagccaccatgcctggcctctaattgattttttaatgtcttagatggagcatgcaatccctggttcttcctattgtgttaaattcctggcttgcttaggctccggtaagtagtttgggaaccgaagcttgattcttgtccatgaacttgttaatgcttcactggaacaattggtgtaatccattccatccaacataaattatttttaggcctttatttccaaaggacttaaacaatccatcgcgggcttttccacaaaattttcctttcacagtctttaccaacattatgattgtggaacggtctttgcatacaaacttttcaaattggcccttttaaaccctaa

SEQ ID NO: 243064 - DNA, 682 bp, Homo sapiens
  misc_feature (622)..(622): n is a, c, g, or t
  misc_feature (625)..(625): n is a, c, g, or t
gctccacgagggttcagctgtctcttacttttaaccagtgaaattgacctgcccgtgaagaggcgggcatgacacagcaagacgagaagaccctatggagctttaatttattaatgcaaacagtacctaacaaacccacaggtcctaaactaccaaacctgcattaaaaatttcggttggggcgacctcggagcagaacccaacctccgagcagtacatgctaagacttcaccagtcaaagcgaactactatactcaattgatccaataacttgaccaacggaacaagttaccctagggataacagcgcaatcctattctagagtccatatcaacaatagggtttacgacctcgatgttgcatcaggacatcccgatggtgcagccgctattaaaggttcgcttgttcaacgattaaagtcctacgtgatctgagttcagaccggagtaatccaggtcggcttctatctacttcaaaggacatttaactggaaagtgcacttggacgaaccagagtgtaacaaaagcacccaacttacacttaggagatttcaacttaacttgaccgctctgaccaaacctagccccaaacccactccaccttactaccaaacaaccttagncanaccacttacccaaataagtataggcgatagaacatgagacccttgcgcatagatatg

SEQ ID NO: 243065 - DNA, 629 bp, Homo sapiens
  misc_feature (569)..(569): n is a, c, g, or t
  misc_feature (572)..(572): n is a, c, g, or t
gtctggagattgggatactgtaatacttctttgttattataacataaaagcaccactgttctgttcatttcctagctgttctaattaagaaaactattaagatgagcaaccacatttagaaatgtttattgacaggtcttttcaaataatgcttttctaattaatagccaaagatttcatatctaactttgtaaccagaattatacagtaagttgacaccacttagatttaaaggcagacagttttgctttagtacaaaaagtatacattttaaacagaatgaacttataatgattaagggacatttctataaaaatactacaatagttttatgcacaacttcccattaaaaatgagatttcttatttgtttgtctgtttttactctgggagtaatactttttaaattacctttacatatatagtcactggcatactgagaatatacaatgatcctggaaattgcaacaaaagcacccaacttacacttaggagatttcaacttaacttgaccgctctgaccaaacctagccccaaacccactccaccttactaccaaacaaccttagncanaccacttacccaaataagtataggcgatagaacatgagacccttgcgcatagatatg

SEQ ID NO: 243066 - DNA, 610 bp, Homo sapiens
  misc_feature (550)..(550): n is a, c, g, or t
  misc_feature (553)..(553): n is a, c, g, or t
ccttgttgcggtggcctcaagagtcaggaatcgagactcacctggtgtgacaaataaacctggactcagcaatgtcgaaagaaaccagccggcgacccaggggaaaggatcctcacacaccacagtgaccaggcaactctgtgcacagaccgaggaaggaaacgcctgggagccagcaaagtatttccttggtggttgggacagaccaagccatatccccaacttctagaagagggcctggtacacaggaagtgctcaagaggtatttgctggataaatactgattgctgtgtgacctgggacacagacatcgccttctctgggcttcaacttttcttactgggatatgaggctctgaccagaagggaggttcccagcctttctgctaaagacccctgaagactacctaagccccctgaagctgccggtgtgctgagatctcaaaccacaaaagcacccaacttacacttaggagatttcaacttaacttgaccgctctgaccaaacctagccccaaacccactccaccttactaccaaacaaccttagncanaccacttacccaaataagtataggcgatagaacatgagacccttgcgcatagatatg

SEQ ID NO: 243067 - DNA, 505 bp, Homo sapiens
  misc_feature (445)..(445): n is a, c, g, or t
  misc_feature (448)..(448): n is a, c, g, or t
aacatcgtagtcatggaagaagttgttattacacccccatatcaagtggaaaactgtaaaggcaaagaggggagtgcactgagccatgtacgcaaaatagttgaaaaacattttagagacgtggaaagccaaaagatactgcaacgttcacaagcccagcaaccacagaaggaggctgccctgtcatcctgagtccgtacacatggaggactcttccagcatccagccaaggaggcgctggtggtggcttcagcggaggcaggccgggggagggaagggatcctatatgtcctgttggctcttaacaaagggtcagcatttccaaatcttagacttgaacaaacaaaagcacccaacttacacttaggagatttcaacttaacttgaccgctctgaccaaacctagccccaaacccactccaccttactaccaaacaaccttagncanaccacttacccaaataagtataggcgatagaacatgagacccttgcgcatagatatg

SEQ ID NO: 243068 - DNA, 382 bp, Homo sapiens
  misc_feature (322)..(322): n is a, c, g, or t
  misc_feature (325)..(325): n is a, c, g, or t
aacagttttgttttactgtccactagaatgtaagttccatgtgagtactgtacaatttttgtctcttctgatttcttcattgggatctctacagtgccttgaaaatacatgacaaaatagtaagcactcaataaatatttgctgaatgagcaaatcaataaagggaaatagaccagtgaacaagaatgagtacatgctcaaaaggagcttccctttcagacaaaagcacccaacttacacttaggagatttcaacttaacttgaccgctctgaccaaacctagccccaaacccactccaccttactaccaaacaaccttagncanaccacttacccaaataagtataggcgatagaacatgagacccttgcgcatagatatg

SEQ ID NO: 243069 - DNA, 492 bp, Homo sapiens
  misc_feature (491)..(491): n is a, c, g, or t
caatatcgaattgagccttaccccttactgaaagacctttgatagattctgagggtagaatgttgaccaggatggagctgggccttggagagtggggaaggcaggcagtaacacagcaggcagtagatcaacgaggccatatcatggattgtgctgtgggatgtgaaggaaatgaacagacggaggacgcagagcagggcacctcgagctaccacggtcactaaaagctgctatgaccaagtgttctgtgagctgaaacctgaaggccaggaaggagtcactcttgtgaggggctgaaaggaacatcacagagaggggaggagctagcacaaaagctctccagatgggagaggctggtgcactgggcaagggaaagccagcaccatggtgcccagaagggaaggcagctggggggccagtctacgcagggccttgcagagtgtctgggtttactctaagggcaggtgaaatgggaagggtaccgagctcgnt

SEQ ID NO: 243070 - DNA, 379 bp, Homo sapiens
ggagctagcacaaaagctctccagatgggagaggctggtgcactgggcaagggaaagccagcaccatggtgcccagaagggaaggcagctggggggccagtctacgcagggccttgcagagtgtctgggtttactctaagggcagaggggaaggttttgatcataacgcactgcagtctgaaactcctgggctcaggcaatcctgtctcagcttcctgggtagttgggactgtaggcaggcaccaccacctctgcctaattattattatcattttttttggagagacagggtctcaatatgttgctgtgtctcagaggggaaggttttaagtcagggaatgattctgtgagcttaaaaaatcacttggaaattgccata

SEQ ID NO: 243071 - DNA, 377 bp, Homo sapiens
ctgattcctacatttcaagctttcttcaggaggatggtgacaggattaagaaggtgaccaaaaaaatctattatatatatgggattatttgccaagtggagagttcattttggagattttattggtagaaagtttggtttttagacataaaaaaatcttaaaagtgtaccttttaataatttagaaacacccactttgagttttgattaatttgattaattttgattaatttatatcaaaactcaaagtgcatatttctaattattttacattttacaatttaaagatatagtattgtatttgtgtaattcatagattttgtatctttttcattttattttcttgtgttatttataaacatctttcatatcaagttg

SEQ ID NO: 243072 - DNA, 340 bp, Homo sapiens
agtaaaatgctgtaaattggcttcttcggggatactgtcatctctaaagaaatcaagtaggccgggcgtggtggctcacgcctgtaatttcagcactttgggaggccgatgcaggtggatcacgaggtcaggagtccaagaccagcctggccaagatggtgaaactctgtctctactaaaactacaaaaattagctgggcgcggtggcaggtgcctataatcccagctactcggaaggctgaggcaggagaatcgcttgaacctgggtggcagaggttgcagtgagctgagatggtgtcactgcactctagcctaggcaacagagtgagacttcatctca

SEQ ID NO: 243073 - DNA, 336 bp, Homo sapiens
aaattatgtttgtgtttaaaatttaatgttcctggcccagggaggccaaattagtcctctgagtaattgagataatttttcatgcattctgagcatgcaaaattatcttctccagattactttgtctttgatatcaagatcagcttcatatggtttttattttctgaagataagctgtaatgtaattgctttagggaatctgatcatgtaaaaagcctgataggaaagagtttgaaaatgtaatgacattttttgtttcacttgccaactgaaaagaatatgtgacagagaccctttgtgtttctcaagtaaataaagtatttctgattttccaag

SEQ ID NO: 243074 - DNA, 443 bp, Homo sapiens
aatctgtttgaatatttctcctatttctcttatctgtgcatgtatagaaaagacttgtaaactgttgaattgaaatattgattgaaaagatattttaaaagataaaggagccttctgaatatcataacttaaaggtagaaatgtacatatatctcaggtaaaagacaaaaaggataactaaaagaatgaagatgaactttactcagaatatttacaatgaataaaatacagcctcacgtactaccgttaagttggtaatgcgttttatttttcttaccttcgataatttccaccatcctaccaatacaaaacatttttttactccaagttaaatctaattaagatgatttaaggagcattgggggataatgatgctatttattatagaagctgactactctgtgtgcttttgcataaccacagcttagctaccacttataagt

SEQ ID NO: 243075 - DNA, 231 bp, Homo sapiens
aaatgtggcagtcttgctgggaggagcagggtcagggtggtgctccctctgcagagttgcagttggggcctgatgggtctggttgggccccactccttgaccttgtccctcctcacatctttctagccagtagcccatgtctcctacttagtggagtaataaggccaggagaaataggtgtacctttattttcatgtaacggcaaaatgactttccccaaatcacagagct

SEQ ID NO: 243076 - DNA, 334 bp, Homo sapiens
aaaatgagtaagtacaatataaactgagatcaatcaaactactaagatacctactaatgtggccttgtgcaaagggggccagaagtggagtgaaacaaaaatcagtaatgaatacagaagaaggatgacatttgctacatataaatgagtcagaggttgagctctataagctacaaggagaaaagactgcatttgtttcatttctcaatcccatacaatgatgccctccaaaatcacaattacagaaggagagatttttctttgtaagtcacaatgttattataacccgaaagtcaagttttactgaattcaaggacactgcttccaagtatct

SEQ ID NO: 243077 - DNA, 312 bp, Homo sapiens
tgagtattagctagctagaagaagaggaacagaaacaatgtcccagggccagtgaacagcagcatgaaggcccagagttaggatttgaccttccacttgaaagggagccactgggggctcttggggcagggcgagagtggcaggattaaaggaggcctgtgagcacgtgtggaagagcagcctgacctcaccagccccgtggaagatcccaccaagaccggtgcacatctactgtgctggcactctgcctaggcaccaggaacacagcagggaaacagctgtttgtgcccccaagggctcatgggccagtgg

SEQ ID NO: 243078 - DNA, 247 bp, Homo sapiens
ctttcaaatgtatataaaattagaacaattatcaacaaatgatctatcttgctcactctatattcctacctactttcctcccacctcccactgtattatttaaaacaaatcctagagatcacataattttaactgtacattttttagtgctataaaagataaggacattttatagaacatagctctgaaaccattatcccatctaaacatacaatttatgggaattccttaatataaatattcattc

SEQ ID NO: 243079 - DNA, 502 bp, Homo sapiens
tgtgtagaagtattgccttctagaatgcatgatattacacaattgcataaataatgggtatcattttttattattattattattatactttaagttctagggtacttgtgcacaacatgcaggtttgttacatatgtatacatgtgccatgttggtgtgctgcacccgttaactcatcatttacattaggtatatctcctaatgctatccctcccccctccccctacaccacgacaggccccacggtgtctgatgttccccatcctgtgtccaagtgttctcattgttcaattcccacctatgagtgagagcatgcggtgtttggttttctgtccttgctgtagtttgctgagaatgatggtttccagtttcatccatgtccctgcaaaggacatgaactcatccttttttgttataacactatttgcatcaactctttaccatagtcacaataggactgtgataataacataatgaggctaattttttgtttaccttataa

SEQ ID NO: 243080 - DNA, 339 bp, Homo sapiens
aggaaaagataaaatttattacagtcatgatgttcataaaagtataaacaataagatatttccaaatacacgaagaactgagagaactaaagataaagaaaatcataatcacagcagaaattttttacactattctctttgtaacttataaaacaattgtaaaaattcactgacaatctagaaaatctagacactatctatctgaacaaaatctgcacaccttgagtttaaatatatattcctgtgcatgtgaaacttttgtcaagacagatcatatgctagaccataagtctcaataaatttggaaagctgaaatatcagagtaactttttagaacca

SEQ ID NO: 243081 - DNA, 377 bp, Homo sapiens
gtctttctgaatgcttcagctgtcagagatgaaataatgctggagattttttaaaaacagtttgagaaggacttaaacattaagtttgcattaagactactgccacaatacccatttcaatttcaggcctattcaatttgaattgttcaaaatagataatgggtgtttgaatttcacactcttctcttctcccgctccccactattcttgtgattattgttatttttaaagcaaatataggatattatgtcgagatcatgaaaaagtgggtctacaagggatgagtgtgatcctgttttggcgagagtcagggttaccactttttctttcttcttctttttgtctcctctttcttaattcctggcacagttatgtgc

SEQ ID NO: 243082 - DNA, 459 bp, Homo sapiens
acataaactgccccacatttccttactaaactcttctattccccgtgtcctcagctcactgtgctctggccagctgttctagcaccctccttcctcaaggcctttgaatatgctgttcgctttcccttgaacactcttggccaagaaaaacacatggcctcctttttcagttccttaaagtctcttccctacagtcaccttaggagaaaggcctttcctgacaatgctgtgtgcagtctcacccctgctgcctcattgtttcccttatccttgttttctttttcaggtttcttcatagcagttattcactgggtacaaaaattcttttttgtttttttttgagaatcgcttgaacctgggaggtggagattgcagtgagccgagattgcaccatttcactccagcctgggcaacaagagcgaaactccgtctcaaaaaaataaataaataaaaaatcgg

SEQ ID NO: 243083 - DNA, 547 bp, Homo sapiens
ggtttgcacacactcttgcctaattctaaatgtttttagaaacaaattaagatgaaactttaagatttgttagagaaagaataagaaacagcaataaactttattctccttaaaatgtaagatcctgctatgattcttcactggggggaaagaagatacatttagaaaattggttatctcagattcttagtatggttttagttagttagttttaccacttggtagagttaatgatttgacaaatgacatttgcttcttattatcagccagttggttgctagctttaaagagttattataaaggatttttttcagtattaatttatttcataaacatatatttaatttttatatattattatgaaaaaagggaattatttcattcttttttaaaaaagtctagaattagaggctaatatttccttatagaattgtcaggaaacaaactgttgtaataagttgtttttgtgttccaagagatgtgactttgtcagaatacatccaaattcatatttcttagcagatctttaacataacaccatttataa

SEQ ID NO: 243084 - DNA, 428 bp, Homo sapiens
gtcctatctggcacagctgcccagggtttgccttacctgttcacatctgtgggttctctgtgatcaagaactgcctgccctgggaaatccatttgttttcctccactcagtgccaaatgccttcgtctttgtttctgcaagctctcaacattcactgcaggctctaacccaatgacaagtctttagaagagaagagagggaaaaatagacagaaacacaccaaggagaagacaatgtgaagacagaggcagatattggagtgatgcatctacaggccaaggaatgccaagaattgccagcagccaccagaagccaggagataacagattctctgttcgagcctccagaaggatccaatgcagctgacaccttgatttcagacttctggcctccagaactgtgagaataaatatctgatgttttaaact

SEQ ID NO: 243085 - DNA, 625 bp, Homo sapiens
gagagattgccggtcgtaaaggagggacaatagaacctctgtagaatcaaaggcagaattaaaatctgcatgttaatagctttcctgccagccacgaatagattcattcttcacgtctcagatatataaagcttatttcaaaataaattctggggagcgttcaacctgattgaatctgctgtaagctctgttaatatatttgttcgagtcacttgcactcaaaaggtttttagacagaatatcacttttttatattattcatggtaatgtaattcccccctttaatctcttcagggtttcccattcagtcatgatatgcggttcagagaaagttggatcgaccattaatcatgctatctcgacttctgtgtgtctcctttttgtccatctcttaaatcagtcacttggcagcagcaagacatgtggccactccagaccatttgatcgaagagctcttgttaggagattaggctgctaatctgcaagcgagctaatggaaatcattctgggcaaggaaacaaaactgaacaacattagcatttagatatgaagcctaagggtaagatgaacgtcttagatgatctgagatatccaaatacctgtaacaaacatttgtatggtgtat

SEQ ID NO: 243086 - DNA, 457 bp, Homo sapiens
ataggtactcaatatgctaactatgtacatgtgcatctcaacaaatctgaaggtatataatccagagtgtttggaggggttacctctgaaaagaggtgtgtgatctgaggtgtgtttttattctatatgcctctatgtttgaattttttgctacttttttttttttttttgagatggagtctcgttcttgtcacccaggctggagtgtagtggcacaatctctgctccctgcaacctccgccttctgggttcaagcgattctcccgcctcagcctcccgagtagctgggattacaggcgcccgctatcacgactggctaactttttttatttttagtagagacaggttttcaccgtgttggccaggctggtctcgaactcctgacctcagcctcacccttccaaagtgctgggattacaggcatgagccaccgcgctcagccttacttttttctttt

SEQ ID NO: 243087 - DNA, 328 bp, Homo sapiens
tcagtgaaacaaaaagttggttctttgaaaaagaccaataaggttgaagaaccttttactagactgatgaaacaaaagagagagagagagaataattatgttaataacatcaggaatggaggggacattgctgctgaaattaaaagatttaaagaaatgtagtagtaacgacttatctgtgggagatatgttccaaaatcccaagtggatgcttgaaaccacagataatattgaactcttcatatactatattttttccttattatacatacctgtgatagatttatcaatttcgctcagcatgagattaacaataactaataaaaac

SEQ ID NO: 243088 - DNA, 423 bp, Homo sapiens
attttaagataaaatacaattttgtagctgctataagtacaactagatatttaaaagaatgcaaagtggtatttttcactgaagttagaaaatcgaaaatttgccacatctgaaactttacaaagtgtttaggaataggccgggcacagtgcctcacacctgtaatcccagcactttgggaggccaaggcaagcggatcacctgaggtcaggagttcaagaccagcctggccaacatggtgaaaccccatctctactaaaaatacaaaaattagctggacatggtggtgggtgcctgtaatcccagctacttggggggctgaggcaggagaattgcctaaacctgggaggcagaggctgctgtgagccaagattgtgccactgcactccagcctggacgacagagcgagactctctctcaaaa

SEQ ID NO: 243089 - DNA, 357 bp, Homo sapiens
ccaacatggcacatgtatatatatgtaacaaacctgcacgttatgcacatgtaccctaaaacttaaagtataataaaaaaaaaagaaaaggaagacctggtattttataaggactatcatatgtcaggcacagtcataaaattgatatgcgatatcccacttcatctttgcacctcttcggtggttattatttgccctaatttatagataatgaaaatgagattcaaagaatataagtgacttgcttaaggttacagagctactcaggagcagaatgaaagacaaattcttatctgtctgatccaggatatttgtttttttgttaaaaatgatctatattttcatattctaaattgc

SEQ ID NO: 243090 - DNA, 468 bp, Homo sapiens
ttgtaactcagaataaatttatttttccataaaattcatgtactaaaatactgttggttttcctaaaatgactttcctataatatgttttcaaatttcacttctttgctgatatctttaaatttttatattattatactataactttataacaatatttggagtcatctacagcaatttatgttttgagataaaaataacatgacaattcacaaataactatcatatttcacaaacattaatttcttcatctttgaaatgtcttctaatagtatctacattttactagtttattcagttcagaattgtggccttgtcttaaatcgtattcttcccaatgtcttccaaactcccattgatgccttttttccatattatttaataagttgtgaatttctcctaggagtggggcatgggttcagatcctactggaaagggcctaagagtcttgtcttgaaatttcatttgc

SEQ ID NO: 243091 - DNA, 396 bp, Homo sapiens
aaatccatcttttgcttgggagcctagaagtttgttacagtaaagacttgcatttctgcactggattggaattaaggtcatttagtaagaatttactatttaaaaaaatggaaatagagtttagaaaatatctgagacagaaacttagatacatttccaacatggcaaaacctaggacttagagaaaacaaacctatcatgcggttagaggagagaaggggacactcagaaacctgagcacatttcttagagctggtggaaggaggcagaaagcactactcgggagactgaggcaagagaatcacttgaacccaggaggtggagattgcagtgagccaagattgcaccactggactccagcctgggtggcagagtgagactctgtctcaaaaaaaa

SEQ ID NO: 243092 - DNA, 951 bp, Homo sapiens
tgcattgtcctctcatgaaatgacgctaaataatgttaaaggtttccagtatgatttcactgaaattggttgcttccttctgtacagatgtttttgtggtttagaacctcagccaaggcaaacattatgaatgagatgcagagaccaccatgtcctatgaagggctgagagttcctttgggagttattttacttgtgattctgacacctctgttttgacaaagcttcattctttcagtctcttctttccgtctccctctcctggtgctattggtttgttgtgggtggttttcctaattaagttaatctgcaacctagtttttctgggtccacagatgccagaatgctgaatttatttatcttgaatgtttttgttggctactgttgagacacattcttcctcttccccttttaccccaagtctgttttaaacattttttttttgaggcttccagacgcacttcaataaagaaagaatttctctctggtgtccatttgtcaatttttttgtgggggatgtatattgtaaataatataatagatatgtaaaaggttgtaaataaaacccaaaggttatagaggaaaagatgtgtaaatttgactacatcaaaaatttaaaactttttgcatgattttctttcggatttttgccttttccttgcacatttgttggttctctttcgatataaatcagaaaaatgaatcttttatctgtcaaatgcatggcaaagattcttcccagtctatcatttgtcctacagttttgattatggttcctttcatcacagaacatttctattatttatttaactaaaaaatgtcacaatgatgtctgtagcgtagattttataaagcatctgatggtcatattttataatctaaattttggaaaagtatttggataatgagagatggagaaggtagagggaaggatcaagggagggatagagag

SEQ ID NO: 243093 - DNA, 755 bp, Homo sapiens
ggatttaaatgcacaactgtttaaatgaactaaacagcatgatttcatgtatagtcatggagcacacaaacaatattttctggacacacgtgtttcttcttttaactgtaaaagaaaaaatgatttcacaggaattacattatttaaatctatttccttctcatgtgactgaagtttaaagttcttagtgctgcaatcgcatcttctcaggtgtgttctgtttccgtccacctatgcataggtgttggtgttgttcatgtcaagctgcctaatttgtttagtaggtgttcgaatggggcatacaattctctagacatgtagcaagcacacgggagaagccaccatccaggtgattcgcagcagtaaggctgatcagaaatttgatcctggctcaggggggttccggcagtaatcaaactctattcaccttgggtgagatttcgttatacctattcagccctgcttcagtgaaatctcactcaggaaaatagattctgtctccaactggaatctcccaaagccatgactatgtttctgatcagcactacagctcagatgaagcgttcagttacctgccagccagtcagcatttccccagactgcaaccagtgttggaaccaatctgcaggagtgggtggattggtagtgaaactggttctggtgaaaaaacttcaaaaaattttcacagaaaaatgattgactcccacttaattcaatgaagcaggattactctctgggacccaagaagaggatgc

SEQ ID NO: 243094 - DNA, 701 bp, Homo sapiens
ggatttaaatgcacaactgtttaaatgaactaaacagcatgatttcatgtatagtcatggagcacacaaacaatattttctggacacacgtgtttcttcttttaactgtaaaagaaaaaatgatttcacaggaattacattatttaaatctatttccttctcatgtgactgaagtttaaagttcttagtgctgcaatcgcatcttctcaggtgtgttctgtttccgtccacctatgcataggtgttggtgttgttcatgtcaagctgcctaatttgtttagtaggtgttcgaatggggcatacaattctctagacatgtagcaagcacacgggagaagccaccatccaggtgattcgcagcagtaaggctgatcagaaatttgatcctggctcaggggggttccggcagtaatcaaactctattcaccttgggtgagatttcgttatacctattcagccctgcttcagtgaaatctcactcaggtcagcactacagctcagatgaagcgttcagttacctgccagccagtcagcatttccccagactgcaaccagtgttggaaccaatctgcaggagtgggtggattggtagtgaaactggttctggtgaaaaaacttcaaaaaattttcacagaaaaatgattgactcccacttaattcaatgaagcaggattactctctgggacccaagaagaggatgc

SEQ ID NO: 243095 - DNA, 462 bp, Homo sapiens
tcggtgaggcactctggtgatgtgactggtgggtgcagtccactggccctgaagaggagagtctgtgtccctgggtataaagctgtgctgtccagaggctgaagtccacagcccctcgtgttctctctcccctcttcttctcccacaatacacataggtacacactctcatatgcacatacatgtacacatacatgcatattctttacttttcctaaatgatacaggattgaagaagaagctgatcatgacaaggactatgactagggggttaaaaaagaggcttggaggagaataagatcaacaagcctgattctcctgaaaatgacatcaaaatttagaggtgaccaaggaggcactggccacttcattataatctaattttagtagcaaatgatacttattagtttaaaaaaagagaaaatcattggtattttttctttcttttttttgagactccatc

SEQ ID NO: 243096 - DNA, 743 bp, Homo sapiens
gtggcagatccccccaaccctccttttcctcatccccacctacctccaccctagctcctagcttagtgtttgctctatggataataattttcttctttctccctcctttgtagagtggagtcttgttcaactgagaacttggagcttcggaagaaggtagaggttctagagaacactaataggtaagtgtcactggactgagagctgattgcgctaccaatggaagatggggaaggaagaggatagaatccagaaccagggatggcagaaaagtggaggaggtcacagtgaaagtgcagttgtgctgagatgctcagcatggccaaactccacccacccactcctgctacacacacacgcatgcacacgtgctactcttgcacatatacaaacacatatgcacacatgctctcatgttcacatccacaatacacataggtacacactctcatatgcacatacatgtacacatacatgcatattctttacttttcctaaatgatacaggattgaagaagaagctgatcatgacaaggactatgactagggggttaaaaaagaggcttggaggagaataagatcaacaagcctgattctcctgaaaatgacatcaaaatttagaggtgaccaaggaggcactggccacttcattataatctaattttagtagcaaatgatacttattagtttaaaaaaagagaaaatcattggtattttttctttcttttttttgagactccatc

SEQ ID NO: 243097 - DNA, 1320 bp, Homo sapiens
gcgacaccagtgctccatctgcctcaaggccttcgccaggccctggtccctgtcgcgccaccggctggtccactccaccgaccgccctttcgtgtgcccagactgcggcctggccttccgcctcgcctcctacctccgccagcaccgccgcgtccacggccccctcagcctgctggccccgctgcccgcggcgggcaagaaggacgacaaggcctcgggtgcacggaactcagccaaggggccggaggggggcgagggggcggagtgcgggggtgcctcggaagggggagaaggcgggcagaacggaggcgacgccgccccggctcggccccccgccggggagccccgcttctggtgcccagagtgcggcaaaggtttcaggcgccgggcgcacctgcggcagcacggggtgacccactcgggagcgcgccccttccagtgcgtgcgctgccagcgggagttcaagcgcctggccgacctggcgcgccacgcacaggtgcacgcggggggcccagccccgcacccgtgcccccgctgcccgcgccgcttctcgcgcgcctacagcctcctgcgccaccagcgctgccaccgcgcagagctggagagggccgccgcgctgcaggcactgcaggcccaggccccgacgtcgccgccaccgcccccgccgcccctgaaggccgagcaggaggaagaagggctcccgctgcccctcgcaaacattaaggaagagccgccctctccggggaccccaccccagtccccgccggctccccctgtcttcctcagcgcctcctgtttcgacagccaagaccactcagccttcgagatggaggaggaagaggtagacagcaaagctcacctgcgcgggctggggggcctggcctcctgaccttcgccgccctgccctccgccgctccgcctgagctccccggtttgcagaatggaggagggaagttgaaggagccacctcctctgtctacccacccgtccccttcacgcccttgacactaaggagtggggggccctggactgccccttcctcccccatcgcccgcccccagaacccctgatgctggttaggaaccgctcaccccaacatgtgtcttaaggcaggacgacttggaaaaaaaggcggcggacagttggccagagggatggagactggtggggacgcccccgcctccctgtcccccgtttcacacactggacaccatcacctctttggaactgccagaccctgggggtccccagtgagcaaaggtctgtccttgtccctttgtctgtctgtgaataaatgtgagttcgtgaaatccaaaaaag

SEQ ID NO: 243098 - DNA, 422 bp, Homo sapiens
actgattctatggccctgcaattaaatcactggctgggttcttgtcatctgtgaaacatgatgattatggtcatgacgccacttttggatggaccacgcaatgctttggccacaccaatcactgctggtttaggccacataataactggaacagctcacatcaatgtctgacatcgaatgtgcagagaaataaagtaagtatgatgaaacaaacaccattctctaaatgttaaaaaggttttgcatagagataggcttaagtaagttaggttgatgattgacctaattttggaaatcagagcaacttcacttttttttttaattcaccaacaatcaaatatatcatgttaatgaaacatgagcgtgttggccaggcacggtggcccacacctatgatcctagcactttgggaggctgaggtg

SEQ ID NO: 243099 - DNA, 491 bp, Homo sapiens
tgttggagagaaatcacactaccatcaaagacaacgggtcaaaaagaatgccgtcctaagctgagaagccatcttcctaacgacagccatgtaatatgaaagggaaaaacacactgttattgaagaacttatcagctatgtcacatcttccacacaaatactcaggaaagttaaaagaaaattttacctcggacacagttgatgtacctcagtcttgtacaaaacttagaactcactaagtctgaaataagactttaaactctctctgaggtgaagttgtaatacagtgagaatgataatatatagtatattaggatttacttactcctgtgttgttctggactatagactgccacacatatcagatgcacatgactgacatgtatatcttcattttgctattatttgtggtgaactaatacaggatttactgtaaaagtataataatgcagtagcaatatactaataaatcaatgcagttaatatacaag

SEQ ID NO: 243100 - DNA, 439 bp, Homo sapiens
ccctgttaaaactcttattgcttgatatagctgaaagatgacttctgctaatcttactcagtgaatggagcaatagcccatgagtctagttgtgtgttgtatatctaaactctcttgcgcctacagaatatgtaccatagggaaaatgtttaacagtagtaagccatagtatttgtaatataccttagtttttagaaccgttttagatgtacagaaaaaattgagaagaaaataatctgttctcatataccctgtataaagttgtcccttttattgacttcttatactaatgcagtacatttattaaaattatttaaccaatattgatacgttatcatcaattaaagtccatagtttattcatgtatccttagctcttacttaagtctgttgtattgctcaacagttgcatccagaatacattgcttttaattgtcctg

SEQ ID NO: 243101 - DNA, 485 bp, Homo sapiens
accccacccccacaaagtaggggcactgaagcctctgggcagagctgttgaactaaatgagcaagttcatgtaaaacacctggaaggtgggaggctctcaatcaatggcagttgccactgagaccacagtctcttcatcagaagggttggtgggacggctttggtggtcccagccagcttggctctcagtgaaccaaaagcgtgaaagcctctctccctcccttcaggaagctaacccagttttcaaatgaaggaatgactcttcacattgtcattaattttcctgagaagattttcttatatccattagctatacactataaatacattgggatcttttgtttttctagaaaaaaaaatcattttagccttgtattctggcacattagattgttcttttatccttgctttttaaaaaacctttcaaacggcttgccttccatggaagaataaatagtctgtcatttctggagagaacttgtaaa

SEQ ID NO: 243102 - DNA, 1008 bp, Homo sapiens
tgctcaaaaagttctggattttagagcattttagagttcaggtttttggattggggatgttcaacctggatttcagtttacagttctagtcaaacacttatgaagtaaagaaaaactatgcttagaagctgcaggctggttgatgttataacctataaggtgacagagagaacatgtaacactgaacacttgaggacaaatgcaaggccaacatgcagattatacattgcatcccagctacatgacatcataaagcatcgtgtggaagagattaatcccttggtcaagcttccggaagagtctctgtgtctccaggaccaacctgtagcggtcaccagacttcttaagtcttagtgggtttcattgttgttgttgttttgtcatctttaagatggaataatactgagttattgagggaaaactaaaatgagataagaaaggtaaaggttttagccagttcctggcacagaggaagtcctcagtaaaggttacctgttttctttattatgaaaaatattgactcttgagaatcaaatctatcattttcacttcaagattacaaacaacagcaataattaatgaattgtgattttaatagaaatatgtacatgtgccaatatgccacatattaatatccatctcactgacccaagtacgtagctgttctttttcaggtcctaccagaaaaaaaataaacagcagctgttctttagtggtaggcaggattcaaaaatcactttctgccactctacttttgagtaccaaagtgccagaagcctgaatcacaaatttagcagtgcattacaaatcagttaactgacttgttcccttggtgaaatgaaatgaacaatctggtctaggtctactcaggacatctgtgtagatttctagcttgtgggggagacttgacctatttcctccatgtcatctacacctaaaatttacatgaagacatgtaaaaagtactatattagctcaacacttcaacagattaaaaaaaaaacaccg

SEQ ID NO: 243103 - DNA, 443 bp, Homo sapiens
aatctgtctttggggctctcagcccaacatgatctctttcacgtggatagaaggatgccaagaaggtgcctggggacctgggagagaggcattaataactaaaccccaggaagtgtgcccatgctaatcgccacagtcctatgagaaaaacacttgggcatgcctgactctgtagcacctatttgcagaatcatacactctcagggctagaataggctcaggtggggatttatctagacccacaattctagacccacccagagacctcacaattcagaccctccataaaatgagtccatgtcctgaaaggcagagaagagaaggctttgattctactattagacttgcttctcttaattcaccgttgcctcctattgttatctttgttagtttaaaatttcttgtaataaacgcttgtatggcactttacatttcagaatgct

SEQ ID NO: 243104 - DNA, 431 bp, Homo sapiens
ttccagactgtgcaaagaagaactaaaagattagcgaagctccaatttaagcatttgcctccttagtccctttttctactacataactttaatatttggaacgatttagaaatctgaacttctctaaattggatttctcattgctaattccagttgtcgttctctcaagatgggcttaggttttaaataggttacttatatttcaaagtcatctaaagttttagttctttaaattcaacaaggcagaaattttacgttttaggcatggcagatgtcatgttttatacagtaacttcttaaaggtctttaaacagatatagctctggctcttaaaaaaatgtaccaatttatctcctgatgtgctaacgtgggggagaaagagagagagaaatgactggcatttgcaaacacataatactgttaaattgcaa

SEQ ID NO: 243105 - DNA, 376 bp, Homo sapiens
tgtccttccaacatagcctctgtttgttacctaactcagtttggaaggatttctggttgtttgcaaaacgtctccactaagataatgaagagctctaggctatcattctgtgacagatgcttccctgactctttacctttaaaaaggttttttttttttccaaagaaaaagggaaaatgacttcaatacattcttaaaacacacacccacatatcttagtaaaatatagaaaggatgtatccaaaatgtggttttccctccaaaatgctatcatatattaccatgaaatagtcatggtcaaacagtgctaacgaaggctaccatttattgactgtttcctctgtgccaacaaaaaaatttcataagtgctgcttca

SEQ ID NO: 243106 - DNA, 524 bp, Homo sapiens
gactttcagtgcttagtcattagattattcctgttctctgtgctacctcacttccttgacatagaataccatcatggatgacttctacatttattgctccagacctttccttaaactccagatttgtgtattcaattgtctgcataacctcactacttgaatgtataatagacatctcaaaatggatacttccaaaatcaaactcaaaatcaaagtcaaataattttccttccagatttttatctcctcctgttagacttccccatttctgtaaatggcaactccacatgtccagttgagagttgtgcaagccaaaagccttggagtcattattagcttctctttttcttacacatcatttccagtgtgtcagcaaattgttatgattctacattcaaaatattttagattctaatcatttcccaccacctccaccactacaacccttggttagatgccatcacttctctgtatctttgcaataaaattctaattggtccctgagcttccacctttgacctgcc

SEQ ID NO: 243107 - DNA, 429 bp, Homo sapiens
gcggccgctactactactactaaattcggcggcgggcgacctgcaggttctggccaccagtcagagcggctgggtgcacaggctgaggtaggacagtgtctgcaaaggaccacttcgagctcctcagtgtcagtcaccaggacagagggcctgtgtgtgaggcgccatacccaagggcctgccctgccactgatgcccgtaacgggtgagtctgaactgggacaagcgcgtccatgctgcctccctccctaatacgcccaggcaatcctgagaaattccaacttcaccgagcgcccccaacccgtcctgctaggtgatttctagtcgcctgcatgcgcaacaccggcgcccctcaggttcagcgtcccgggccaggacagagctataaggcacttttgctacaccccagttttttaggggtgagaaggt

SEQ ID NO: 243108 - DNA, 506 bp, Homo sapiens
tgtccgcgatgtctgcatctgagggattaaaacgtagggtgggatgagctaaaacgttagcaatgtatttaaagacatggtcagcataactgaagaaaaagattatcagaacggaaaaatggggttcaaagagacgaaaggtgtcagaacatgtccaaccctagccaaggagagagagacaatatttgaaggacagggtcagggtagtaaattggcgtccctggccaacgtcattagcacaaatgggcactgggatcaaacttagtagccttgggtatattgaaaacatgccgtttctagacctggaaaaaaaaaagccgtgtttcagctcagaggctacccgagctgttctgatgaagcaagcggagcacctcagtttccaaaacccggaggtctgtaacgaaacgaacaagtaagagacaaacctgatcgtttcctcccctgcttaaacagttttctctttctcttattgcctctagaataaagttcaatcctcctgcttcaac

SEQ ID NO: 243109 - DNA, 437 bp, Homo sapiens
tcaggggatttagggaaaggctccagagcaggaggcatggctggctgaggttagcagccttggtttgaggtctgggcagctggtgggaggaggatatggtgaacagctgggatacagatgcccccgggcatggcaaagtcttggagtcatcagctcaactccacaaaagactcagctttgcatatggtgggcctggcccctgagtggagcctaccgtctttccccattaactgcaaatgacgtttccctcattcagctacactggcaaacagtaccaagcgccttctccataccaggcactttgctggacattgagatgctgcaatgaagcagatgcccaaaaaaaccctagtttaaaaagtatgtaatttttaaaaatgttactggtttttgaattctgaaagtcaagcaatacattcattagtcacctcaccacc

SEQ ID NO: 243110 - DNA, 435 bp, Homo sapiens
gcagatggggaaactgaggcctggaaacagagaacggtgggaccaaggtcacatgatggcggaaggaggacaaggaaggaggctgactgcgtatccagcacgtgttccgtgccaagcctgtgcaggggccaaggaccggggtctctggacagcgccggttgctgggtcccacgctgggcgacagggcctttgcaatcaggccgacagggtttgaacccttgccgcggcactttccagatggccttggccactgtcccctctctgaccttcagatggagcccatggcacctccggagggggtgtgtgcttccaggaccaaatccacttgtgcgtggttaggcacgaggtggggggaggcggctcagccaccgggacctgtcctgcctccaccctctgtgcaacccctttccttgccttttgtctctgttgcttttg

SEQ ID NO: 243111 - DNA, 370 bp, Homo sapiens
ccccatctctactaagaatacaaaaactaattgggtatggtggtggcacatgcctgtaatcccagctacccaggaggctgaggcaggagaatcgccggaacccgggaggcggaggctgcagtgagctgagattgggccactgcactccagtctgggtgacagagcaagactccgtctcaaaaaaaaaaaaaaaaacttcgaaagagacactcgtaaaaacaaataggaaagattagtggattattagcttttatgctgttagttaatacaggtaattaacattaactatttaaaaataaattattaaacatctccctgttgaataatactaaagacttttacaaattgagataaaatgtgtatgactatc

SEQ ID NO: 243112 - DNA, 429 bp, Homo sapiens
cccgctggaaagggcagagcagatgcccttacacccatagcccctgggggtcatgcctgtgagttcttgcatatcagcttgtgacagcgttgtgacctgcccctttgtcaccttgccaccacatcaccccccaggggtctgggcatttcctcgaagctgcttccaggacaggatcaggaacgtgttacttgggtggggggctgggagggaggcaaggagctctggttctgcccatgtcctccagcctcgagtgtgcaactgctcttctgggaacttgggtctcctcatctgaaacacagggaattagagaagatgattttgtaacgctcgaaggctctgtaatccccaaaaacatgctctaaagggatctccagtccagcatatcaacccaaacaaaagacaacgctgtggttacttgttcaaaaaaaa

SEQ ID NO: 243113 - DNA, 341 bp, Homo sapiens
aggcaaaatgtctgctgcagatgtagaccatttaactgtaatctatttcaaaggctgacactttcaaaatgatctgattaactgggattgtcggacataatataaaatgtatccaagcttttcaagatgtggatttcatttgttaattattctgactctgctttaaacttttattttaggttcaggggcacatgtgcaggtttgttatttgggtcaacttgaatcacaggggcttgttgtacagaatatttcatcaccccggtactaagcccagtacccgatagttattttttctgctcctctccctcctcccgccctccaccctcaggcaggcctcagtg

SEQ ID NO: 243114 - DNA, 263 bp, Homo sapiens
cactcaatcctcataatgtccaccaaggtagatattattgttctcttcttttgagagaagaggacacagatacagagaagctcagtggcttgaccaaggtctcaaggctagtggtgggtccataatttgaacccaagtcctctgaccccagagtctgtgctcctaatggatccgtcctcgctgaatcgtgacgacatggcacataaaagtgctgggattacaggcgtgagccactgtgcccagtccacacttgacatttacca

SEQ ID NO: 243115 - DNA, 222 bp, Homo sapiens
cgcttggcgctatccttataaaaaaaaaaaactgactgtgtcaagcccctaaaaaaccctaccatagtcccctatatccccctttggggtgaagaccacattcccccatcatggaggtgggaaggttgatgagacaccactcagcacgaggcaggcattcatgttaggggacaccaagccccgctgctccccagcctcccctctcacttgtctgtctcctcc

SEQ ID NO: 243116 - DNA, 864 bp, Homo sapiens
  misc_feature (837)..(838): n is a, c, g, or t
tttttttttaagttaaaaaaaatagtcttaaaaaatgtttgggctgggtgcagtggctcatgtatgtaatcccagcactttaggaggccgaggtgggcagactgcttgagctcaggagttcgagaccagtctggacaacatggcaaaaccccatttctactaaaaacacaaaaattagccaggtatggtggcacatgcatgtagtcccagctactggggaggctgaggaaggaggatcacatgaacccaggatgtggaggtggcagtgagccgagatcatgccattgcactgcagtctaggcaacagagtagggaaaaatgaaatgctcccctaataagcaccattttcctttattctccttgtgctttgctaagtgaaatgactacgtttctctagacagtggtggatgatattcaacttgcaaaaatatagagaactgccctccttcccattgaaaaggcagaggaaaaggaaaaaggctttccccacagtgctgagaccccactgtatgtcaggacacgggccagtgttcccatctcctggctcagtcatggtgttgctactgcctggacagtgcgtttatccagctgcccacccgccacccattccatcagaaccagtgggctcagcaactgtctgctaacaagaatcatgaagcatttctttttgtttttttagaggtagggtctcactccatcactcaggctggagtgcagtggtaagatcgcaggtcactgcagactcaaactcctgggctcatgtgattctcccacctcagccacctgagtagccgggccacaggcgtgtgccaccacacctggttaatttcgtctgannggccgcgatttagtagtagtagtagt

SEQ ID NO: 243117 - DNA, 182 bp, Homo sapiens
aggatggagctgctgcaggttccttccctcggaaccgtgccctctgcacagagtgcgcttgcccctgccctgccaaattccactgggccctaccctgggaagcctgttcagagcctctgggccgaattccttgcccgaagagctggcagcccctagtacctggtgaattacgttgttgttgg

SEQ ID NO: 243118 - DNA, 366 bp, Homo sapiens
acctaatcactgagagactgttacacactcaaaatgtgtgttttgagatatgagtctttatctgctaatggtaattctctcaaaagactattgaaatcaaaggtcaagactaatcactcactaaaatgtggtgtaccacgatagccagccccactgcttctacaaagcagcagtcattcattccctcccgcctcctttctctctctccctctgtctctctctctctcctaagttccccccagttaatgcagtggcgccgggatggatttactggctgcttttgaggtgctaacaacctgttaaccttccagttgctggtttttaatcttttagtctaatgtgaatgataaagaccttagcttatta

SEQ ID NO: 243119 - DNA, 362 bp, Homo sapiens
tagagaatgtagaaatatctataagtttttcatgtcatcctgctcattttttgttttcttcacacttatttcctagaatttctaccagtggatagaggtatccacagactaaaattagttttgtgggtgagcctaactttggggaatgggagggaggatattagtggtcagtgtggagtagaattcttacctcaatgctcttgaagttgttctctgtaacttgagaagaaaattccaagaaagtttgttttttttcagagagagggagactggagtctgaacttgtcacaccctgtgctatctgatgaaaatacagaggcaatgactctcaaattttccataatttaacgtcctgtcccaaa

SEQ ID NO: 243120 - DNA, 378 bp, Homo sapiens
tagtgcaattcaaattctattcttgaagcttaaagataacattggagctggcccaaactagtaaaatatatgattgtgaatggagtttatcaaaatgtagacacagtaaatatcctaaagctttaaatctacttctgaaacaatgacaagcaggcattttgccagtgctaatttgctttactctattgattcaagctttattgggcattctattgtctcttctagggaaggcatcagtggaatacagaacagtgaaggcttattcaagataatgttatactcatgaatcacgccacctaatacctgcactgcttagacatgcagaacataaagcgtcttctcaagatatctcagtaaaagatatctcttcttatatac

SEQ ID NO: 243121 - DNA, 386 bp, Homo sapiens
actgttagaactaggtttttttgtattccagagtaaatctttcaatagacttttgtacctttggtttgaaaaataactacacacatgcccttattttgtttctgctttgcccacgtttaagctttgttgatcctataggtagatggcatttatttgttgaaaaactagtcagaaaaattcttactttatagagaactacagacgtgctagtggcacttttatgcccaatacagcccagtggattatttaatattttctttaattgctgaagagatttttgccagaaataaaacaattagcactcacagatttgatttccataccaatgtgaaatcttgactctgcacattattcaaaagtgaaaccatactgagaacaaagaaaga

SEQ ID NO: 243122 - DNA, 1637 bp, Homo sapiens
  misc_feature (282)..(282): n is a, c, g, or t
  misc_feature (1189)..(1189): n is a, c, g, or t
  misc_feature (1195)..(1195): n is a, c, g, or t
  misc_feature (1197)..(1197): n is a, c, g, or t
  misc_feature (1250)..(1250): n is a, c, g, or t
  misc_feature (1267)..(1267): n is a, c, g, or t
  misc_feature (1274)..(1274): n is a, c, g, or t
  misc_feature (1277)..(1277): n is a, c, g, or t
  misc_feature (1294)..(1294): n is a, c, g, or t
ctcaagtgtatagtccttcctaggctgcttcaaagcaggcatagcaactattaataaatacttgttggataataaataataaaacagaaggaataatgctgtaacctaaggaaaggagctagatagatagctttgaacatcaggaccttcctagtacccctgagattgtcccacatgggtgaccccttctttatctctaagtttaggttagtccatgttaatgcagtgctatactgtcattcagtgacctttggagaaaatccagaaattttatttaaaatngagaaattatatttggaggaattatatttagaggaaaaggagagaaccaacaaatggaaaattccaagtttcttttcgttgagctaatgttaagaggataaattatcttgttatcggctaagaaagagaatagacttggaaattgtcctgcttccaagaggatggttgaagaaatcaaagaatgaaggagttacttggaggtccacctgccccttccttgttcagttccatctggccttggagccaggtaaaaaatagctgttatctaggggtgtggagaaggttacctcttcaaatcatttagattcttagagcacaatggaccttaagatctccccactaaccccaactgcattggctgcatgaagctgcaggagctgcctggggggcatgtcataatagggaccctctgctttgcttgtcatgcactcaggcttcagtgaagatgacagcccatcacacacttcccacttcatggagaggacacccagtccctctctccaatcctaacctctcacccacactcctgtctgcaaaaacctgaaggttatttctgcctggaggatccactgatatctgagtcaatttgtcctaaactcaaactactattatcttctcagaggccatctcagaggtcacctctgcccaaatccccttccttcccctccaggcagagtaaagcattccgtatacttctgtttcctattaaccctttccttctctgttcttgtgttagctaggtattgagcctttgtgccctctcaccagaggggaggatccttcagggaggagcttgtgaaggaaagaaagaagcatggagtagagtgtgacgggtagcattttcagacacatttctgccccctgcagtgggtcatacctgtaatccttctagcactttgggaggccnaggcangnggatcacttgagtccaggagttcgagactcaactgtgtaggctgggcaacatngtgagaccctgtctctncaaaaantanaaaattacctggacatngtggcacacacctgtggtcccagctactacagaggctgaggtggaaggattgtttgagcccgggaggtcaaggctgcagtgagctctgatcgtgccactgggctccagcctgggcaacagagcgagaccctgtcaaaaaagaaaaaaagaaagaaagaaagacacatttcttcaacttcacaattttggatagaggtggacttgaataccaggccatctgaattactgggggcagttaaaacagtaggtttaaagggatggtgataacaaatgttttccaagggaccctattatttatttttatattaatgtcttatatatccaattatagtttatttttttg

SEQ ID NO: 243123 - DNA, 381 bp, Homo sapiens
agaatcagtgaacttaaaaacaagtcaaatcccagtgtcatggtgcacatctatattctcagctatacagaggctgaggtggaaggattgtttgagcccgggaggtcaaggctgcagtgagctctgatcgtgccactgggctccagcctgggcaacagagcgagaccctgtcaaaaaagaaaaaaagaaagaaagaaagacacatttcttcaacttcacaattttggatagaggtggacttgaataccaggccatctgaattactgggggcagttaaaacagtaggtttaaagggatggtgataacaaatgttttccaagggaccctattatttatttttatattaatgtcttatatatccaattatagtttatttttttg

SEQ ID NO: 243124 - DNA, 569 bp, Homo sapiens
gccaccatggccttccattggtgcttgcacacagtgtctcctcttataagggcactaatcctattggatatatgccccactcttatgacctcatttaaccattattacttctttagggaccccattttcgagtatagctacactgaaggttaattttgagtggacacattcaatccataacatagttgatagtctccttgcctgaaagtaatagatgagtaagaacttgtaaataaaagctacctgaagcatttttgactttcagcattatcagtatacaaataataggtttggagatgtagacgcctttctaaaatctcaaaataggtttcttttctccttcgtccttttctgggacttcttggagtgtttcattttgttttgttatagttggcatttagaaatgaatcttgtcatttttagatcactccacgtgttcatgctacctttcttgttcatttttccattcgtgtactctgctttttacttgtcattgttttcttctgttttgatggtttttgacttggattttgtttttgttgtttggcttttaagatgtacattattac

SEQ ID NO: 243125 - DNA, 481 bp, Homo sapiens
ccctggacttatttcactatgttctaaccaaatgagaaaggaagcgccaacagttttcaatgcaaacacataattaaggtagtaagatgtctgaattatagatttggtgatctacaatcagcaggtgcctcagattctttctgtattactgaagtctctggttgcttgcatgggttggaaattaaaggaattataagcattaaagattgaagtttagttctataaggaactttagcaataatctagtgatagtcaatggatgttaactttcttttttagaagcatctctaaaattatgattctcctctaaagaatgtacctttctctaaaaagtgcccacatgcacatccacataaaatctttacaaacatcaagggatttgagatctccctgaagctgattcatggaccctccattaagagtcctgtattagatcatgccactgcactccagcctgggcaacataaaagactttgtctct

SEQ ID NO: 243126 - DNA, 1099 bp, Homo sapiens
atataaataccattgtccaagagagaagggaacatttttccttacagtagaactccatctattaaatgtggaagacatgaggaattagaaaaaaatcttcatttgggaactgccgtattgataattatttcaggtagatatcaacagatactaaaactagtaggaaagttcagtgaacaacagcatatttacataatcacaaagtactttcccacaaaatacttactatgatggggaaaattataacttcgtactagagaaatctggttaacaacactttaaccaagtgatcaaagctaacatcaccaggaatgggaaagctccatatcagatgcttgatatggtgcattgcggaggacatactatcacttctgtgacattcctgccaaaaaatgcataatctgaatcaaataataggaaaacataagcccaatctgaaggacattctgtaagataaatggcctgtactcttcaaaaatgtcagagtcatgagagacaaagactgaaaaacttttctggattgaagaaaattaaaagagacatgccatctaaatataacatgtgatcctagattaggacactagtagcacaattggcaagattggtctaggtctttagatattaaatctagccataggaggcaataagaaaaagaaaaacttatatcaatgataatcttctgacttgttgatcatactagagtatactgttatgcaccacataaccacatctctattgacaacaaactgcataaatgaagatgatcccataagattatattactgtatttttgctataccttttctatattaggtatttttagaacacaagtaagtgccattgtgttacagttgcctacagtatccagtatagtagcatgctgtacaggtttgtagcctaggagcagtaggctagaccgtatagcctaggtgtgtaggaggctgttgtaccatctaggtttgtgtaaattctctctatgatgtttgcataatgatgaaatcacctaatgacacgcttctccaaatgtggtgcataactgtatatgtaagcatgtcttcgtgtttaggaaataatacaaaaatatttaaacaaatggttc

SEQ ID NO: 243127 - DNA, 205 bp, Homo sapiens
agctgggcctggagactcccctgggaggcaacagcggggtctgcagacgcccttctccagccggagctgggactgttcagtcactgggagaagggatgtgggtctgaagagcttggttgcagaaacttcggggtctacaaacgcaggcgggagctgagccaaaagagcttgtttgctgggaggtgggagatgcagcccggaggaa

SEQ ID NO: 243128 - DNA, 479 bp, Homo sapiens
gaatccatggtgccactttcccggtgatcccggtgggggaaggggttgccgcccggcagagattcagtcccgaatcccgacagcgaagagacttgtatgccacctgcaggccggggagcggggcgcgctggggctgcaccaccccgaactttgtaacaatctagagcaccacagagtgtttccagagatgggtttcagtagcccaggctggtctcgaactcctggactcaagtgattggccctcctcggcctcccaaagtcctgggattacaagcgtgagccaccatgctcagttggcgggggattatctgtgatccaatgaagttggactagagatgtgaagccttagaaaacggtggattgaaaaaagaattttagtctcctccagagattatattttgtgtgttcattgctctcaaaaacatgaaaataaagagtattttatattgtgatttgtaggacaatagcatgcttgtata

SEQ ID NO: 243129 - DNA, 670 bp, Homo sapiens
gaatccatggtgccactttcccggtgatcccggtgggggaaggggttgccgcccggcagagattcagtcccgaatcccgacagcgaagagacttgtatgccacctgcaggccggggagcggggcgcgctggggctgcaccaccccgaactttgtaacaatctagagcaccacagagtgtttccaggtcggcacaaaagcgaacgggacagggcgccctgggcggcggcagcttggccggcccgctgcctagcgcgcccccgaggggcggtaatggaacgtacctttggctgaagaaagagtgctcccggccagcgcggggtcgcctagggggttccgcgctgcctaatgcaaaggatggaaaagttacagaagcagagatgggtttcagtagcccaggctggtctcgaactcctggactcaagtgattggccctcctcggcctcccaaagtcctgggattacaagcgtgagccaccatgctcagttggcgggggattatctgtgatccaatgaagttggactagagatgtgaagccttagaaaacggtggattgaaaaaagaattttagtctcctccagagattatattttgtgtgttcattgctctcaaaaacatgaaaataaagagtattttatattgtgatttgtaggacaatagcatgcttgtata

SEQ ID NO: 243130 - DNA, 304 bp, Homo sapiens
aaagcagaagtcaataacagaaggaaaactggaaatttcacgaatatgtggaaattaacacattcataagcaaccagtggataaaagaagaaaacagaagggaaatttaaaaatgctttgactggagtcactgctgctaaggtccctaccacagatgcaagaaaaaagctttatgctttctgtctgattatgacagctaagattgaatgcagcaatatagaaactacataaacatggagggggcagataatttttgcaactcagaaataaccttataaacagcaaataactggttttactcaaa

SEQ ID NO: 243131 - DNA, 770 bp, Homo sapiens
ccatgggactaacgtcacagatttcttttctgagagttgatgaggtttaagaacatgaagattctaaaaggtcagtttttagagatagatctatagttgcattgttgcaatcaaaatatgttgtcacagaaagaataggtggaaggtcatagcctggaacccaagtttgaaaacatttcattgtgttcagtagtgaatttctacagtttaacatagcacagggccttctgaaaatcgcacttgtcaaagacgactcatctatttctccagacttcagtaaagaatgaaaagtacctttagataaaaacaaagaagagtaatatatgcagcacagtgacgttaggattctggtaattaactacatttaaatctctggtcactttaagaccctaaataaaaggcagacagctccactcaaaaactaaggctgatgtgagggaggtgagaggtcactgcacttggtacttcctagagacggccggagccaggcccaagacacagcagaggtcaaaggcagtggagagccttggccagttcagtgacagcttctggctgaagacttttggttctattcagaaacctgtgtcgtttttttggtgttgtagtttattttgtgattttttggaatcgtactttatatttccaaatttaaatttaaatgcaagatctttcaacataaacagaagatacctacaaaatactgtcagaagtccaggtatactgataacactgaaaattctattagcaaccttctgggttggttagattga

SEQ ID NO: 243132 - DNA, 254 bp, Homo sapiens
cgatggcttcaaaaaggagtactctagtggagagagcacaagttgcttggcttttctgatctagccttagaagtcacttctgccatgctctatttgttgaaacactgtaaaacatcatcagtttgaaggagacagtatatacaccttacctcttcatgggaggattgtcaaagtctctctgtaagaagagcatagtataggagatattgttgtagccacctttgcaaaatacaattgacacacttaatatttat

SEQ ID NO: 243133 - DNA, 514 bp, Homo sapiens
tgaggaccataagatagaagatgagaatccatctgccctcttctctgcacccaggcttcaatcctgtttgatcatgcaggggctacaaggccttcgacacaaagaacttgtcttagattctaatcagtttaacaaataggacagacagctgctgagcactgtctgagtgacactgatttacatacaaatgaaccaccaatgtccccttctatcaactcagaataaaatctggttttagcatatgcagtcctacgagacatggttaaaggatatgaatgatagatagagataaaagaaatcaaggaccattcctccacaagtctccaaagaggaaaacaacaatcgaagaaaaaagagtgagagaacagatgggctggcagagttttgctttctatgtgacattgtgtacttattattcgcatgaggactaatttataaacccggatagtgtttataaactatactgtcctaatggaaatgaaagcattaatacaactagaagattctttacttt

SEQ ID NO: 243134 - DNA, 465 bp, Homo sapiens
agaactgggtagagatgaggacagaggagacgtttcatgtttggtggtacaacacagacacacacacttacaataatatttattacaatacctttctgaaaaaatgtagataagtagaaatgtttactttttatgattaataaacagcatgacttagtctattaaatgtaacagttgaagaccatttacatttttaccgatcttggtgtactctatgtagaatgtttctgacatagccttttcctcttctttgaaatgctccattcctagtgagttatatatttagctctccacctgttatttattatttttgtttacagaaaaccataagtgcacagaacacataaaaggccctataaagatgagttttctaatccaattaggaagataatactttgggcaacagacaaaatgggcaaagagatgaaaatatttttatagtgcagatcagaaaagagtttcata

SEQ ID NO: 243135 - DNA, 140 bp, Homo sapiens
agctatacctgtaacaggtagatttcattttgtaaattgtatctcatgaagttgatttgaaaagcctacactgagaggcagtattttaactattctgagataacattgattaaaaaatgcaacatgccaaaatacactaa

SEQ ID NO: 243136 - DNA, 447 bp, Homo sapiens
aaaagaaaaaagaaagaaagaacctcttaggcaactctcatttcattatccaggtacaaagacaatgagtaagaagagtattggggttgggaggaccagtcacccctgtgtcttaagatacttctcagttttctttgttgcagcaaatattactgcagagttttagtgcattatagccttcttaaataaaacttgcccaggtgcagtggctcatgcctgtaatcccatcacattgggaggccaaggcaggtagtttgcttgagcccaggagtttgcgaccagcctggctaacatcatgaaatcccatctctacaaaacataaacagaaattagctgggcattgtggtatgtacctgtagtcccaggtactcaggaggctgaggtgggaggattgcttgagcctgggaagtcaaggctgtagtgagcaaagatcacaccactgcagtc

SEQ ID NO: 243137 - DNA, 429 bp, Homo sapiens
gttgagatcgtgccattgcactccagcctgggtgaaaagagtgaaactccatctcaaaaaaaaaagaaagaagaaaaaaaaaagaatttcttaacttacttacatttcctgcctctcctgaaacttcatcacactctctttcgcataagactttacccccactttcttaccacctggagtaataggaagtgagcatttgttgcatgatatcaaatctcaccactcttctgttagttcctcaatcatacaacagaatccttttataatattggtgaaagatagactattacagtcacatattcttcacatggcaaatggggaaggggtccttttcataggcatcaggtatttgggcagtaactacagaggtggcctctgggagagaagtagttcaatggagcttgtaaacattaatcaccaagtcaaaaa

SEQ ID NO: 243138 - DNA, 372 bp, Homo sapiens
cttctggtaactctgaacaaggtataattattttcagatacattttatttatgagaaaactgaagctcagataattaaatgacttggctctgttgatatctgagtctagagagtgaaaccatggagatcttttagtagagccacctgtcaggaccaatatatcactgaggcatattgttttcacacttgtctccctgatactcttcccattctcctttggcccttcttcaaagcttcatttgagaccctggattttggcttccaaatcctgataaaaaataggaaagaaaaagtatggtgtaatatcagagcactgaactgggttctagtcccagccaggccacaaacttggttacgtcattgagcaagtca

SEQ ID NO: 243139 - DNA, 319 bp, Homo sapiens
ttcctgagtggctgggactataggtgtgcaccactatacctggctaattttttcttattttttgtagacatgggggtctcgctgttgcccaggctggtctcaaactccttgccttaagcagtcttcccaaagcctcccaaagctctgggactgtaggcatgagccactgcatctggcctcagcatgattaaacccatgtaaaccccgctgaccagagctcccacgcaaagccactggaagctggctgcatgtgtttgacatcatgtacctcttttcctcctttgggacctcaaattgaaccacaaacttaacaaactgc

SEQ ID NO: 243140 - DNA, 454 bp, Homo sapiens
tttaaaaaagacatttattcagcgtcacgatcagactattacatttagcaatcaacagcatgggtgaaaaaaaaatctacattaaaaccctttgttggaatgctttacactttccacagaacagaaactaaaataacctcttatacaattagtcacaaatacagtcctcaagttttttgcccatacacgagtatttgtctaaaacatgacttgtttgtagcagctaggccttgccaccactgtgcttggctgagttcacaaacctcttgtaacctgtagcttccttgtcacttctctggctctcccttcctgctaagctttgtttactaattaaaatcttctgccaaagccatagctgctgctgctactggatccaccatagccaccttggtttcgtggtttggcaaagtattggcctccaccaccacaggggccagagcttctgcctccaaaa

SEQ ID NO: 243141 - DNA, 1122 bp, Homo sapiens
cagatagtgagggtacgaaagtccttggtaaggttttccttttaataaaaagcaacccccaaatcattttcttttctgacaaaaagcagcctgtaaaatcgagcctcagacatagacaagcaaactggaagcttgtacaggcgaatgccagcagttgtgccgataggaatatactacctgggactaggtatgttcaaaatggtggctcaatcttctcttttttgccagccgcgtgcacagtaaggcacagacaagatggtgctggccaagtggaaagcccacttgtataataagtttaggatcgggtgaccagccttcccagtacattctataaatgtcacaactggtcggaccaacctgtgggccctatgtaaatcagacacagcctcccgaagcctgccaataaaatctgctgcggtctgccacatttcccttttcagacgcctctcttgtgcacccgtgagagagctgctctcctctctcctttcttttacagattaaactttccgctccttaactcacacacatgtgttcgtgtcttcaatcctcttggcactagatgatgagccctgggtatttaccccagacagtgatgccacttcacaaggaaacagatgttaaagcccttctcagagaattttccaagagtaaagctggtgatggatagccaaacattaatcagcgaaaaggagtttgacctatagagccaaggagaagttggacaaagaacgtgaaaaggacaacaggcaaatccaatccagtgaatgagagctcaatgagaatcttcaaaggaccacagtatgctgtacaattttttttaaaaacatctagaagggtattttcatggattgatttttatggatttttataaatatttttcattggttaatggaagccatccataaaatgaataatatttaatctattctttccacttcaatggaatgttagataaataaaatcaccattgactggtgagtttaaggtggatctgtaaacatttttcaaaaagaagaaaaaaaagtcgtagtttatttttttcagaagcctacagtgaagtctatgggcatatgggaatcagaaaacataactaaataaaattttctctatgatatctaaaaa

SEQ ID NO: 243142 - DNA, 375 bp, Homo sapiens
ggagagatggggatagcttccttgaggaagtgaagggtaaattgagatctgaaggcacagtaagaattaactagacaagggcagcaggggagagggaatagtagatgcagaagtctggtgctgaaagggtgcttagaatgtttgaagaagtttaagcatagagaataggctggaaagtgagccaaatgaggctgaagagacaggctggggtcagattggccggactttgtaggccacaataagggattttgtccttactctgtgagcagcaggagaattgcttgagcctgggaggcagagggggtggcgagccaagattgcaccattatactccaggcctaggcaacaagagcgaaactgtctcaaaaaaaaaaa

SEQ ID NO: 243143 - DNA, 397 bp, Homo sapiens
ttaagcctacttttaatgaccacgtagtattccattatacattcatgcttccaaagttatttagccaatccctgttgtttgatggtgcagcagcttcctgtcccttgaacgtcctaaacaacaagagacctgccttttggttatatttcatttgacttgaggctatagtcaggaaaggagcatgtttttatattgtttagcagcttttctttggtatttgtttctccaagttaaaatcactagcgattctgatgggagaggggtaggaatagcaagaaatgttttttaaatggagcagtgaacaatctccccctcagatcaggaacaaagcaagtatgtttacccttacatgtctgttctacattttactaggggactagccagtgtaagcacacaa

SEQ ID NO: 243144 - DNA, 469 bp, Homo sapiens
taagtacagcaatcctctcctatgcttcctaggttcaggacacactttttcccttgtaatccacttcaaagagattgtgctatttcgttttctggcccttgagtccataactttaactttcaactgcatttggtttagcaacatattatgccaaacaagcagaatgaatgtttaatgggatttataatgaaagaatttctttggcaattgcaagatggctgaatgattgaataggaagtaaagaataaagactaaaggtatttgaaagtccctgtctcttacctctctccctgactgaatattcagctagccaattatctaaaagacaactggtatttcatttggaaatgttggccaatattctgaatattttactttattcaatatgtagctacttggaagtcatccaaacaattaataaacacttaaaaattttactgtggatgtttgtctttatctaaaaaatcga

SEQ ID NO: 243145 - DNA, 421 bp, Homo sapiens
attggcttctaccttatctcatcccatacagaattttgggtggtgaacaaagacctataagatttggccagagaactctctgagcagcagattaagtggagaatgaggcaaaaattacccccacgtaccaaaaaaggaggcagcaaacaaacttacttgctcctaagcttcctggtagccaatcgggaaagtgaaaatagaacagctacacagattataatatccatgagatttttaatttttctccaaaggaattcagtaacttttcatgtgtgtgagtgtgtgtgtgtgtgtgtgtgtgtggctgtagagcatgtctttatgaagacagccctttatgttactactattactgccaataataatcctcacagcaaactcatgaaataaacatgatcattattcccagttgacaaatgag

SEQ ID NO: 243146 - DNA, 381 bp, Homo sapiens
ctttttcttgtgttggttttggtcagttatatttccaagaaatttgtctatttattctaagtcatcaaatttattattgtaaagttgtctgtgatacctttgtattatttttataatattttcaagatctgtagtgatacctctcttttcattactataattggaaatgtgtatttttaacctttttcttcccatcggcattgctagagagttttccacatttttaaagtttttcagagaataaaattttgaatttctccattgtatgtctggcatatttgccattaatttattctattaccattcttttgttctttcttctacttcttgagattgattaaccgtatttgtttagcttcttgagatgtcgacgcttacatt

SEQ ID NO: 243147 - DNA, 266 bp, Homo sapiens
cctctttctcagtagactcaagttcagcccacatattacatcaccaaaaattgctggagactgggggcgggaatctccttaggatttcctctttgtagccttaaataggggggtgggatcagcaggaggttgaatagttttgaacaaggagagattgtgtgcaggttgaaggaagggcaccatctggaaacaaactatcatagttcagcgggcaattataaaacaaacattttagtctgctggccagagatcttttaagttgaata

SEQ ID NO: 243148 - DNA, 475 bp, Homo sapiens
atcttgcaacattcattcccagggtcgctgtaattggttcaactccatacaaaaaaatgaggaagaagaagaggaagaagatgaagaaaaagacgattctgactacatagaacaggaagtggggcttcctcttttgacaccaatctctgaagatttaggttattttacgtaactattatcacacacagacacacaaacaatataatatactgtgtgcattatatagtaaatatgagagtcggaaagctctaaaaactggacaggagccaaggtctcatcctcttcccattcatgttctgggatgatagggagtgaagaatgtagctggccacatcaatgttctctgacagaggttgaaggagtcatgcagacaggaaacataagttggctgtagcgctttctggaaatgctgacaattgtctcctttattattcttgtcttgcattctgcagaccataaacaaatggcataaata

SEQ ID NO: 243149 - DNA, 459 bp, Homo sapiens
tgtctcctttttgcatagtcatgaatgtgttgaaagtgctggggtgtctggttctgaaaacattaagatcataagtttgtatttatgactacatataatatttcattaaaataatcttagcaataaagagcaagaattgaatttatttatttatttttaagatggtgcctcactctgtctcccaggctggattgcagtggcgcaatcatagttcactgtagtctccaactcctgggctcaagtgattctcttgcctcagcctcccaagtagctgagactccaggtgcacaccatcacacctggccaattaaaaaaaaaaaagttgtagagatgggggtctctctttgcttcctaagctgatggcaaactcctggcttccagcatttctcctgcctcagcttcccaaagtggtaggattacaggcgtgaccaatcacacttggccctacatttttttttt

SEQ ID NO: 243150 - DNA, 322 bp, Homo sapiens
accagaagacccactgtagaataaatgctaaaagaaattcttcaggctggaaggaataatatcaaagggaaagctggaattgcaggatgaagtaggaacaacagaaatagtaaatatacgggtaattacaaaagatttattttttctcctctcaaattctttaaaatacatgtgactgttgaaagcaaaagttataacattgtcaggaaggaggttcagtgtatacggatgtgatacatgtgacaactataacataaaaagagagggtaaatggacctgtacacttatagagcctttacattctgtttgaagtggtaaaaga

SEQ ID NO: 243151 - DNA, 395 bp, Homo sapiens
ctcaaactcctgacctcaagtgatcctcccacctgggactccccaagtgctgggattacaggtgtgagccaccacgcctgaccacctttattgatttttgaatgctaatccaacttctccatgctagaataatcttaacttgttcaagacatgtaatcttttaaaaaatgtatattcctggattcagtttgttactatctcaagatttttctcactacattcatgaatgataatagcctgtaattttcttttttaaaaaatttccttgtgttgtttgtttttcctcatcgttccctaatggtttggtattaaggttatacaggcctcataaaatgagtttaacattgggattattttcccttgcatgtttagtagaattaactggtgaaaacatc

SEQ ID NO: 243152 - DNA, 402 bp, Homo sapiens
cggtagtattaataggagagcaaagagctctggacgagccagaagtcattcctattccacctgcattccctaccagcacacatgtggttcactcagacgggctcaagcaggccaggcgaagccctcttaagaggcagagatttctgttcctgggccaatttaattatttaaatttttgcaaacatttactcacattcgatggcagatctgtctgctaaaattagacagtcctacagtggtcacaaatgacagattcctacaatctatgaatcttcaagggtactccccaatcctgctgtacatacaaaggggttacaattagaccactcattgtaaaggccaattatatgtcctcagtaaaaagaggggggcagtggtgatctggagcctgcttataccagc

SEQ ID NO: 243153 - DNA, 408 bp, Homo sapiens
gagtacaaatcttcacaaagcacccgcatccaatgttccagtcagtagtcagttaatgctcctgcaaacgtatcatttcctctttggtttttccttttcaaaaacaacctaaatccaagtgcgttcttccccgttcttttcaaaatccttaattttaattcatgaatttacatcaccgataccaaagcaaaaacgatccccgacgcctgcccggtacaaagcagttcggcttgcggagcgcgaaagggaggtgcgcacgccctctggcggcgcggccccgtgcgtcccagacgagccggcaccggccgcgaggacccgccgccgggaccccagcctgcgccgcaccctcgcgccctgcgcccccgcgtggcctgcgcccccgccctgccccgccccgccctcccgctc

SEQ ID NO: 243154 - DNA, 459 bp, Homo sapiens
tgcctcagactcctgaatagttgggaccgcaggcatgcaccaccttgcgtggctcctgttcagtttttaattgggttgttgttgagtttgaaaagttttttatatattctggattctagaccattttcagatgtatgatttgcgtatattttctcctgttcattgtcttttcattcttttgatattgccctttgatacacaaaggtttttaattttgatgaagtccagtttatccattttacttttgttgcttgtgctttggtgtcatatctgacagaccattgccaaatccaagttcatgaagttttacccctcttctgagagttttagaagtttaagttttagttgatatatttaggtctttgatctattttgagttaatttttgcacatggtgttaggtaagggtctgacttcattctttcgcatgtggttatccatttgttcatcaccatatttt

SEQ ID NO: 243155 - DNA, 204 bp, Homo sapiens
catccaaaatgactactaatcaggataaatttatctatggatctgtttggtggatatatttatatatctaattttaacaaattcatgaggctgtgaactcttatatttcagtttttacttaattctgtatcgctatcattctgtatgccattagcatccttcatatgtggtatttattcctttgcataaatgtgttataactgg

SEQ ID NO: 243156 - DNA, 253 bp, Homo sapiens
agagcccatctcttgaagtggggggaaaaggggaaaaatcctctacggcgtttattctggttctgggtgggccagggcttcactgttttacattcccacccacagtgtaggagggttccagtttctccacatccttaccaacacttgttattgtccatctttttcatgtagcagtaatttctttggcttgttccagaatcttacatttttttcttacataaaaattggtatctaataaatatgagtagatctc

SEQ ID NO: 243157 - DNA, 643 bp, Homo sapiens
tgtaaagcatttcttcctgatacttaagcagtgccttttagtgaatgttcaggtgtcttttttctccagtgttaatatgaaaaacagttcaacaaaaatgtacacatattctattttaaaattacaaaatcttaccaaattgcctcaggaaatagctgtcactactgcattaattctaattgttcagtcaatatttattaaagtctcatctttccagatattatgcaagatcctggggaaactagatacatggaaaagcccttccttctgagaggctcttggtctagtgtgtgtaaacaaatatgcatattgaaattctgctggtcacccagtaaacacatatttggtacttgggactattgccaagcaccatgaaggcattggtccttgtattcaagattgcattctaaacatgagcaatttttaaaaatagtactgtgtaaatgtttataaaagagtgtcgtacagagtaagtactgccaaggtacttattttgaagtacttgagaaatgagaaggagtagtcagagggcttcgaagtggaagtctcccagtccttctctcagcagctagacttgctttctacttaatacagccattgatgagaatgctttcatggaactgtattcctagtatacttgtct

SEQ ID NO: 243158 - DNA, 509 bp, Homo sapiens
tctcttcatatgcagtcatgcattgtttaacaatgaggatacattctgaaacacgcattgttaggcaattaagtcattgtgtggacatcatagaacgcacttaaacaagcctataggctttgtggtgtagcctgttgctcctgggctacaaacctatacagcacgatactgtactgaacactctaggcaatgtaacacaatggtaagtatttgtgtatctaaacatagaaaaggcacagtaaggctgggcgcagtggctcatgcctgtaatcccagcacttgaggttgggagtttgagaccagcctggccaaaatcaggaaacctcatcttttctaaaaatacaaaaattagctggatgtggtggtgcactcctgtagtcccagatactcaggaggctgaggcaaaagaatcgcttgaacccaggagccaggaggcagaggttgcagtgagccgagatcaccccactgcactccagcctggggaacagagagagagactccatctcaaa

SEQ ID NO: 243159 - DNA, 660 bp, Homo sapiens
ctgtgagaagcccttttttaggtctttctgctctgttattcagatgtatacagggtataaataaagtttatgaccaaattgcaccacttgtgataagcaggattcacacaattacattcaccactccttagggaggacccattaccatgggcatacatagtattaactataaatgcatttagaatagtctttggcttagtatgtgctaaccaaattcagaaatataaaataaaatttgcataaacattaaggggaaaaaaaaagaataatacaatgaattgtgatgacctatctggcctttcttctttgaaatgcagaaactccaccaaacacctcttttggtcaaatggtccctggtcccctttagtttccaggctctcccatataaggtggctaaaagttaaatttgagtatcttagcttagaagatagttcattcaattcaaaatgcatttcttgagatgataaaaaaatatatacgtaaagtaaaaaatgactaaggtgttcatgaagcaatacgataagtagaatatctagggatgatggatagggagttgattttaaactaaacaaccaccaaaaagctatattagtgtttcgtgtgtacatgtgtaaatgtacctttcatttcacaacttatttttaaataagtaaaaaaaaa

SEQ ID NO: 243160 - DNA, 448 bp, Homo sapiens
gtcgagctgcgcggggctgctggaagcccaggcgggggaagggggccgtgtgtgggggcgcagagcgcccttgagccttacgcagaggtcttgtgtgttcctagttaagccctcccacgcccgaggccccatcgcttcctctccaccctctttacccaccaatattccaagcccagatcctaattccccaccgcattaccccgccctggatttggggaatgtttttctttattttaatatagctcaaggaaaaaatacgtatatcttgagagatttggggtggggaaaacaaaagccttgcggagtagaaaaaacaaaggcttatttttataaatgtttaatgttttcaccccctggatgctccgagacgccgtaattgtgacggcggggtacgtgtgccataaatcatttagttgctaataaaaattctgcctgtttgccctggaat

SEQ ID NO: 243161 - DNA, 139 bp, Homo sapiens
tatgtcagaagacggaaggatgctgagaggaatttgagggaatgggccttgctatgtttcctccagtttactatccttagttcatatcctttgtcctatcacattttcccacaacactccactcttcattaaatcaaat

SEQ ID NO: 243162 - DNA, 384 bp, Homo sapiens
gctaataagatgctccacaaacacttattggatgaatgaatggttagaattccaggcaactcacttgctcgctccagattaagaactggtgttatgggctgggcgtggtgacacacgcctgtaatcctagcactttgagaggttgaggcaggccaatcacttgagctcaggagctggagatcagcctggataacatggcaaaaccccgtatctacaaaaataaaaaatttttaaaaaaattagccaggcatggtgatgtgtgcctgtagtcccagctatcaagggggctgagataggaggatcgcttgagccttggaggtcgaggctgcagtgagctgtgatcgcaccactgcactccagcctggaaatgagactctgtctcaa

SEQ ID NO: 243163 - DNA, 507 bp, Homo sapiens
agaaatgttgttccatggggcctggggatcagatcagccagacagaaggaactgaaatcagggttcttgaccttggcactattgacaccttggggtagatcattccttgttctgagtccatcctgtgcattggaagatgtgtagcagcatccctggcctctacccagagatagatgccagtagcagtccccagttgtgacaatcaaaaatattaatactccaggccaggcagagtggctcatgcctgtaatcttagcactctgggaggccaaggcaggtggatcacctgaggtcaggagttcgagactagcctggctaacatgatgaaaccccatctctactaaaaatacaaaaattagctgggcgtagtggcgggcgcctgtaatcccagctactcggcaggctgagccaaggagaatcgcttggacccgggggcagaggttgcgatgagccaagatcgcgccactacactccagcctgggcgaaagagtgaaactctgtctcaaa

SEQ ID NO: 243164 - DNA, 671 bp, Homo sapiens
tccaactttccattgctcctaagacaaacctcacgtcttcagcacagcctccaagctatgcacaagctgtcacctgcccaggactccgcccctctctcctctcactccaggttccatcccttccctcccttcctccagcaacccaagtgcctcttgctacaggccccgcctggtcttttccatgaggtgccatcagccccatttctggaagaagtaagtgtccctgtcacacgctcctgctgcccccctctgcatcccggccctgacagcaaggctgcaggtagctgtcccagaaggagagggaaagggctcagcgcacccatcttacgtttggaaaactgccacctgcttccaccccacagggctcagggagctgcttcagagccgggtaagggtgtgagctgcagagccaactactggcactttctgtgtgatcttgagcaagccacatcacctccctttgcctcagtttactcatctctaaaatgaagatattgggccggatacagtggctcacatctgtaatctcagcactttgggaggcctaggtgggcagaggtggccatggctgttcggggttttggggtggggtgggggtcctgttctttgtaccttgagctcaggagtttgagaccaacctggacaacatggtaaaaccccgtctctaccta

SEQ ID NO: 243165 - DNA, 462 bp, Homo sapiens
ctgaagtcctttccgttattcttctttttaacatagagaagctttattcatattttgtattaatatttttctatataaaatgtgcctttggttctttttatgacttaaattttatttctgtatctcattgtgaggggctatcctgtgcctgtacccactagatgccagtagcagccccctagttgtgaaaaccaaaaatgtgttcagacattgtcacatgtcttctggggagcataattgtccttgattgagaaccactggaataaagaaaactaatatattagactttagtttctaaagatttttctgatcttcttaggtgtacttgctgttgcttccttgatatttgtcaaaaagcgtagagataaggagaagtcctccctgctatgtggttcccaaccatcccaccctcaaagcattcttcaagtctttttcaatatcaggtgttggaagtttaagaga

SEQ ID NO: 243166 - DNA, 1159 bp, Homo sapiens
gattcatggaaaaacaagatagattgttttggagaagcaatttggtgtggtgattaagagcatggactctgtagtcgggttgcctcagttcagaattctgtgaatcatttactggttctgtgaccttggagaagttactcaggcttttctgtgccttggtttcctcctgtaaaatgaagataatggtatctacttcatagagttgtagggattaaatgaatgttcatgtgtgtgtcacttaaaagaatgcctgccacataaccctaaaaaatgttgctactttttcagtattatttttactacttggaaagaataggtcatggatagtaagtgagagatgacagcaattggagatttaaagagacaagttaataaaagaactttaaaggtcatgaagtttagtttccctattttgcagtgagaaatttacaacaaaatgtagtgttagcattttgtccaacatgtcgcctggttgtgttaactactcagaaggagcattttaggacagttaagtgtaatgtctttgttggcttaaccaaacagaaatcagttaagcgttattaatgatgtggcatgcatgcatgataaggatataaaatatcctgatttattgaaggaattaaaaagggaatttttgtgctattaaacatcatgatacatgaaaggccaaaaaggatataaattattgatctgaatgggattttagtgacagaaataggttgtgaggtggattttagtttcatagtgaaacaactagctattaacgttatcagtgaaatgttcagaagacgatgatacaggacccaagcggtttgggaatatattgtcaagacggttgtctcatgttaggcaagtagatatagagagaagagctgaagataaggacctgatttctgtgagtaagatggaaaaagatagtaaaagtaagaatgataaaaggaaagggaactactgctgtccgcaaacaagctaaaggaaatttaattgctaatttaaatttaatttaatttaaattgcatttaattgctactgctattgattttagtgaattttacatgtctcattattatggcagatgaaatagtttttgcaaaatgaatgaggaaaggaaggaaaacctaaaatttgttatttgtgactataagagggtagaaatgga

SEQ ID NO: 243167 - DNA, 574 bp, Homo sapiens
cctaattttttttttaatagagtctcactctgtcgccccggctggtgtgcagtggcacgatctcagctcactgcaacctctgcctcctgggctcaagcaattcatctacctcagcctcccaagtcgctgggattacaggtgcccaccactgcgcccagctaatttttgtattttcagtggagacggggtttcgccatgttggccaagctggtcttgaactcctgacctcaggtgatccgcctgcctcggcctcccaaagtgctaggaccacaggcatgagccactgcacccagcctgttctgcctaattttttttaaaccatgcattaatgatgaaatagtcaccgctttcatgacagctttccttgctctccaaactgtgtattattaccatctcttctgtattctaggagaggaggaagagaggtgtatatgcctctttatagcctgtgtaacattctgttttgtattacagccatgtttgtacttgggatggggaccttagcatctcttgttgaacagagcgctttatacacaacagaccaacacgtttggttggatgaatggtcatattc

SEQ ID NO: 243168 - DNA, 510 bp, Homo sapiens
aaaagcgtacacaagaagaacacaatttatgaaatacaggataatacaggatccatggatgtagtggggagtggaaaatggcccaatatcaagtgtgagaaaggagataaacttcgactcttctgccttcaactgagaacagttgaccgcaagctgaaactggtgtgtggaagtcacagcttcatcaaggtcatcaaggccaagaaaaacaaggaaggaccaatgaatgttaattgaaatatgaaagctgaaatgcaacaaacaacttccgcttaaaacaattaagttgttaataactgtgattttgtaaatttcagtaattcatttaaatgatgtttcagtagatatattctagcatattaagagcttttataactgagttatagattagtttgctttctggaataaaattttcttcttatactcttccttttttttagatattacattttgcttttatgacattcacgaggcaaaaaataaaatatctttttttgaaggaaaaaattt

SEQ ID NO: 243169 - DNA, 483 bp, Homo sapiens
aaaagcgtacacaagaagaacacaatttatgaaatacaggataatacaggatccatggatgtagtggggagtggaaaatggcccaatatcaagtgtgagaaaggagataaacttcgactcttctgccttcaactgagaacagttgaccgcaagctgaaactggtcatcaaggccaagaaaaacaaggaaggaccaatgaatgttaattgaaatatgaaagctgaaatgcaacaaacaacttccgcttaaaacaattaagttgttaataactgtgattttgtaaatttcagtaattcatttaaatgatgtttcagtagatatattctagcatattaagagcttttataactgagttatagattagtttgctttctggaataaaattttcttcttatactcttccttttttttagatattacattttgcttttatgacattcacgaggcaaaaaataaaatatctttttttgaaggaaaaaattt

SEQ ID NO: 243170 - DNA, 370 bp, Homo sapiens
ctgctttttcctacaaagtctcagtgctatttatggttctgttgttcctccagaattttgaaatattgctgttttgttatgtttatgagatacagtagttagcgtttcttcaatataataatgaatggaaggtttcttttgttttacaaatgatttttttatctccttccctagtcctgtgacatctctaattctgactttattattaccaagttgcttgttaaatgtcttcaatgcaaatgaaggttatttttcatagaaaattaaagacacatctgcattcaagttatatagagtttttttttaattttggccccaaaatgtatgcttttcatataaggcagaataaactgtattatttgaaaagata

SEQ ID NO: 243171 - DNA, 499 bp, Homo sapiens
cttttacagctttgtccaacatcaaaatcaggtccatatataagacagtttctagccagtgttttataggagtgatttctggatgtggtatctgtaatgtggccaagataatgtgaagactctgccttctgtgggtcggttatagacaagtcacttatgttaccatcttgtcaacaacttgaattcctcagtttgtcctttttctggttacttctttcttatccaattttttaaaaaatgaaacagttcagtcagagcaatgtgtgcaacttattagcctgaacagatgagctaggaaagtcatctactctccatattcctgcatttaacaactatttattcatgacctactaagtgcaatacactctgtaggccctgaggatagcgtgataagccccatagacacagtttctgtcctgtgaagtttatactctagtggagaagatagtaattcagcagtcacaaagaaaacataaaattgtaactctgcccattacaa

SEQ ID NO: 243172 - DNA, 528 bp, Homo sapiens
cattggatgctgtgtatcatcaaaaaaagcttctggttaaaatgtgcatggaattcagcattaaatcttgaatgtaagtgtgctagtttggtagaattttcctaaatgtattgaatgtaatttataaattatcaagggaaattgttttagaagagtttcagaaagtatatagtatatattataattattgattataatgtgaaacatatagtccttgaaatagtaaactctatgtttatgagaaagaaattcacctcaacattatttatatcatctattgaacctcaagttggtttataaaaatttttagagtttgaagtcatatataatgtataaaaaagaccttaaattgacaatattttttgcgttctcagagtgaaacataggctgggcgcagtggctcatgcctgtaatcccagcacggggggatcactttagcccaggggtttgagaccagcctgggtaacagagagagaatctgtctctacaaaaataaaaaaaaaaaggtttcaaatgaaacacaggttt

SEQ ID NO: 243173 - DNA, 713 bp, Homo sapiens
aggtggagcttgcagtgagccgagatcgtgccattgcactccagcctgggtgacagagcgagactctgtctcattaaaaaaaaaaaaaaaaaaaaaaaaaaaaaatttcagattgagagagactagaactcctccataaaaataaattaatttcatcacagctagtgctaagagattcctgaaacctgaaacctggaggtacttaggaaacaaggattcttcctgcatcgggtcctggatggagatcagacagttggtagtggtgttgcccctccctctttccttcccttagcaaataagtatttcaataaaatatgtgtatttcaataaaatgttagatcaggaggctctctttaaatgttattttatctatatcaaacacatttaaaccatcaaagcccagacataccagcatatgttgtggcatgccccagttcatcattttgtatgcttaaatcaaaatacttagcacttcagaaaatgatttaccatcaagttttaaatagctacctgatatcatatattctcttttaatttcacagcacattgaattcactgaatatcaagttccagttcctgtggtaaagaatctctgtagtagagtttatgtgtagcatttaaggtatacattgctcctattctgtgcttttcccaaattattatatatttacagacatagttctttgaagcttagataaattataaacaagtgt

SEQ ID NO: 243174 - DNA, 381 bp, Homo sapiens
gtctctcagaacaagacagcatttcctgcattctaggaggctctctaattccccttcccagttactgctatctccggctctcaagggccacctttgttctgacttgtattaatgtagattagttttgcctactatagaacttcacataaatgtaatcatagagtatgtactcctgtgtcttgtttctttcactaagcattaaggctggtgtatgcacattgttacatgtgtcagaaatatgttgtatgttatttttattgctgagtgatatttcattggatgaatatgtcataatttaccctttctactgatagacatatgggtttctagtttttttctgttatgaataaaactgctaatgaacatttttgtaaagtcttt

SEQ ID NO: 243175 - DNA, 282 bp, Homo sapiens
cccaggagtttgacactagtctggccaacatagtgagatctcatctcttttaaaaaaaaaaaaaatccagcttcagattgcaaaccttccctccacctgaggcgaagctggctcttcttcctgcatgctccctttgtgcttcctttagaccatagtgagcccctaaggttatttagttttactttcctaagaggccagcccaggatctggttaaagaaggtctccctaaacatcgggtaaaagtacataaataaaatggttatcttggtgagcagtcccttt

SEQ ID NO: 243176 - DNA, 621 bp, Homo sapiens
cctcccaagtggttgggattgcaggcatgtgccaccaagccaggctaatttttgtttgtttgtttgtttgtttgttttttgggatgaagtctcactctgttgcccaggctggagtgcagaggttgcagtgagccaagattatgccactgcactccaacctggaccacagagcaagactccatctcaaaagataaataaataaataaacaaacaaacaaacaaaaattggatttgaacccctttctcttctcagcctccaggctcagctgaaatgccaaaacatatatgaacaaaacagtttccccagttggaatgtttattttttagacagggtctcattctgtctcccaggctggagcaccatgatgcaaccttggctcactggagcctcgacctccagggctcaagtgatcctcccacctcagcctcccagttagctgggattacatgcatgcaccatcatgcccagctaatttttgtatttttagtgaagatgggatttcaacatgttgcccaggctggtctcgaactcccgggctcaagcaactcatctgcctcagcctcccaaagtgctgggattataggcatgagccaccatgcccagccttgataataatttaa

SEQ ID NO: 243177 - DNA, 423 bp, Homo sapiens
tgatgaaaaatcaaaatgtgtgagatgcagttaaagcagcattctagggaaaaatgtttcaaatcaatagtctaaactttcatcctaagaaacttagaaaaataacaaattaaaccaaaagcaagcaacaataagcaaataagaagcagaactcaatgaaatcgaaaacaaaaacgagagaaaaacatgaataaaatccaaagatcaagtaaattaataaagctctagacagaataagagaagacgcaaattgccaacatcaggaatgaaagagaacatatcagccgggcacagtggctcacgcttgtaacccaagcactttgggaggctgaggcgggtggatcacctgaggtcaggagttcgagaccagccaggccaatgtatagtgaaacctcatctctactaaaaaattacaaaaattat

SEQ ID NO: 243178 - DNA, 450 bp, Homo sapiens
agataataatttaagaattctgccaatctgtattcgtatgtttcttcccagttatgtctttaaggcctaagaccagacactctactgccctgtgcctgcctttggagcttgagcggggaaagggacagggaggagggaggtaggggttagggatagttccccaaggactgccaggaggaggaatgggtgctgggcagatgaaaacaccagcatcctccctagattctcgatgggcaggaaaccccaccttccctctttcctcttcccatcttccttattcccaaaataatctccccccgtaacctgagtgctgcatcagcctgggcagtgatctgatactctgatttatatactttaaaacaaaggtgtaaataatacacaagtcccctagggatcttgtaatgaaaagaagagtttaatatcccaaataaaactctaatgaagagttta

SEQ ID NO: 243179 - DNA, 521 bp, Homo sapiens
tttaactatacgaagtacaagaggctgagtaagcttggaatccttagaagatcaatatgctagttctggcttatcattttacaaaactgaggcccacaaggaccaaaaggctgtcacataactggcaggtaactgtgtcacactatgaaggtccttgcgtttagtcttttctcgagagcaggaaatctaggctcatagcaaaggacagggtggtgcgtccttctgggaagcattctgctcttgtccgtcccaggattccaaagggtacctccgtacctcagttatttcccttacaccgggacatcagttacataaacccctcctgatgtccgacctggctcacaataaataatcaacactggttcacttagaggtttctggtcctaacgaccagtccacagagcgtccacgaagacttccagaggccagtggtgatgtggggaataaacccgcctaaaccgaattaaaccagcctttcctcctcggagtacaagaaggtaggtgaagccgacgcggctttt

SEQ ID NO: 243180 - DNA, 459 bp, Homo sapiens
caggagggaaagcctgtggaagaatgctttttttaaatcgcttattctgtggtctgcatgataaatacattatttacaaatacctacagcttttgctatcccttactagttaaatattattttgcaatgcagtctggacatctgtttcaaaatagaacaaaactgttgtattttttagtttgtatactgttgtctgtcagagtggctataatcacatttaaaaattaactgtgtacaaattacagatttctttagaaagttggttgtatacattaactgtgtatatcctactaacagatatagttacttctgagacaattaatttgacttgaatataattagtacattagatgagataattagctgttttatagactacctaatattgtcatgaggctagcaaattgtttcaaaaactttatcttttataatatatcgaaaaacattaactcctaaatt

SEQ ID NO: 243181 - DNA, 470 bp, Homo sapiens
acacatcatctgatattactaaataaggtaaaggctagaagggataaaggacaagactaacaaatatgactaaatactaatagaaaaagttccatatacaaaaaaagcaccgaaaataaaatcaacagacaggctgggtatggtggctcatgcctgcaatcccagaactttgggaggccaaggagggaggatcacttgagctcaggagattgagactagtctgggcaacataggtcctttttctacaaaaaaattttttaaaaaaattatctgggcatggtggtgcgcacttgtagtcccagctactcaggagcctgtggccagagggctgcaaggttgaggctacagtgagctgtgatcatgccattgcactccagcctgcacgacaaagcaagatcctgtctcaaaaaaaaagtcaatggacaaactgcaagaagtatttacaagtaaggatttatttcccaaataca

SEQ ID NO: 243182 - DNA, 720 bp, Homo sapiens
gaataacttaattcttaggagacacttaaataagaattatttctgttattgaaacacagttccagttacagggtctttgaaatcatgagagagttgtacagttatatttctgtatagtgtgaagagctatcttattttttgcagattacttactttgttaatatacctccccctcctttaaccaattggtccattattattgtaagcgtattacaaagaatactcttttggaagtcagaagaatgatacctaatctttaatttcttatcaggaactaggttttcattgtatgatggacacgatgtaacccctaaagacagaaaaagaagtgaaaaatagtcctcattctcatggatttatagctgtagtagaagaaaagatagattaaaaagggcataagttcctctaatgtttattgcaatgtgaagctagatagaaaaatagaagaaaacagagagaatcatgatcatggcaataaagagagagtagctaactcagctggaattggcctggagaaaacgatggtgagaactcccggagaacgttagaactgagctgaagcttgcagaatgcataggagtctggcaggcagatgaggcagggaggacattaaaggcaggaggaatagcacatgatagtgggctgcaggctgggctgtagtttgaggggctgtaattcaatacaggcggatgcaggggaaaagcaggcggtgaagtgaaa

SEQ ID NO: 243183 - DNA, 227 bp, Homo sapiens
ttttcatttgaagccggggttcattgcagcttgatgtaagatctaaaagaagactttggaggccctgacatccccttctaaggctattgccacctgtccagatgacaatagaagtcctgctggtccaacctcaagcctgaatgccaagattagcttccaattgtgtctacatttagcccatggagatggatgttttaactatcattaaagtgacatcctttcagtta

SEQ ID NO: 243184 - DNA, 435 bp, Homo sapiens
ggtccccttgcatccggacagaacccatgacttgcttctaaccaaaagaatatggcaaacgtgagggatgttactcccgtgagcaagctgcatcacgtggcacagataaggggatactgctcccatgactgccttaccttgtataagactgactcagggccgggtgcagttggctcacgcctgtaatcccaacactttgggaggccaacgcaggtggatcaccaagtcaggagatcgagaccatcctggccggcatggtgaaactccgtctctactaagaatacaaaaattggctgagcatggtgatgtgcgcctgtagtcccagctacttgggaggctgaggcaggagaatcgcttgaacctgggaggcgcaggttacagtgagccgagatcgtgccactgcactccagcctggcaacagagtgggactccatc

SEQ ID NO: 243185 - DNA, 499 bp, Homo sapiens
ctccgtgagacaagagatgctctcagggaaaagacattggctttaggaagtgtacagctggacctaaggcaagcacagcatcgaataaaggaaatgaagcagatgcatccaaatggagaagctaaagaaagtcaatccattggaaagcagaactctttagaggagagaatacgtcaacaagaacttgaaaatctcttgcttgaacgacaactagaggatgctcgtaaggaaggcgataataaagagatagtcattaatatccacagagactgtcttgagaatggaaaggaagatcttctagaagaaagaaataaggaattaatgaaagaatataattatttaaaagaaaaactgcttcagtgtgaaaaagaaaaagcagaaagagaagtaagtatgaagaaaactataaacttctggaaagaaaatttaaatatttcattctggctatatgttgaacctagttcaatatacaaataaatagatgaaaatgtgtttacca

SEQ ID NO: 243186 - DNA, 469 bp, Homo sapiens
ttttttgtttgttttttggaaggaggatatataaagtaattattactacatttttagctgttgccaagttgaaagtcagtgtttagttttttttaaaaagggctatttagtgtggaattcctaaatattatagttccctcttctgtcctttcagagctattgcaccctgttaaattttttttgcattcagttcaaccagtgtttgaaaattaccaatagacttaaagtacttctctgaagttagaagagctcctatgtctgatgctatattgctagtatttctattcaggttggaatttggaatagtcattatcaaaagttatttgtaggcaaaagaaaacaaaaagaaaaaagttatctgtaggaaatattggagactggggtacaaggtaagtgacacagtgaagaagcacagacaatttcagaatatgagacacctaacatggtttctgcaaggtattggcgtgga

SEQ ID NO: 243187 - DNA, 375 bp, Homo sapiens
tggagctctggaaggggtcagtggacaagtgggtagagccaacaccaattatagggttttgtcagcaaagaccaacatctttggggcctcaagtgtaaggccaggcagcccactgtctgctttggggcaagttacctatccttttagtgttttagtatctcaggtaaatggtcattttccctgccccgtggcatgggactcttccgctgatagctttaaagagtcacctttcattttgaaaatgaaccctcctgaaatggcaatggattgatgattttgggggttgggtcttagatacatgggagtttattatactattgcatttttatgtatgtttaaaattctccgtaataaaatgtattttagcaacaacaa

SEQ ID NO: 243188 - DNA, 454 bp, Homo sapiens
atcagatgatttccatagttttcatagcaaatggaaatggctagaactatgtgataattatgtttctacccctactgcctggtacagtgtatgtctcataatacatatttgtaaaaaaaaaaaaaaaaaaacagaaggtaaaaaagaggaatgaaggtgattaaactctgagatagtgttaggtggcaagttaccagggatcttgagagagcatgaagattagtaatttggaaaatcagagggtagtaagattggtaacaatgagcttctaactgaaatgcctaaggttgctaactatgtcatttaaatttgaggctgttttttccttcatgataatttggttctttggtccttccccaaaccttctcaagtcatttatttaagtagtacacagagattttgcaatatctttttcatttccaaaggcattgtatttcaaaaaactgtcaccatt

SEQ ID NO: 243189 - DNA, 462 bp, Homo sapiens
  misc_feature (374)..(374): n is a, c, g, or t
  misc_feature (408)..(408): n is a, c, g, or t
  misc_feature (454)..(454): n is a, c, g, or t
aaaaaaaaagccatgctattgtgtgacatttttttccaatgtttatttcccaccaaaaagtaaatgcattttaacccattctgtggttcactgtagcttaaggaaaccaagcatatagatgcattagtgattttgtttatattatgtaaaatgtaacgatctatcttagaaataccacagtttgtatttttctttaaggagtaaagatttgtctttaaaaataacttgatattttcctggctttcatttaatacaatggaaaataaagtattacacgaaaaaaaaattttttcttagagacagtatctcattatgttaccccagggcttgaagtgcagtggctatttcaccaggcacgattataggctccactnataggcctcaaaagtcctggggttccaaggcctncctgaaggtagctaggacctttcaagggtacaatggccacccttgncctggggt

SEQ ID NO: 243190 - DNA, 758 bp, Homo sapiens
ctggtgtattcttacaaaatttaaggaagaagtaatgcctattctacacaaactcttctagaaaatcaagagaaaagaacccttcccagctcactttatgaggccatcgttaccctgaggccaaaaccagacagagatattctaaaagaaaagtctacagaaaaatgttcctcatgaacatagatataaaacttctaaacagacgtttagcctatcaagtccaacaaaaacatgaaaagaaagacacacatggccaagtacattgtccttcccaggaaggtaagtaaggttggtttaacatccaaaaatgcaatgaatgtaactcaacatatttctaaactaaaaagaaaaaccacacaacaatctctaaagtggcagaaaaagcatttgacaaaatccagcatgtatacttgattaacactctcacagcctaatagaataaaacttcctcaagctgataaaggacatctacaaaaaccctacaattaacatgacacttaataatgaaggtctgaatgcatttcttctaagatcaagaacaagccaagagtatgttctcactactactaatcaatgttattctggagattctagccagggcagtaaggcaagaaaaagcaacaagtatagtaataatactgtcttgatgggcagatgacatgtttgtctatgaagaaaattcaatagaatctttaaagaaactcttgaaactaacaggtgagtttagcaaagctataccctatcaacaaaaaataaaa

SEQ ID NO: 243191 - DNA, 732 bp, Homo sapiens
taaaaaataaagatttttttaaaaaaaacaaacaaatacctcctgccccacaaaaaaaatttctcaccccatccaagtaccagtcactagactctaacaaacagttcggaattcaactggtgtccaaaaggttaacaacattaccaaggtgaaggaaccaaatcggtatcatacactggagccatggggaagcttttggaactaggatttctgagaactttttaccatatacagcagggaaatctttgtaaaaaggaggaaattggtatagtatattctgctgctggcacgaaacgtgtttttaccaaactaaagtatcctgtagttcaaaaatgttatcacaagattccatttgtgtatctatttaaagttttggtatattttcaataaaaattaataaaaatatttcttctcataatatgtggtttaaatccagattatttcacaatatgtggtttaaatccagattatttcactgtaatatgtcttgatagagttttagaatattgaaatagggtattaagatgctttaaatcgattactgatttgaacattgtaagtgtatatttctatttgtgtgtgtgtgtcatattcaaatatgattaatcatgtatgttggtgtgtgaacatatgcatatataaagcatttttatcagctgtttctggcttcataccacagagaacaatctgaactgtcaaagaaaattaaaccttgagtaagaattcctcaag

SEQ ID NO: 243192 - DNA, 516 bp, Homo sapiens
tcagcttcccatgcattataaaggtggcacttaagtttttatctttgaaaagtgggccccaaagttttttggggtacaaaaagacatgtatgagaaccatattttctgtttctctttttcactctctaaactctttttgtataaataaggattatcctgggcataattcatttgaatatgaaaccaacatactttctttcatttttgtgaaaaaataaccaaaaacatgtattaatgtgatacaaagaaagtctcattcacacaatcaacaatgaggctaagaggtagctaccatgtggctaatgaatgtgcctaggtaacttcctgtttctattcaaaactgctgctttatttgtacattcagaaatatttttttcaactatgaaatttcaatatcaattttttaagccagtttctgcaaaaggaaatgacctgtcatttgatgtgttcatgtgtgttttgtgtttggatagtttatatcatgccattctataaaatgtatgttttcaaaccaaa

SEQ ID NO: 243193 - DNA, 504 bp, Homo sapiens
aaaaatatctggttagcatgctgtcttgaattcaaagtatgaagattgtgttggctgcagaaactttcatgaagtttctgatttctttgaagatttgggggattctaatcagtactctcaagggcttaaaggaccattgttaagaaagatggactgggttgattacatttagttattttaggttcactcttaaggttaattcctttgatcatagaaccagcaaccttgtacatgagcaaaatgttgatggttctctgggatgtaactcataataagctgtttgttgggccctttaaggtcatagtagaattcatttcatattgctgaaattgggaaaggcacaaaaatgtttgaagtgaatacacttacttgaaataacaagcatgaaggtacaacattttgttaaattttgggttttgggtaatgagtttcatttaatgcatagaggaggggaggacataaatatgctctccaggggtgtgagattgcagtgtttatcaaaaa

SEQ ID NO: 243194 - DNA, 413 bp, Homo sapiens
ggattcacccttggcactggtttttgtgtctgccaaaaggttacctgtgggtagctcagcctggtctgttcccacccatttggccttgattccctgaggcttagtaggaatatctgaccactatgcactccacagatcagcccattgcctgagataacagagagcttctcccagtaaacaaggatcaattatatacccagccatgttggttgcagctggcttacccataagtgccatatactggcaaacaggttgaactacacagcccaatataaaacctgccaatagaagtgcatagggctatgaaagcagagccaaaaacccctaaccaacattctctacagtcatacccacctgggtgggggtgaggtgtagagcaagggaaggaaaataacaccaataatattataggg

SEQ ID NO: 243195 - DNA, 360 bp, Homo sapiens
cccctagacctccaattatttctaaaaatatttttcaaacacaatgcctatcatataatcagaaataaccaggcacatgaagagaataataagggagtaataacaatcaagaattttacaaaattaataacaggcaacaaaccacagatccaagagtctcagatagcaccaagcaggataaatgccaagtaataatctatatctatagattattatattcaaactgcagaaaatcgaagacaaaatcttgaaaggagccagagaaaaataacacctgcctataggggaacaaggataaggattacattggccttctcttcagaaaacatgcaagcaagaagagagtgaagtgaaatatgt

SEQ ID NO: 243196 - DNA, 233 bp, Homo sapiens
gtctttcaaatcagataggtggggaaaaaagagttacaaacaaaaaatatattgatactgtcttttatgtttatctcattagctacctttatgagtgctctttacttattcatgtggattcaggttaccatctagtgtccttttatttcagcctaaagaactccctttagtattctcataggggaggtttggttacaaatgacagaaatcaaatttaaactagctcaggtgaa

SEQ ID NO: 243197 - DNA, 328 bp, Homo sapiens
aacccctggtaaaggaggtgaggaacttgctggggggagcacacaaacacctgctgatgtgcctgacttggatacccaggaagttgctggctttctcttcctttccccaacatttttatttgtttgtttgaggcagagtcttgctctgtcacccagcctggagtgcaaaggcgtgatcttggctgagtgcaatggcatgatcttggctcactgcaacctccgcctcctgaggcgggagaatggcgtgaacccgggaggcggagcttgcagtgagccgagatcgcgccactgcactccagcctgggcaacagagcgagactccgtctca

SEQ ID NO: 243198 - DNA, 381 bp, Homo sapiens
tttaataggcagacacaacccccactagtctcaggcatgaagcatgagccagaaagacactcacattatgcgactgagatttcagagaagttaacatagcaaaacttagttcacactaattcataatgatgtactaaaccttcatttagtcagttcaaggaacttatccattacctgcctagaatgaagggaattaaagtataattacgatgaagctgttcaggtggaagaagtagataataaaatttgaatacccttgctactaggaattcaccccacgaaaataaaacagttaaaactcattttccaaacatttactgagtacaaactatttgccagacccaaaacactgctcagtacaggatggctaaaggagaaaag

SEQ ID NO: 243199 - DNA, 592 bp, Homo sapiens
aaagtaagatgtagctgtggccatcgctttccaaacctgtatgaaagtaaaaatgctaaattctcatcttttgagcagagcaaatttatattgcatcttcatgttccattcttagtatgatgttactctattattcattgaataaagaataggtttgggttgggtgagtccttctgaagcccaaaaaaatcatttatcttaagataattattttttaatgtaattgtgacaaagcttataggcaggaattatgagactactgcaattcttttctaatattatataagatatgaagtatttcattgggggtcattattgctcacttaagccaaatagattataatttttgctataaaagatggctaaaaattagtatttatataggttgtccagcagtaggaaatgggaagtaatgaacagtcagataaaatgttaaggttcattataaggtactatccttataatactgattattattagactgactttgaatctcattttttaaggatgcttaggtttacatagctcagatcagctatcttatatcattgaaacaactgtcttaactctttgttacttaaaatatacatca

SEQ ID NO: 243200 - DNA, 660 bp, Homo sapiens
gggtcagaacctagtccagctcatccttcgatctgcaggaagcagctcattcagtaaaggcagcaccagcagatgcttaacagatgtttgctgaatggaattaaattgatagttcatctaaagccaagtctttggcatactgaagaatttctagtttgtttattgaattaacacttattttctgtaatatatgaagcactgggtgttgcttttttgataactttttaatatatgcataaaacagattcatccatcttaaataaataagataaagtacatggtacaagtttatgcttaataaagcactttatgctgatcagctaaaaaatagaatcaattcttctttaaaaatgagagtgaactctgtgtaaagaatgtgacccacactctgttttcgtctccttgtttttctctaaaagcaagtcttaatcgaccccacaggcaaacaaacaaaaaagatgaatgagaaactgtaaaaaatactgaacttataaagtgctctttataatatgatatgacaaagcttgcagaagaatttcaaaggatattaacaggcttctcacaaaagagatggaaataaacaagagatttcagttttgtactctgcacacttttgtatcatcgcttaaatttttatcagcagaaaaaatatttctttta

SEQ ID NO: 243201 - DNA, 471 bp, Homo sapiens
catttacctcatactctcccctagcatagtcatttgcattctggaaggcaagaccttctcccccatcttgtagtcactgtaaagccaagcatggtgcctttgcacagaggaggaacatggcaaaaatttattgttacaacaaattggtacttgatagtttttttaaattgtctttaagaaaaagaaataggccaggcgcagtggctcacccctgtaatcccagcactttcggaggctgaggtgggtggatcacttggtcaggagatcaagaccatcctggctaacacggtgaaacccagtctctactaaaaatacaaaaaattagccaggcatggtggcaggcacctgtagtccctgctacttgggaggctgagtcaggagaatggcgtgaacccaggaggtggagcttgcagtgagctgagatcgcgccactgcactccagcctgggcgacagagtgatactccgtctca

SEQ ID NO: 243202 - DNA, 937 bp, Homo sapiens
tgacttaaaaacataatacaaatctgcagtaatctagatagtatggtactggcagaagaacagacaaatagatcagtgagacagagtccaaaaatagacccatacagaaaaagtcatatgatctttgacaaaaggagcaaagggaacaccattgaaaaaagatactcgtttcaataaatggtgctggcgtaacaggacagccacatacagcaaaaaaagtgaatctagacacagaccttccactcatctcaaaatttaactcaaaatggttctgatgcctaaatttgaactccaaaactagggacttccagttccaaaatggcagtgtagaagcatactggcttcattccccaccaacagaaaacgaaaaacaaatatacagcactgagattgacaccagcaacaacccagagcccaagtatgaggatgaaatagttcctggggccacagagaagtggaaaaactccagtaggagaatcagacttccactttcatgatgcttctgccctacccttatgcccacacagaaaatctcccccacctcataatttctacactgaaagaagtaaaattgaagtggtcaaccatcttccccacctccttgggttccctggcaggagatctgtccttgccttaacccacaggtagcatcatgactgcctgcagggaaaatatcactgaagaccagcagagactattattcccagccccagaaacttcactgtgcaacttggccaaaggagacaccaaatcagaatggctgttcagcagtaccatgctgtaggaggtacatttcccaggtcctgtaggcacaaacccctacctagcctgccttcccacactgccagtgtaatccatttgggacattcagcgctccaaacatttactagagctgaggcaaacctgggcttatggcgccacctagagctgaaaagga

SEQ ID NO: 243203 - DNA, 167 bp, Homo sapiens
gtttttgcctagcaccagtaagacaagaagagaatgctctagtatttagaataaagggagctcagattttgaaatgacaactacagaaagccttactctaacttactggagaaatttaaaatcaagggaatctgaaatttgatcctatgaggattgtaaccagttga

SEQ ID NO: 243204 - DNA, 1255 bp, Homo sapiens
ggaggcggagaggcagcatccaccagcccgctccccgcctccaggacagagcctcggtctgcatgggggtgacaggtgcccatggatttccatgctgcggcaaagggtcagtggaggttgcagagatgcgagatgacttaagtcaacaccagatacaagaggaacaggagctggaggcagacatgctagagcagaagccccaactccaagtggacctggacctggacccagacccagacccagacccagaactggagatcggacaggtgccggctttactggagtcagagctatacccagccctcaagcttgaagctgagctggacacggaagccaactcgaacgaggagtctgactttgaagaacccatgcagctggtatgcaagatagagtccgtccactccaacatggggctgcccacgccacagaccttcagaccgtggagtctgaattcaaactgccggagtttcacggaggagaaccacatgtctgcctgccatcactccatcagtgcgcagacctccaagcacctcttctgggcaaacaagctcatccaggcctcagagcacagcctgcagcgggccatcaacatgcagctcaacaatggcagcgcaggccagcccatcagatccccgctccgggaggccatccccaccaacgccctgtgctccgaggagcagctccagatccctgatgcccactcagctcctccaaccacaagctcccaggcaccaagccccctcctgtcctcagatctcccgccacccattgacctgacagagctaatcacctttgcatcttccctggccatggcctcctccagcaggatggacctgcccagtttggaacacatgatgaaagctccaccccaggaggctctggagccttccacagagcccctcctgaccactgtggaggagcgagagccagaaaatcacgcagagaccctgccagagaaaccacgcgaagccagagcaccactgaaatcttggagtcaggaagacaagaacttcgctcaatcttactttgacttcagcaagccggggatcaagagggccaccatcaaagggcaaatccagcttctccagccaccagccacgtcccctctgctgcagggaagcaaggaagactcagtgccgccaggaaaagagaaagagaatccattattggtgaaaatccattttaagctgtcagcccccacaatcccagagaaatgactagacagaaccaataaagcctccagtgctggcaaaag

SEQ ID NO: 243205 - DNA, 454 bp, Homo sapiens
cactggcattaggcggctttccaccctgggggtcgggcctcaccaaggttgggaatgctcaggctggggtctgccctgttgaaagcctgttggccccaaccctggggtccaggacacttttcttgaggggagaatgagggtgcagggctctccagtacaccttgctttctggtagtgaatggacacagaatgtaatctcagctgcccagacgcgggcagcagcagaagaccccttacccccagcgacctcttcagaggggcctctgggctcacccctctccttcaaccaccctctggggcccaagtgacactctctcttttgtgttgcagctcagtgccgccaggaaaagagaaagagaatccattattggtgaaaatccattttaagctgtcagcccccacaatcccagagaaatgactagacagaaccaataaagcctccagtgctggcaaa

SEQ ID NO: 243206 - DNA, 464 bp, Homo sapiens
ctgttatcactcgcgtgctacagcatggcgttttaaagcctacaaactctccttacaattcccccattttacctgtcctaaaaccagacaagccttacaagttagttcaggatctgcgccttatcaaccacattgttttgttgcctatccaccccatggtgccaaacccatatactctcctatcctcaatacctgcctctacaacccattattctgttctggatctcaaacatgctttctttactattcctttgcacccgtcatcccagcctctcttcgctttcacttggactgaccctgacacccatcaagctcagcaaattacctaggctgtacagccgcaaagcttcacagacagcccccattacttgaatcaagcccaaatttctttttcatctgttacctatctcggcataattctcataaaagcacacgtgctctccctgccaatcgtgtccgactga

SEQ ID NO: 243207 - DNA, 219 bp, Homo sapiens
atggtttagccacatggttattgtggggtaattcaaaggtgtcacctgacacctgagatattaaaaagtaaacatgggagagttatatttatttctgagatgctgtggaagcattcagtgctcattccattatattcatcaggcctcataatatattctcttctacactcttcaaccaaagggagcaggagagaacttggaaatgtaatagatgaaact

SEQ ID NO: 243208 - DNA, 493 bp, Homo sapiens
gacttcagatggccaccacaaacagaaaaggaagatagtgcatgtaatggatgcctgttgttttttcctgccaagcattcattcacccttctgattttccttgggaaaaaaacacctgtcccaatcatagtttctgtggctcagatgggaccatctgtgaggtccaggcctagctgatccacctcggccttccagtatactccatccatcctagacatttttctctttttaagaaaggtactcaattttaaatctcttggcatgggaaatttgggggaataagtaaatttatttctattggaactagaaattgagaaaaattgaaatttttttagcattctatcctttttcataatacagaaatgcaaacatagaaaaacagggaaaacctctgaagcactgctggaaaacaagatgagagtaccaaataacaaaaggtactaggaacatgtaaacctgtgctgctgacagctacctggtaccaggaaaaaaa

SEQ ID NO: 243209 - DNA, 480 bp, Homo sapiens
ttcagaagtatattgttctgcagtattttcctaatatctttttaataagtatagtgtctgtattgttatctcctatttcattcttaatattggagatttttgtcttctcttttcttatttttgtcaattttgctagagatttattaatttttttaagaacaagctttttgttttattgttttcctctttccaatttcactgactttttgccttatctttatgatttctttctttctgctggatttgagtttatttcactttttttcccctagtttctagaggtgcaacttacggacttgagatctacctcttttctcactgttatgaacaggactgggagacccaagatacctccttctcacaacatagctgctgctgctgtcacgtcaatgatgactactactgtacactgaaggcaccactatttaactactcaccattattacaccatttcaaattaaatgaatgtacagatttaaa

SEQ ID NO: 243210 - DNA, 363 bp, Homo sapiens
ctgttcttcctaaagcatcggccttcagtaacttcccaaatctgaggttctatcgtttagaaacagtaaggaaatatgtagaattcttaattagcatcacttagtaattaattgagtttgaagtgcagttataaactgaaaaacacgattactatcttggtatatacgaatcacttccttactcatctcttggcaatacttttagaaagcctactctctagattaagtcatttacttataactttaagtttaggagatgggggatgagtctctattaaaggtggttcataccaaaatacagaactcaaaaagatgcagaacaggctatccttctctcctatacttattaacctaaattaaggt

SEQ ID NO: 243211 - DNA, 448 bp, Homo sapiens
ccattgccccagagaaaagcagcctggctggaggagatgctgggcagaagcaggaaggaaggaaagatgcctggcgtggagaagacttagaagtgatgaccatcacctgttctctgaaaggatgggatgttatcacagcatatcatatatattgtatgttgcatctcagatgacatcatacatcaccttacatcatgtatcacttgtatatcatatgtcatatgttacatgccacatcatgtttcatgtaatatatatcacatatatcacatatcacataatctaccatataacatatcacatattatatatcacacgtcatataactgtctttcgtatttcttaatggatcacatcatatcacattatgtcataaatgacattatatcacatcacatatcatatgctatttgtgtgtatatagataatatatcatatcagatctggt

SEQ ID NO: 243212 - DNA, 416 bp, Homo sapiens
agaaacctggactttattctgtaggtggtaaggaactgttaagttttaaaggagggagaagccatgatcaatttttattgtatttaattgtttttcaaaacccaatgctggtattgaatgaaggttagtttgaaagaatgtaagaccaaagctaggaaaatcgtttaagaaaccattataattggccaaatgaaagataaagttctgtaaggcaatggcagtagtaccatttggaaaggaagaattaattgaattaataacagctataaaactttctgatcagttccatagaattggaatgtgcagaaaaggagactgtgaagagggttccccaggtctagcctaggtgactagaatatcttgaaaccattgaacaggataagaagtactagaggaataattgagagtaaagatta

SEQ ID NO: 243213 - DNA, 411 bp, Homo sapiens
gccatgttggccaggctggtctagaactcctgacctcaagtgatccgcccgcctcggcctcccaaacttctggggttacaggcgtgagccacttgcaccccgccctgtattttttaaaagcaccataagtgagtccaacatgtaatcagggttgagaacaactaagagagatagttatgttacaatggaacagataatttaggaagacttagttccatactcagctctcccactttccacttgtgagaccttgagcaacttacttttctctaagccttagcctccccaactaaaaatgagttgttgtaggtatcaaataaaacaataaatgaggtttccatttttaaaaaacaaacctcctatttgtattgcattttagtttagaaaatgcttttatatctactatgtcaa

SEQ ID NO: 243214 - DNA, 471 bp, Homo sapiens
gggatgtcctctgtgattcgtgcaggagggagacatagttctggtttctcgcagatggtcacaggaatgaggaaagaatgactctttggctcctagcagcagaatcttaactgagtatgacttagcatccttcttcttgctgtgtcatctctcttctcagggcagaagatatttacgaattagcacattctgctagcacatctgtgggaaaagagacacggtcttactgcgttgaccaggatggtctcaaactcctggctacaggctatcctcctgcctctgtctcccaaagtgctgggattacaagcatgagccaccaggcctggcccaattgcttcttaacaacttactattctttgttcactacagtgtatacataactgactttttctttggagcttcattttgtaatgaaggctctggtcacatgtaagacttgtattaaataaatttgcctgctgttctgttaaa

SEQ ID NO: 243215 - DNA, 388 bp, Homo sapiens
aggtcatcattcgtttcaggaagttgagtgaggcctgagacagcaatgtttcgtttagcctggcggtggccctccttgtcttcaagaagagcatccgtggctagcagtggaagatggggttgggccccagagacacggtcttactgcgttgaccaggatggtctcaaactcctggctacaggctatcctcctgcctctgtctcccaaagtgctgggattacaagcatgagccaccaggcctggcccaattgcttcttaacaacttactattctttgttcactacagtgtatacataactgactttttctttggagcttcattttgtaatgaaggctctggtcacatgtaagacttgtattaaataaatttgcctgctgttctgttaaa

SEQ ID NO: 243216 - DNA, 337 bp, Homo sapiens
aagaaaaaactgataagttggattccaacaaaattaaaacctctttctccccaaaagacactgctaaaagaataaaaagagaagctccagtaagatagctaaaacacagattgtcaataagcctttgaaaagatgctcaatatcgttaatcatttttagaaacacaaattaaaaccacaattagataacacacctattggaacagctaacatttaaaaacaacgactgatacatgtcaaggacacagaacaaccaaaactctcatacactgctggttagaatgaaaaatattatagccactctggaaaacagtttggcagtttcttataaaggtaac

SEQ ID NO: 243217 - DNA, 502 bp, Homo sapiens
ccaggattttccaatctctacaatgttaaggggttgttgtgtagttgcattggaagagagaaaggaaacacactctttcattgctgaattctaaataatgatgccctgaattagttctatgagaagtactggcagacagctgttatgtctgcagggcatcaaggggcaggtgtgtctcaccctactaagaattggcagaaatgttttaacctcttctttaggcatctggtgagtattgcagatcttcaggctgtccctaaaaggaggtaggtagccttctctgtggtcactgtgttggatttggaagaaaatataagtagatgttaaggtcagtgctctccaggagatttcaatccaggctatctgtgttcagggaatgatttgcaagaagttggtttatagacgtttactctggaggcacaagctggctgccatgctgagtaagtcctctttgtagatgatgtattttgcttgggcaccaacagaattaaaaacgaaaaac

SEQ ID NO: 243218 - DNA, 580 bp, Homo sapiens
caaccatgatcttctgttatccagaatattcagggcattgggttctcagatcaaaacaaatatttaaataagaagtcattaaaatcactttatattttttaattgatatcttatagaattacaatatgtatatgcggcatctaacatacatattcttttctaaaagtttacatgtcagttgtttgatacatggaacaccttttttgtacatatttaaacatatcaaggaaatagtcacattatcagagtagaccataaactccaatttaattgctagccttttttctggctagaccatctgatttgatatactttatatcaaatactatacactttataatgagtctcatcacattaaataacacaaattattaccccaagttggcatttagaaacaagggagtatgataattgtatagccgggaagattttaatagatatatcagcctggtgatgtggctcacacctgtaatcccagctactcaggaggctgaggtgggaggatcacttgtagctcagagctcgaaaccagcttgggcaagacagtgagaccccttcccttaaaaattttaaaaaataa

SEQ ID NO: 243219 - DNA, 585 bp, Homo sapiens
catagactttattgattgtttatctggttttttgtttgtttgtttatttgtatttgtagaaacagagtctcactatgttgcccttctggtctcaaactcctggcctccggagatcccccagtcttggtctcccaaagtactggggttacaagtgtaagccaccacatctggcttcactgattattttttgtcactttatcttgctttcctttgtagggcctctatttttgttctaagattatgctttatttttcatccttgtatagctcttcttttgttttcccaattttattttatatatttatttttgagacggagtctcgctctgtcgcccaggctagagtgcattggcacaatctcggctcactgcaattgtaagctccacctcccgggttcacgccattctcccgcctcagcctcccgagtagctgggaccacaggtgcccaccaccacccccggctaattttttgtattttttgtacagacggggtttcaccgtgttagccaggatggtcttgatctcctgacctcatgatccgcccgctttggcctcccaaagtgctgggattacaggtgtaagccac

SEQ ID NO: 243220 - DNA, 453 bp, Homo sapiens
gtcagtttcagttccccctctcgtgctagagtcatgcatctgtgacactgtcaggagtgtggggatttgagggtgttgcccacaagtgttttcatgactctttggaattcaaaaggacttttcctgaattgatagactcagttgataggtcacctgaaacagacccaggagacctgattgcatgtttgggcagaggtcagaggctcagataccagctgctgccccaccagtggctcagcctgtgacctcggaagaagccccctgactttcctgcctcagtttctcatggcagagaacagatggcaggtgaacatcataaaacattgggaccttatgaatactggtattttggtgtgagatttttttttttcctaccctttatccttattaagattaattcatgcttacaataatatattcatgattctcgaagcagaagaaagagatggaaca

SEQ ID NO: 243221 - DNA, 502 bp, Homo sapiens
tagagtgcagtggcatgatcacagctccctgcggggtagatttcctgggctcaagctatcttcccgcctcagtctcccgaacagtcagggctacaggcacgtgtcaccacgcccggcctggtccccataagtcccctcttctccgagccaaacatcttcacaccttctggtgatcattagtggagaggcctgtgagaggctctggtgtcaatgtccctgaaatcgagggctccaaattggtcatggctctccagatggcccaaacagttccagttcacaaacatttattgagcatctactacattccaggcactgtggttattataaatcactgagacactgtttgccctaaaggagctacgtgtgtttggtaacagcttcacagtaagtgacgaataagatagcattaatccacatttgacagcaaaagtaccaaaaaagaaagaaagaaaaagaagagagagaaaggaaagaaaagaaaagaagagaaagaaagaggccg

SEQ ID NO: 243222 - DNA, 765 bp, Homo sapiens
attttattataaatggtagagaataaagaagcaaaaaggcaggtaaggtttatatgcttcaccaatagtagtaaaatgtcaacaccaatagactttgataaagtatgtgtatataatgtaataactagaacaattcccaaaaaggttataccaagaggtatacctaacaacaaccaatattacacaagctcctccagaaaatagccaacattaccctgataccaaaatcaaaaaaagtacaaagagagaaaagtgcagagtaacatctctcatgaatatgatgcaaaattcataagaaaatacaaacaagtagaacacagtaacatatacaaagaactatataccatgaccaagggatgcaaggatggctcaatatttgaaaatcaatcaatataattcaccatattaatgggctacagaagaaaaatcacataatcatatcatgaatacagaaaaagcatttgacaaaattcaatactcataattaaaaattcccataaaactaggaatagggggatctccataacttgatttaaaaaatctacacaaacatacagctaacatcatacctaatggtgaaagactgaatgctttacctctaagactaggaaaaagacaaagatgcgccctctctccactgctattcaacatagtatgagaagtcctagccagtgaaataagtcaagagaaagaaataaaatctgtattcgcaaatcagaaaggaagagataacactattcttcttagcagagaacatgatagttc

SEQ ID NO: 243223 - DNA, 508 bp, Homo sapiens
cagaaatagtccaggtcaagggcatggctaaaatgtgctatggcttgagtttgttcccaccaaaactcacgcttgaaatttgatccccaaggtggccgcgctgggaggtgggcctagtgggaagggtttgggtcatgcaggcatatccctcatgaatggcttggtaccattgtagtgaagtagttctctctctagactgacttagttctcacagaattgttcccaagggagtaggttgttacgaagccaggatgccccttggttttgcctcttcaaacacatccatgtcccctttgaccttccccgctatgacacagcatgaaaagccctcaacagaaatggagcagatgctggcaacatgcttcttgtacttcctagcctgaagaatcatgagctaaataaaataaaccttttttctttataaattacccagcctaaggtattgttatagcaacattaaaaggactaagatgagtatcaatacacaaaaattctcaaagtcaaatta

SEQ ID NO: 243224 - DNA, 712 bp, Homo sapiens
gtaattccagctacttggaaggctgaggcacagagaatcacttgaacccaggaggcagaggttgcagtgagccgagattaagctgctgcactctagcctgggccacagagtgagactcagtctcaaaagaaaaaaaaaagtgggattattaggtcaaacggtacgtgtgttttaaatttagatatactcaagatgccctttagataggatgtctatttcaaattcccatcaacagtgtattagtattcaattccatatattcttgctagtgatttgtcatctttagcttgttgggagtttaaagtagtttgaaacagttttctgtttctttttcagcatcaggacttacttccatagcttaactcttcggagggagctgataaaaatgaaagatcagtgacaagggagtggtgtagaccagtggtcttcaaactttttggttgcttaccccatcactaaaaaattttgagcattaagcaggtgcggtacatggttctgtggtcccatctacttagttggctgaggcaggagaatgtttgaggccaggagttcaaggctaaagttcactgtgattgtgcttatgaatatagccgctgtactctagcctggacaacatagcgagaccatctctttagaaaaaaaaaaaagatgagatgggaagaatgaagtcagaaaaaaaaaattgataggacttcgtgttgttgctttgaga

SEQ ID NO: 243225 - DNA, 406 bp, Homo sapiens
ttttaatctacagagtgaagcaaaaaataaaatagggtcaaattctgccatatgcttcggactctctatgcttcttgggccatgttttattcttctagctgcatctagagagaagtttctagataacatgatttcctttttgcaggatttaggtctctgcatattaaattgatcacagtgtgtgactaagaactaatctcctaatgttctagctagttattgggttagcagtatatacatattaggagatgaatgttgtttgtgagacttcacccttatatcaaaatgcattaacacgtgtatggagaaaaagagaaaagcagtagactaaaagaaaacttgtttataagcctgtatgattgtaatagtgaatcagaagcaagtgaataaaaactcacactaaatt

SEQ ID NO: 243226 - DNA, 446 bp, Homo sapiens
tctgcagcaccacgagatgcccacgtggcacctggacgtccatgcatatgttgaggcccgtgcacgcgcagagaccccagcgcagaagccgccccgcacgccagggcttatgtatgccagcgctgggagacctccagcgcccgaggacatacggcaagtggttccaccagggtgtcagcctagcaggccaacctgggaacccatgtggacaagcggcctttcagcccaggcgcccgcctcgggtggaggcgtggagacttctggcgcagccctgagctggtggcctaacctacctggaaaatcctagcccgagaagcagcgcgagtgagccttttgggtggttccaaggcccttcaccaagctctcacttcctgacttcaccgttgggtctgttgtactaggaaataataacgcctcccatttatcaagggtttactctgtaaaag

SEQ ID NO: 243227 - DNA, 4133 bp, Homo sapiens
  misc_feature (846)..(846): n is a, c, g, or t
  misc_feature (1225)..(1225): n is a, c, g, or t
  misc_feature (1270)..(1270): n is a, c, g, or t
  misc_feature (1491)..(1491): n is a, c, g, or t
  misc_feature (1504)..(1504): n is a, c, g, or t
  misc_feature (4077)..(4077): n is a, c, g, or t
  misc_feature (4131)..(4131): n is a, c, g, or t
gtaacccaggagatttgttcctgggtttcacattcacagcacttgtgggcctccaggccgacctgaggcattgaaaatctcagttgttggtttggtctgtgctgagctccttactcaccttttaaagttggctgtttgcagttgtactcccttcctcatttctgttttctttgtacctttttatttaaataaactttaagtatatactttgggtattaacaaatatgtatgccatgaatataatatacgatgattatcatggcaatgaagatacagaactttccgtgaccccaaaagttgccatatgtccctttggtatcaatcctcctacacgtctggctgcagcaaccactgatctgctttgtatctatagatgacttttgtctgttttgaattttgaagaaatggaactgtacgttatagactgtggtctgactcttttcacttagcataatgattctgaggttcatccatgtcgtttgtgtcagtagtttgttcctctttattactgagcggtggtctgtattgggataacacaatttgtttatccattcacctgctgatgaacatctgtgttgtctcccctgattaggtattgtgaataaagctgctgtgaatattcatgtatgagtctttgggtggacatgtggtttatttcccttggataaataccagtagtgagattgctgggtcatataagagcatttttgttgttgttgttgttggtggtggtggtggtgtttgcttgtttttacatgttaaaataagatacagccaaactattttccaaagtgatgatgcattccagtcagcagttgctccgcaccttcaccagcatttgatgtngtctctttttaattttagccattgtaacagtgtgcaaggacgttatattgtggttttagttggcatttccttgataaatgatgttgagcgttttatatataggcttattggtcatttgtacatcttcttttctgaaaccttgcactttttttttttgaaacaaggttgcctaagctgaatgcattatttcaactatttacaagttcacaaaataacacctttttaatgtatatttgctcacatattaatgtagtaaacatattatttaccatgtgctaatcactttacacatactggcttatatgtacatctccatattagacatatgagattagtactttcattacccccattttgcagatgggaaactgagacctanagacattaaataacctgccagtgttaatacggctagtgaaaaaanggagttagtattcaaacatgggcatcagactccactagaaacattaaataacctgccagtgttaatacggctagtgaaaaaacggagttagtattcaaacatgggcatcagactccactagaaacattaaataacttgccagtgttaatacggctagtaaaaaacagagttagtattcaaacatgggcatcagactccactacagacattaaataacctgncagtgttaatacngctagtgaaaaacagagttagtattcaaacatgggcatcagactccactacagacattaaataacctgccagtgttaatacgactagtgaaaaacagagttagtattcaaacatgggcatcagactccactagaaacattaaataacttgccagtgttaatacggctagtaaaaaacagagttagtattcaaacatgggcatcagactccactagaggcattaaataacttgccagtgttaatacggctagtgaaaaaacagagttagtattcaaacatgggcatcagactccactagagacattaaataacttgccagtgttaatacagctagtaaaaaacagagttagtattcaaacatgggcatcagactccactagaggcattaaataacttgccagtgttaatacggctagtgaaaaacagagttagtattcaaacttgggcatcagactccatatctttgttgttggccaggagcaggcaaactataagcctgggtgccagaatgagccatgccgttcttgtatgtatcatgtcttgtctattgttacagcagcagagctgagtagtttcggtagagatggtttggactgtgaaggctgccctttacagaaaacagttgcctgcccctgctcttgcgcattgtattttgtcttcactgttcctgccttcttgtctggttctaaggaatgaaaggaggacaccagctcagatttcctaaaaatgtctttatgtataatttttaaaaattctcaaaaaaaatcttcctataaaagtcaaaaggatgaaaatgaatgtagcaggaacaactgtgaggtgtcccagctacagtagtcattgagtttttttgcataaaaatacgattgtaaagatagattccataaaatgtgatgttctttgtcctggtactgaccccggtagagtgttgcctatgtttttggcttaacatttatagggcattatttgaaaaactgaattctgatccaagcagagatgaggggaacaaggctgagaccttaattactggctctctcttgtcagagaaaggtgctttttgtcatattcccatgggatttgattgaccttcggacggcctgtgtctgttaggaggcatttctatttctcaggtttgagggctagtcagtaaaatttggatgaatttggactggatagagggactcaacctgaattgtgaaaatcctgagttacagaatttttaaaagttctatgttttagttatatataataatttagctattttaaagcacaaaacaaatacgtgcacttggagaatggagtccacagcattcagcaacagtggcctgaagcagagccccagataaaacactgggttgaatgtcagtgtgctgacatcagtgttttttattatatgactgtgttctttctataaaaatcaggcattgtgagaagcccagatgtgaagcttggaacaataaaaccaaaggaagaatacatcagaggtttgtaaaacttagataatatggaagtaattaaccattagactcacgatatgttctctaacagtaaccttgaaactccatgttttgtgtctaatgacttctaggacacataaagacaaaaggaaagaataatatgctttcagagcatgaagaacttgctttagagtccctgtgtcttttgactcgaatacacaggattattatatcatgcagttatgaatctgaggaaagtatgacatgatcgataggtctaattctaaaatatctgataaagaagttaataccaaaattagtgagtttcctaactttaaagtgaaataactagataaagaagaactaaatgcaaagctagcagaaggaaggaaataataaagattagaacagtgttaactgaaatagagaataggaaagcaataggagagattagtggccgggcgcagtggttcacgcctgtaatcccagcacttaaggaggccggtggaccacgaggccaggagttcgagaccagcctggccaacatggtgaaaccctgtctctactaaaaatacaaaaattagcagggtgtgatagtgggcaccagtaattccagctactcaggaggctgaggcaggagaatcgcttgaacctgggaggcagaggttgcagtgagccgagatcgtgccactgcactcccacctgggcgacaagagcaacactctgtctttaaaaaaaaaaaaaaaaaaaaaaaaaaagattagtgaaaccaaaagctgcgttcttgaaaagattaacaaaattgtcaaacttgtagatagatggactaagaaaaaagaagattccaattgctaaaataaaaaatgacaatggggacattactgggccgggcgtggtggctcatgcctgtaatcccagcactttgggaggccgaggtgggtgggtcacttgaggtcaggagtttcagatcagtctggccaacatggtgaaaccccgtctttaccaaaaatacaaaaattagctgggcacggtggcgggcacctgtaatcccagctgctcaggaggccgaggcaggagaatcacttgaacccgggaggcggaggctgtagtgagccnaggttgtgcctctgcactccagcctgggaaacagagcaagactctgtccccccncc

SEQ ID NO: 243228 - DNA, 1550 bp, Homo sapiens
  misc_feature (1494)..(1494): n is a, c, g, or t
  misc_feature (1548)..(1548): n is a, c, g, or t
gggattacttaaaagacaaatacagggccaattaaaaaaaaaaaaaaaaaaaaaaaaaaaaaaaaaacatgtcggccggggaatttggactggatagagggactcaacctgaattgtgaaaatcctgagttacagaatttttaaaagttctatgttttagttatatataataatttagctattttaaagcacaaaacaaatacgtgcacttggagaatggagtccacagcattcagcaacagtggcctgaagcagagccccagataaaacactgggttgaatgtcagtgtgctgacatcagtgttttttattatatgactgtgttctttctataaaaatcaggcattgtgagaagcccagatgtgaagcttggaacaataaaaccaaaggaagaatacatcagaggtttgtaaaacttagataatatggaagtaattaaccattagactcacgatatgttctctaacagtaaccttgaaactccatgttttgtgtctaatgacttctaggacacataaagacaaaaggaaagaataatatgctttcagagcatgaagaacttgctttagagtccctgtgtcttttgactcgaatacacaggattattatatcatgcagttatgaatctgaggaaagtatgacatgatcgataggtctaattctaaaatatctgataaagaagttaataccaaaattagtgagtttcctaactttaaagtgaaataactagataaagaagaactaaatgcaaagctagcagaaggaaggaaataataaagattagaacagtgttaactgaaatagagaataggaaagcaataggagagattagtggccgggcgcagtggttcacgcctgtaatcccagcacttaaggaggccggtggaccacgaggccaggagttcgagaccagcctggccaacatggtgaaaccctgtctctactaaaaatacaaaaattagcagggtgtgatagtgggcaccagtaattccagctactcaggaggctgaggcaggagaatcgcttgaacctgggaggcagaggttgcagtgagccgagatcgtgccactgcactcccacctgggcgacaagagcaacactctgtctttaaaaaaaaaaaaaaaaaaaaaaaaaaagattagtgaaaccaaaagctgcgttcttgaaaagattaacaaaattgtcaaacttgtagatagatggactaagaaaaaagaagattccaattgctaaaataaaaaatgacaatggggacattactgggccgggcgtggtggctcatgcctgtaatcccagcactttgggaggccgaggtgggtgggtcacttgaggtcaggagtttcagatcagtctggccaacatggtgaaaccccgtctttaccaaaaatacaaaaattagctgggcacggtggcgggcacctgtaatcccagctgctcaggaggccgaggcaggagaatcacttgaacccgggaggcggaggctgtagtgagccnaggttgtgcctctgcactccagcctgggaaacagagcaagactctgtccccccncc

SEQ ID NO: 243229 - DNA, 655 bp, Homo sapiens
gtcaaaatcaattgaccatatatctgtggatctggataatctatttatgtcattgatctatgtatctattcttacacaagtccccactgtcttgattattgtggctttatagtatattgaaattcagtattgttaagttctacaatcttttccaagattgttttgactatcaggtcctttctttataaagtttatattaagcttgtcaatttttctttaaaaaaaaagtctactgggattgtgattgggattgcattgaatttataggtcaatttgggaagaattgacaaaaaatattgaaccttccaatccatggacatggtatatttttccacttatttgggtcttttaaaatatatctcagcaatgttttgttgttttggtgacaaagtcttgtacatcttttgttaaatgtattcctaaatattctgtggttatgctattgtaaatagtatttttatttcatttttaagtttattgctggtatatagaaatgcattttatttttgtatattgatttgtatcctgtaatcttgttaaattgagtttgattagttgtttttttattttgttgtaaatgccttgttacaggattccctatgcacataaccatgtcatgtgtgaataaagacagttctacttctttctctcaatc

SEQ ID NO: 243230 - DNA, 1301 bp, Homo sapiens
aatggagcaggtaaaagacatgcacaggaaatatactctaaaaatagatttagggaatgggatatgatatatgggagcagaggaaggagaagggagtgagagagaatctggagctgtattgagaaaggttttgtgtggtctaattaatttggacaaatgagccaagattacttgaagattaagtagaatgtatattcggagtaccttagggatattgtgggttcagttccataccacagcagtgaagtaaatattgcaatatagtgagtcacaccatttttttgatttctcagtgcattaaagttatgtttatactgtaccatagtctattaacctataacccccttatgtctaaaaaacaatgtacacacattaatttaaaaatactttattgctgaaaaatactagtaaccatctgagctttcaatgagttgtaatctttttgctgtagagtgtcttacctgagtgttgatggctgctgactgatcagggtggtgattgctgaaagctggagtagctgtggtaatttcttaaaataagacagcagtaaacttttttgccttgattgtctcttccattcacgaaagatttctctgtagcatgtaatgctgtttgatagtatttacctacagtaatatgtctttcaaaattggagtctgtcgtctcaaactttgctgcaattttataaactaaatttatggaatattctaaatctcttattttctttccaccagtgttcacagcatcttaaccagtagtagattgcatttcaagaaaccactgttttcacttgtctataagaagcagctactcatatgttaaagtttgatcatgaggttacagcaattcagtgtcatcttcacactttacttctaagtctcttgttacttttaccacatctgcagttacttcctcccctgatgtcttggactcctgaaaatcgtccataagggttagaatcagcttcttcccaactcctattgatgttggtatttttacccctcccatgagtcacaaatgttcttaatggcatctagaacagtgaatcctttccagaaggttttcaacttactttgcccagattcaacagaagtatctctctacatggcaactataaggcagctctctacatggcagcttttaagtagtatctcttttaagtagtatctctacatggcagcttttaagtagtatctctctacatggcagcttttacgacttgaaagttagcctggcatggtagcttatgcctgtaatcccagctactcatgaggcctgagaccaggagttcaagatcagcg

SEQ ID NO: 243231 - DNA, 533 bp, Homo sapiens
catatctcaggctatcacatggggagaaaccttggacaatacctggctttcctaggcagaggtccctgcagccttccgcagtgtattgtgtccctgggtacttgaaattagagaatggtaatgacttttaacaagcatactgccttcaagcacttttttaacaaagcacagcctgcatagccctaaatccattaaaccttgagtcaacacagcacgtctctgcgacacagggttggggtagggttacagattaacagcatctcaaggcagaagaatttttcttagtacagaacaaaatagagtctcttatgtctacttctttctacatagacacagtaacagcctgatctctttcgtttccccacaaatccatatagtatttgagtgtgataatgtaaaaatcagtattcatttctaaatctaagtactgctttgagaattttgttggtaattccagttgctgctgcttcagcagaaggaagcttctccaaattaaaataaattaaaaacttgctaaaaactatgttgactca

SEQ ID NO: 243232 - DNA, 448 bp, Homo sapiens
gcggcgacgaggacggcctggagctcgacggggcccccggcaggggcaagcgcgcggcgcagcctgtggcagcaggcaaggtgggcggtgcggctgtggtggtcgccgaacccgagcacaccaagaacacgtctctgcgacacagggttggggtagggttacagattaacagcatctcaaggcagaagaatttttcttagtacagaacaaaatagagtctcttatgtctacttctttctacatagacacagtaacagcctgatctctttcgtttccccacaaatccatatagtatttgagtgtgataatgtaaaaatcagtattcatttctaaatctaagtactgctttgagaattttgttggtaattccagttgctgctgcttcagcagaaggaagcttctccaaattaaaataaattaaaaacttgctaaaaactatgttgactca

SEQ ID NO: 243233 - DNA, 443 bp, Homo sapiens
cactgagaagttaggaaaattgcccaaggcaaatcagaaagatgggattcaaacccaagttatcttattgcagaatctaaactctggaccactaggccacatggcctctctgacaatactagctagatgctagcccaacttcagtatcccttaatttttatatttcctctacccctcatctgaagttagcattgttttttccaccagtgatgtttttaaataggcagatgaatggatgctccaagataatcactccaccagctctatacatagtaggtccaagggggtacaatgaccaccgtgacccagcctttgaaaaattgagatctgctaatggcaggcacaatctgtgtgtagtgcattttcctggggagagagggtctgctgctttcctcagagtatcaaagggatcccccaaatggaaaaagacattagttattaaa

SEQ ID NO: 243234 - DNA, 502 bp, Homo sapiens
atccctaacccctggcaagtactaatctgttttccacttctactacttgaattttgaaaggcatacaataaaatattgaatggtacaacacaacataaatgaaagcaagtgacaagtgagaaagtggaggtggtgatcagattgctcagtggtgaaaagaattatgttataaatggggccaactatgaataaaggtgccccaacccgcatgtgcagattccttcttcgcagactcactcacatagcgcgtcatgtcagtgcaggtggcagcgccaaccgtgctcctcagtctgtcctcaccaggcccacgtgagaacacaggaacagattagcaacaagagcccccagccttggcctgggcgcagaggcgcctctggccctcatgttctcttgtcacactggtgggagctgccttgcctggggtctgtctctcccaccgaccctgcttggctctgggttgaaggcatgacgagtgaggcgggagtgcagatgaaatgaccct

SEQ ID NO: 243235 - DNA, 346 bp, Homo sapiens
cagtgataggtatttattctcttgaaattgtgggtttgctgggtagtggatgatctaaacttggcttactcaaagtcaaaagcccaaagtcaagcagggcagggagtaacttgcacaatactatagtgacagtaatctactgcagtgatctagtacagttgatttagagaagaatggtaagatgcttattatgacaactattgtgctttcttctttctgctctctattgttgacactctcctgatagcactttttcattttggttgctgaataatacctgttgattggatactcctagaatcataatgtaatacagcagatttcttctcttcatgttatgtagaaa

SEQ ID NO: 243236 - DNA, 517 bp, Homo sapiens
gagaatttgcttcaatttttaaagtatatgagttggtttctatttgagtaagtgttaattccacttggtttctcagaaataatagtcctattctgtacctaggagcatataaacttcagtataaaactgccttatcacctattttgttacattttctcattatttcttctaccctggttcttcttacttcttttaaagaatacataaaatacagatgaactattttaaagtaactgtttccagaacttgagagagtaaattctcaaaatgagttatttaatggagtgaaaattttatggagtaaatttttacttaaccacattttaaataataatgttacttttgcatattgttctggaagattttttttcccaaacaaaataactttataatcctttatagttttatttattaataaacgtatggataagtaaatacaattttagataaatataaatatgtacattttttaaatttaagaatttttaagtaataataaaccattttgcttagacaa

SEQ ID NO: 243237 - DNA, 604 bp, Homo sapiens
tttttttttttttttttcatttttttaaaaaaatcaattttactgaggaaaaattactgtcaaatgcacacattttaagttacagaagatgacttttgacattcacatacactgtgtaaccaccacaccaatcagtcaagatattataggacatttccattaccccaaacagtcccatcatgctcctttgagtcagcctttctctcagcttccactccaggcactcactgatctcatttctgtcacaattgataaatgttacctgctctagaactttacattaagaaaacattaaagtctgtactttttgtatctggctattttaattcaacatattttagatacatctattaccaatagtttgttcttatgcatatctcaaaaatttattcctttctaattgctggctagtatttcagtctttttggaatgtttttctatttttttatctttattagtcagtttttatgttttattttcttttattatactttaaggtttagggtacatgtgcacaacgtgcaggtttgttacatatgtatacatgtgccatattggtgtgctgcacccattaacttgtcatttaacattaggtatgtcgagc

SEQ ID NO: 243238 - DNA, 456 bp, Homo sapiens
caatattggtcctgcacagtgcagtcccatcatgctcctttgagtcagcctttctctcagcttccactccaggcactcactgatctcatttctgtcacaattgataaatgttacctgctctagaactttacattaagaaaacattaaagtctgtactttttgtatctggctattttaattcaacatattttagatacatctattaccaatagtttgttcttatgcatatctcaaaaatttattcctttctaattgctggctagtatttcagtctttttggaatgtttttctatttttttatctttattagtcagtttttatgttttattttcttttattatactttaaggtttagggtacatgtgcacaacgtgcaggtttgttacatatgtatacatgtgccatattggtgtgctgcacccattaacttgtcatttaacattaggtatgtcgagc

SEQ ID NO: 243239 - DNA, 437 bp, Homo sapiens
ccttttatgtgtgaagctccccaaacagtggggtgtcctgcattcaaatatattttagtacctattcaccaaggaaatgtgctaatgaaaattttctttcttaaatttgcatttccttattatgctaaaatagctactgatttttcttcaattttgattatgtatggggttctaccgaacaccgtttttaaccccctacatataattgcacaaaaatgtacacctgtggataaaatggttttaatttctctcattgacttggtgatttcagtgggagttgaacacaggctagacggccccagtaatggggtgggggtgtattaggtgtttttttcatggcaatgagtatttcatgaaacccttccaggctaccaaatttagggggactggatattcccaataaatgtgtattataataggaagctatttacaattga

SEQ ID NO: 243240 - DNA, 337 bp, Homo sapiens
tctagagttctcaaccggtccttccctatcccttggatccctggatggtgtcttgttttaacctttgttggcaacaaagagcccaaccctttggatttgactagaaatagctcacaacttaatcctccagcgatataattgtcttcgttactcccagtgatggagtctggtgaatttccagggccttccattatggcaccatcagtacccacccctgtttatgccacatttacaccttgtctgttcattcctctagctcttgctaaccattaatctgctttctgtctctgtggatttgcctgttctagatatttcatataaatggaatcatgcggta

SEQ ID NO: 243241 - DNA, 685 bp, Homo sapiens
actgtttagaaaagaaaatttctggggaactataagccaaacaattcccaaaacttatacaaagttgggaatattttaaattccaataatccagtgtagagaggcctcattaaacacattggagaattcaagaaagagattagaaggattatgctttagcagtggggctaaactagccctgtagtagtggttactctcaactctcctaaaataaaaggtctaaaatcagcctcaaaatgattcagctatcagtgttcagcagatatattacttgccagtatcaagtccaacactctggattacaataaaatccagcattcaacgacacaagattcacaatgttgacaatccaaataaaaagttgacaagcaaagaatttttcttctgattatggatgaaagactataaccgggaaaaaatcaatctgtagaaatagatgcccccctcccacacacacaccagaaataatgtactttgcagacaggactttagaatagttattataaaaactatatatgtccaaggaattcataggaaacatgagcataatgagagaaatggaagacaaacaagttgaacatttatttttcaattatgaaaaatatctgaaataaaaatttcattgatggaattaactgaattagacactacagaagaaattgtgatattgaggttaaagatctgg

SEQ ID NO: 243242 - DNA, 400 bp, Homo sapiens
tcttgaattctgtccctccaaggagagggcaatgcctgagcccacggaagttgggtcaggggcagcattggaagtcagagcctgcaatgctcacgtaaatgcaaaagatggttccttcagtgccagtaagaaggctgtcttgaacatgaggaatacagcagcaagcaagacagagaggtgcctgctttctggggagacaacaaacagataaataagcacaacactgtcctgccaagctaagtgacatcaatgaaacaaggcaaggtaataagaagaggctgggaaaaggcttagctgtgattttgctttctgcagtttgagttgcctatgttcaacagaggttcaaaaatattaaatggaacatttcagaaataaacaatcctaagtttaaattgcatgc

SEQ ID NO: 243243 - DNA, 796 bp, Homo sapiens
aagatttcacatcctagcatgtactgttgtaaaggtggaagcattcacacaaacgttccatgtcagaagtgagacacctagaagcaggaggttggaacaacacacagtgactccattgcagtggaatggcgggtaaacccctccatatcctcctttcttgggccaggtagcaatgtgaggagtctgcctgtgttggagcttggaacgggggaaaagggcagtatcttctccaggctgatgagggccaggagtgattgagataatcaatatggaaaaccagttgctgggataatccatgttgaatcttttccatcctactgacggcccaagtaggttattcatacagtctgtactttaagtaaaggtggttgaaccactaagcatttttggaaagacaatacataagaaagaaagctcaaagggaagaacttcccctaggaaatagttaatacaaaaaaaaaattatagtaatgtgaaataactgctgaaaatgcctgaatatctagagtttcctctccctactcccatacccagttagtgtccatcagaaaacagggtgtccttacagccgtgtgctgagagtatcttcacttcttatcagcaaagtaatgtttgggaattctaggcaggtaagcagggaaacaacataagtaacagagtcaaaaccataatggctgtgaaatgagaggagagtggaacaagtgagatattttgtgagattttggaaaactgaaattgtgctgatgtggtttaaacttgatgtagtaagtggtgctctaccattgcacataatgca

SEQ ID NO: 243244 - DNA, 1093 bp, Homo sapiens
attccatgttgtgagctaaaggggattgtactgatcttgaagataacaaatctgcctgcttcaaaggtttcaccgattttattgctgtgtttcaaacacatttccacatatggtatgatatttaatttgcaaaataaatccgtaaagcaggaattactaacctaattttgcagatgagaaaactgaggcttaaagttgttcaaggtcaaagtcacgatgtccatcatgctgtagctcaatgaatgagtctcacattgtttcatgttgttttatttctactttctcaatccatgtacaagatagatttacaaactactgttttatgttggttgtatgaatttcaatacatttactgttagaaataacaaaaggtcttagactgccagatgctgttcccatcaactctacttaattcataatatagctgaactctgtcataaatctaataacgatgtggacattagccagaagtatgatgtggctgaacctcaccactgaacacaaaatgagaattcacctcatcttttcatttgaatttatttctactaaaatatatgtattatttttcttgatttctaaccaggccccttctgaagaaaactggttaactctaaattgttactaaattttgaatcttcctgtatttagcaataaaagttactgctaattgtaataacaattatgaggaaaaatttatttaaatgcttcatagaaagttaattttcatttaatagaaaagaaataaaaaatctgcttcagactgtttgatttctctattaggcaattgaccctaactagtatatggtgattttgagtattaaaaaagaagttataattttccagaatattaatgtttattattttgaaagcaagtaaaattctccagtaggaagattaataaaacaattcattaaaattctcatcagaaaatcctatgctttcaaatgtatctgctcaaagatgtcactctatgtgcggcaaagctttgttttacttgatcaagaaatgaatgtgactttatgatcttgtattcaactgtgaacagctgctcattaataaaaagccattaaagtccaagtcagaacagcaggtc

SEQ ID NO: 243245 - DNA, 1275 bp, Homo sapiens
ccgcaccggcatctggacttctgaaaaaaacaacaatgacaacaacaataaaaaacaaaaaacacaacgccttttataaagactgacaaaatataaatctttattctaaccctatccccaaaactagccaggccacaccccagatgttcttattgactattgggaagatagaaaaggcgttgtgttttttgtttttttgttgttgttgtcattgttgtttttttcagaagaccagtgtctcagttctgtcttagtagtaccacacccgtaaccgtgttttaaaagtttgttttagcctagagacagatcatacgagttcaacaatgtacagtgtgattgaaaagacaggttggtgtctatttttctttttaaaatatctgaatgtgtatttgtaatacgtaaaggtaaaaaaaaatagtgccaaaaatgtgcaaggcatctcattacagctcatgtacgtctgtttttataagatcaatattaaaacccattgggattaaatatttttgaataggatacactcttgagaaactcgagaatggactgagccttcctacaagccactctttgtttttaaaacagtggggaaatacgtttacagagattgtgagcttcagagaatgcatgtgatggtgtgtattacatgctaattcatataagctgtatctgtcagctaccaccctgtgctttaaaaatgcacacactcaaccctctttagcttggagctcagctttttgcttttttttttttttttttgtagaattatttagctaacataagtattctgattgctacctgatggccattcttacttagtttcatagatgtgctttaactatgatcctttgaagctcaccccttggagagcctacagaacctcaggctgatagctttgaagactgccaaacagcccagaaggaagcaaagcatctgcataatcaggagggttgtataacaagtagtgatttggcaaatatgtgggtagctttaggctgaggcacgggcctcaggcaaaaatgcccttcgagtgaatccgaagggcatgatcttcctatgtccttgactaggcatgacgagtcatttgaggtcagatattatttgagttgttcagcacccccaaaggtaggcattctcctgggaaattttcatttccattttatcgccaaacaaaataaaaagcaaaacaaactttctaagctagaataatgaaattaagtcattttccactttgtatatattgatgctaataaaacagatgaaaaagaaaaaaaaatg

SEQ ID NO: 243246 - DNA, 6218 bp, Homo sapiens
aaaggaagggagggagggagaaaggagaagttggtttagaggccagccggacgagctttgggcaccgcccttaggagggccaccctcagagtctgacagcaggtgaaggtcctaaatctccccaaactaactggtgtcttttctcctcttccaagatgctcttcccgagggagatgctagccctttgggtccttacctcctgccctcaggagccccggagagaggcagtcctggcaaagagcaccctgaagagagagtggtaacagcgccccccagttcctcacagtcggcggaagtgctgggcgagctggtgctggatgggaccgcaccctctgcacatcacgacatcccagccctgtcaccgctgcttccagaggaggcccgccccaagcacgccttgccccccaagaagaaactgccttcgctcaagcaggtgaactctgccaggaagcagctgaggcccaaggccacctccgcagccactgtccaaagggcagggtcccagccagcgtcccagggcctagatctcctctcctcctccacggagaagcctggcccaccgggggacccggaccccatcgtggcctccgaggaggcatcagaagtgcccctttggctggaccgaaaggagagtgcggtccctacaacacccgcacccctgcaaatctcccccttcacttcgcagccctatgtggcccacacactcccccagaggccagaacccggggagcctgggcctgacatggcccaggaggccccccaggaggacaccagccccatggccctgatggacaaaggtgagaatgagctgactgggtcagcctcagaggagagccaggagaccactacctccaccattatcaccaccacggtcatcaccaccgagcaggcaccagctctctgcagtgtgagcttctccaatcctgaggggtacattgactccagcgactacccactgctgcccctcaacaactttctggagtgcacatacaacgtgacagtctacactggctatggggtggagctccaggtgaagagtgtgaacctgtccgatggggaactgctctccatccgcggggtggacggccctaccctgaccgtcctggccaaccagacactcctggtggaggggcaggtaatccgaagccccaccaacaccatctccgtctacttccggaccttccaggacgacggccttgggaccttccagcttcactaccaggccttcatgctgagctgcaactttccccgccggcctgactctggggatgtcacggtgatggacctgcactcaggtggggtggcccactttcactgccacctgggctatgagctccagggcgctaagatgctgacatgcatcaatgcctccaagccgcactggagcagccaggagcccatctgctcagctccttgtggaggggcagtgcacaatgccaccatcggccgcgtcctctccccaagttaccctgaaaacacaaatgggagccaattctgcatctggacgattgaagctccagagggccagaagctgcacctgcactttgagaggctgttgctgcatgacaaggacaggatgacggttcacagcgggcagaccaacaagtcagctcttctctacgactcccttcaaaccgagagtgtcccttttgagggcctgctgagcgaaggcaacaccatccgcatcgagttcacgtccgaccaggcccgggcggcctccaccttcaacatccgatttgaagcgtttgagaaaggccactgctatgagccctacatccagaatgggaacttcactacatccgacccgacctataacattgggactatagtggagttcacctgcgaccccggccactccctggagcagggcccggccatcatcgaatgcatcaatgtgcgggacccatactggaatgacacagagcccctgtgcagagccatgtgtggtggggagctctctgctgtggctggggtggtattgtccccaaactggcccgagccctacgtggaaggtgaagattgtatctggaagatccacgtgggagaagagaaacggatcttcttagatatccagttcctgaatctgagcaacagtgacatcttgaccatctacgatggcgacgaggtcatgccccacatcttggggcagtaccttgggaacagtggcccccagaaactgtactcctccacgccagacttaaccatccagttccattcggaccctgctggcctcatctttggaaagggccagggatttatcatgaactacatagaggtatcaaggaatgactcctgctcggatttacccgagatccagaatggctggaaaaccacttctcacacggagttggtgcggggagccagaatcacctaccagtgtgaccccggctatgacatcgtggggagtgacaccctcacctgccagtgggacctcagctggagcagcgaccccccattttgtgagaaaattatgtactgcaccgaccccggagaggtggatcactcgacccgcttaatttcggatcctgtgctgctggtggggaccaccatccaatacacctgcaaccccggttttgtgcttgaagggagttctcttctgacctgctacagccgtgaaacagggactcccatctggacgtctcgcctgccccactgcgttttagcagaagcggcagcagagacgtcgctggaaggggggaacatggccctggctatcttcatcccggtcctcatcatctccttactgctgggaggagcctacatttacatcacaagatgtcgctactattccaacctccgcctgcctctgatgtactcccacccctacagccagatcaccgtggaaaccgagtttgacaaccccatttacgagacaggggaaaccagagagtatgaggtttctatctaaagagagctacacttgagaaggggacttgtgaactcaaccacaatctcctcgagacattcatccagagaccatgtggcacttgattgaaaccccagaatgtcgactgtcttttgtttagactctttatcaaaggtttactgttttcttccctgtatttattatatttaaaagtgaaataggtgtgggtttggatgtttcgcggcctcagccaaattcatgttacagcctcaattctgaaggcaggtggaagacttgcaaaatggcaaaccgcggcagcaaaaacacaaaacagcagatggagtttctcccatcagcaatgccatgctaaggctgcattgaattgcatgcatctttgggaaccatgcccatgatgttttcagtacaaatctaagtcccaagattaggttggaaagggtatttcttgttggcttagtttgggttggaatttagcatgggtacttaaacccatttggagagctgtgctcctaaacaaattctgtgtcctctcttcccattttgccagcttctgaaaggtttttccacagcccctccctctcacggttcttctgaaggtagcaaaggtgttatataaacattgtcttttaccactctggcctcgctggacagtgacaaaacaagaaaacgttttctttctagaaaggtgataaacgaccaaaggcaatttttcagagacaaatgagagatttgagagttccaatgaagaattgggtgagggggatcattgggtaagggaattgggttaaaatgttcttttctttgacactctttcaatgatgaaagagcgtgtaatttatgctacaagtgccagaattgatcaccatgttcagcaagccactctcaagctgtggtaataaacacacaggcttgggaggcaccagcggccccactcatacagtgacaaggatttgtgatgggaaaaaggaggtgccatgtttggaaatgcaggggtgagctctggtttctcctggggttctggaatatctcagccctcaaaatagaggagactcaagtgcactgattctctaaaaggtgtcatcttcagaatatacttgccatcaagtatttcagggggcgggagggtcccatgagaagaaactatttttctattctccaaagctgtctggatgttggagggtggtgtgaatgctgactgaggaggtgcagagaacaggggcaggggattttaaatcacagcagaccatccagtggaatcctgtatcatctgatctgaacatcaatgaagacagagagaggaatttcattcagaaaggattccatagccccacatctagtcacacgggcattcctcttattttatcagggtctgttttcccccaacccagtgaaaccggtgagtgtgtaactcttgggaagattcttttctaaatacaggtataaagagaaggtggagggtgcgggtgcatggaagaaatactatgtgtgaagcagattcaccttcctgggaccggtgacatggtggtgacagtcaatggcttggacagacagacgggctcagtggcatttggaaccctctttggtgccctcccattctctctggaattgtttcaagtctgctggttttcaaacaagaaaagacctttctggccatagggagaatagcagggagtctatgttttggtggttacattggaaacatcttaagcaagagagggaaagttgattttaggcacacatgtaccctccttgacagcaggaactcagacttcaatcttgggggtctaagaccagaatattttccttctgccagaaaagaatcttgcacatatactcctgaggcatgagtgtgtggtccatggcaagaaatagctaaaggctgctttccaggacccaaagccccatttaatgcaagaaccagagaagtgttctaggccattagtggacaatgtcatgtttggagaaagataacaacacaaataatgtaacctttccttaaaaggcagaactcaatccattttatttgatgcttattctaaccctaaccctgggtcacctggaatgaagaactctatgaataatatttgattttacaacgtgttatggttatgtgaaaactaaacatttgccttttataaagactgacaaaatataaatctttattctaaccctatccccaaaactagccaggccacaccccagatgttcttattgactattgggaagatagaaaaggcgttgtgttttttgtttttttgttgttgttgtcattgttgtttttttcagaagaccagtgtctcagttctgtcttagtagtaccacacccgtaaccgtgttttaaaagtttgttttagcctagagacagatcatacgagttcaacaatgtacagtgtgattgaaaagacaggttggtgtctatttttctttttaaaatatctgaatgtgtatttgtaatacgtaaaggtaaaaaaaaatagtgccaaaaatgtgcaaggcatctcattacagctcatgtacgtctgtttttataagatcaatattaaaacccattgggattaaatatttttgaataggatacactcttgagaaactcgagaatggactgagccttcctacaagccactctttgtttttaaaacagtggggaaatacgtttacagagattgtgagcttcagagaatgcatgtgatggtgtgtattacatgctaattcatataagctgtatctgtcagctaccaccctgtgctttaaaaatgcacacactcaaccctctttagcttggagctcagctttttgcttttttttttttttttttgtagaattatttagctaacataagtattctgattgctacctgatggccattcttacttagtttcatagatgtgctttaactatgatcctttgaagctcaccccttggagagcctacagaacctcaggctgatagctttgaagactgccaaacagcccagaaggaagcaaagcatctgcataatcaggagggttgtataacaagtagtgatttggcaaatatgtgggtagctttaggctgaggcacgggcctcaggcaaaaatgcccttcgagtgaatccgaagggcatgatcttcctatgtccttgactaggcatgacgagtcatttgaggtcagatattatttgagttgttcagcacccccaaaggtaggcattctcctgggaaattttcatttccattttatcgccaaacaaaataaaaagcaaaacaaactttctaagctagaataatgaaattaagtcattttccactttgtatatattgatgctaataaaacagatgaaaaagaaaaaaaaatg

SEQ ID NO: 243247 - DNA, 6446 bp, Homo sapiens
aaaggaagggagggagggagaaaggagaagttggtttagaggccagccggacgagctttgggcaccgcccttaggagggccaccctcagagtctgacagcaggtgaaggtcctaaatctccccaaactaactggtgtcttttctcctcttccaagatgctcttcccgagggagatgctagccctttgggtccttacctcctgccctcaggagccccggagagaggcagtcctggcaaagagcaccctgaagagagagtggtaacagcgccccccagttcctcacagtcggcggaagtgctgggcgagctggtgctggatgggaccgcaccctctgcacatcacgacatcccagccctgtcaccgctgcttccagaggaggcccgccccaagcacgccttgccccccaagaagaaactgccttcgctcaagcaggtgaactctgccaggaagcagctgaggcccaaggccacctccgcagccactgtccaaagggcagggtcccagccagcgtcccagggcctagatctcctctcctcctccacggagaagcctggcccaccgggggacccggaccccatcgtggcctccgaggaggcatcagaagtgcccctttggctggaccgaaaggagagtgcggtccctacaacacccgcacccctgcaaatctcccccttcacttcgcagccctatgtggcccacacactcccccagaggccagaacccggggagcctgggcctgacatggcccaggaggccccccaggaggacaccagccccatggccctgatggacaaaggtgagaatgagctgactgggtcagcctcagaggagagccaggagaccactacctccaccattatcaccaccacggtcatcaccaccgagcaggcaccagctctctgcagtgtgagcttctccaatcctgaggggtacattgactccagcgactacccactgctgcccctcaacaactttctggagtgcacatacaacgtgacagtctacactggctatggggtggagctccaggtgaagagtgtgaacctgtccgatggggaactgctctccatccgcggggtggacggccctaccctgaccgtcctggccaaccagacactcctggtggaggggcaggtaatccgaagccccaccaacaccatctccgtctacttccggaccttccaggacgacggccttgggaccttccagcttcactaccaggccttcatgctgagctgcaactttccccgccggcctgactctggggatgtcacggtgatggacctgcactcaggtggggtggcccactttcactgccacctgggctatgagctccagggcgctaagatgctgacatgcatcaatgcctccaagccgcactggagcagccaggagcccatctgctcagctccttgtggaggggcagtgcacaatgccaccatcggccgcgtcctctccccaagttaccctgaaaacacaaatgggagccaattctgcatctggacgattgaagctccagagggccagaagctgcacctgcactttgagaggctgttgctgcatgacaaggacaggatgacggttcacagcgggcagaccaacaagtcagctcttctctacgactcccttcaaaccgagagtgtcccttttgagggcctgctgagcgaaggcaacaccatccgcatcgagttcacgtccgaccaggcccgggcggcctccaccttcaacatccgatttgaagcgtttgagaaaggccactgctatgagccctacatccagaatgggaacttcactacatccgacccgacctataacattgggactatagtggagttcacctgcgaccccggccactccctggagcagggcccggccatcatcgaatgcatcaatgtgcgggacccatactggaatgacacagagcccctgtgcagagccatgtgtggtggggagctctctgctgtggctggggtggtattgtccccaaactggcccgagccctacgtggaaggtgaagattgtatctggaagatccacgtgggagaagagaaacggatcttcttagatatccagttcctgaatctgagcaacagtgacatcttgaccatctacgatggcgacgaggtcatgccccacatcttggggcagtaccttgggaacagtggcccccagaaactgtactcctccacgccagacttaaccatccagttccattcggaccctgctggcctcatctttggaaagggccagggatttatcatgaactacatagaggtatcaaggaatgactcctgctcggatttacccgagatccagaatggctggaaaaccacttctcacacggagttggtgcggggagccagaatcacctaccagtgtgaccccggctatgacatcgtggggagtgacaccctcacctgccagtgggacctcagctggagcagcgaccccccattttgtgagaaaattatgtactgcaccgaccccggagaggtggatcactcgacccgcttaatttcggatcctgtgctgctggtggggaccaccatccaatacacctgcaaccccggttttgtgcttgaagggagttctcttctgacctgctacagccgtgaaacagggactcccatctggacgtctcgcctgccccactgcgtttcggaggagtccctggcatgtgacaacccagggctgcctgaaaatggataccaaatcctgtacaagcgactctacctgccaggagagtccctcaccttcatgtgctacgaaggctttgagctcatgggtgaagtgaccatccgctgcatcctgggacagccatcccactggaacgggcccctgcccgtgtgtaaagttaatcaagacagttttgaacatgctttagaagtagcagaagcggcagcagagacgtcgctggaaggggggaacatggccctggctatcttcatcccggtcctcatcatctccttactgctgggaggagcctacatttacatcacaagatgtcgctactattccaacctccgcctgcctctgatgtactcccacccctacagccagatcaccgtggaaaccgagtttgacaaccccatttacgagacaggggaaaccagagagtatgaggtttctatctaaagagagctacacttgagaaggggacttgtgaactcaaccacaatctcctcgagacattcatccagagaccatgtggcacttgattgaaaccccagaatgtcgactgtcttttgtttagactctttatcaaaggtttactgttttcttccctgtatttattatatttaaaagtgaaataggtgtgggtttggatgtttcgcggcctcagccaaattcatgttacagcctcaattctgaaggcaggtggaagacttgcaaaatggcaaaccgcggcagcaaaaacacaaaacagcagatggagtttctcccatcagcaatgccatgctaaggctgcattgaattgcatgcatctttgggaaccatgcccatgatgttttcagtacaaatctaagtcccaagattaggttggaaagggtatttcttgttggcttagtttgggttggaatttagcatgggtacttaaacccatttggagagctgtgctcctaaacaaattctgtgtcctctcttcccattttgccagcttctgaaaggtttttccacagcccctccctctcacggttcttctgaaggtagcaaaggtgttatataaacattgtcttttaccactctggcctcgctggacagtgacaaaacaagaaaacgttttctttctagaaaggtgataaacgaccaaaggcaatttttcagagacaaatgagagatttgagagttccaatgaagaattgggtgagggggatcattgggtaagggaattgggttaaaatgttcttttctttgacactctttcaatgatgaaagagcgtgtaatttatgctacaagtgccagaattgatcaccatgttcagcaagccactctcaagctgtggtaataaacacacaggcttgggaggcaccagcggccccactcatacagtgacaaggatttgtgatgggaaaaaggaggtgccatgtttggaaatgcaggggtgagctctggtttctcctggggttctggaatatctcagccctcaaaatagaggagactcaagtgcactgattctctaaaaggtgtcatcttcagaatatacttgccatcaagtatttcagggggcgggagggtcccatgagaagaaactatttttctattctccaaagctgtctggatgttggagggtggtgtgaatgctgactgaggaggtgcagagaacaggggcaggggattttaaatcacagcagaccatccagtggaatcctgtatcatctgatctgaacatcaatgaagacagagagaggaatttcattcagaaaggattccatagccccacatctagtcacacgggcattcctcttattttatcagggtctgttttcccccaacccagtgaaaccggtgagtgtgtaactcttgggaagattcttttctaaatacaggtataaagagaaggtggagggtgcgggtgcatggaagaaatactatgtgtgaagcagattcaccttcctgggaccggtgacatggtggtgacagtcaatggcttggacagacagacgggctcagtggcatttggaaccctctttggtgccctcccattctctctggaattgtttcaagtctgctggttttcaaacaagaaaagacctttctggccatagggagaatagcagggagtctatgttttggtggttacattggaaacatcttaagcaagagagggaaagttgattttaggcacacatgtaccctccttgacagcaggaactcagacttcaatcttgggggtctaagaccagaatattttccttctgccagaaaagaatcttgcacatatactcctgaggcatgagtgtgtggtccatggcaagaaatagctaaaggctgctttccaggacccaaagccccatttaatgcaagaaccagagaagtgttctaggccattagtggacaatgtcatgtttggagaaagataacaacacaaataatgtaacctttccttaaaaggcagaactcaatccattttatttgatgcttattctaaccctaaccctgggtcacctggaatgaagaactctatgaataatatttgattttacaacgtgttatggttatgtgaaaactaaacatttgccttttataaagactgacaaaatataaatctttattctaaccctatccccaaaactagccaggccacaccccagatgttcttattgactattgggaagatagaaaaggcgttgtgttttttgtttttttgttgttgttgtcattgttgtttttttcagaagaccagtgtctcagttctgtcttagtagtaccacacccgtaaccgtgttttaaaagtttgttttagcctagagacagatcatacgagttcaacaatgtacagtgtgattgaaaagacaggttggtgtctatttttctttttaaaatatctgaatgtgtatttgtaatacgtaaaggtaaaaaaaaatagtgccaaaaatgtgcaaggcatctcattacagctcatgtacgtctgtttttataagatcaatattaaaacccattgggattaaatatttttgaataggatacactcttgagaaactcgagaatggactgagccttcctacaagccactctttgtttttaaaacagtggggaaatacgtttacagagattgtgagcttcagagaatgcatgtgatggtgtgtattacatgctaattcatataagctgtatctgtcagctaccaccctgtgctttaaaaatgcacacactcaaccctctttagcttggagctcagctttttgcttttttttttttttttttgtagaattatttagctaacataagtattctgattgctacctgatggccattcttacttagtttcatagatgtgctttaactatgatcctttgaagctcaccccttggagagcctacagaacctcaggctgatagctttgaagactgccaaacagcccagaaggaagcaaagcatctgcataatcaggagggttgtataacaagtagtgatttggcaaatatgtgggtagctttaggctgaggcacgggcctcaggcaaaaatgcccttcgagtgaatccgaagggcatgatcttcctatgtccttgactaggcatgacgagtcatttgaggtcagatattatttgagttgttcagcacccccaaaggtaggcattctcctgggaaattttcatttccattttatcgccaaacaaaataaaaagcaaaacaaactttctaagctagaataatgaaattaagtcattttccactttgtatatattgatgctaataaaacagatgaaaaagaaaaaaaaatg

SEQ ID NO: 243248 - DNA, 6541 bp, Homo sapiens
cgcgcgtccgcccagggggctccggaagctgccccggcccgcggcctcctccctcgctcccgcttcccctttctcgctcaccgccgccctccttccccagctccctcgccgtccgcccgccccacagccagcggctccgcgccccctgcagccacgatgcccgcggcccggccgcccgccgcgggactccgcgggatctcgctgttcctcgctctgctcctggggagcccggcggcagcgctggagcgagatgctcttcccgagggagatgctagccctttgggtccttacctcctgccctcaggagccccggagagaggcagtcctggcaaagagcaccctgaagagagagtggtaacagcgccccccagttcctcacagtcggcggaagtgctgggcgagctggtgctggatgggaccgcaccctctgcacatcacgacatcccagccctgtcaccgctgcttccagaggaggcccgccccaagcacgccttgccccccaagaagaaactgccttcgctcaagcaggtgaactctgccaggaagcagctgaggcccaaggccacctccgcagccactgtccaaagggcagggtcccagccagcgtcccagggcctagatctcctctcctcctccacggagaagcctggcccaccgggggacccggaccccatcgtggcctccgaggaggcatcagaagtgcccctttggctggaccgaaaggagagtgcggtccctacaacacccgcacccctgcaaatctcccccttcacttcgcagccctatgtggcccacacactcccccagaggccagaacccggggagcctgggcctgacatggcccaggaggccccccaggaggacaccagccccatggccctgatggacaaaggtgagaatgagctgactgggtcagcctcagaggagagccaggagaccactacctccaccattatcaccaccacggtcatcaccaccgagcaggcaccagctctctgcagtgtgagcttctccaatcctgaggggtacattgactccagcgactacccactgctgcccctcaacaactttctggagtgcacatacaacgtgacagtctacactggctatggggtggagctccaggtgaagagtgtgaacctgtccgatggggaactgctctccatccgcggggtggacggccctaccctgaccgtcctggccaaccagacactcctggtggaggggcaggtaatccgaagccccaccaacaccatctccgtctacttccggaccttccaggacgacggccttgggaccttccagcttcactaccaggccttcatgctgagctgcaactttccccgccggcctgactctggggatgtcacggtgatggacctgcactcaggtggggtggcccactttcactgccacctgggctatgagctccagggcgctaagatgctgacatgcatcaatgcctccaagccgcactggagcagccaggagcccatctgctcagctccttgtggaggggcagtgcacaatgccaccatcggccgcgtcctctccccaagttaccctgaaaacacaaatgggagccaattctgcatctggacgattgaagctccagagggccagaagctgcacctgcactttgagaggctgttgctgcatgacaaggacaggatgacggttcacagcgggcagaccaacaagtcagctcttctctacgactcccttcaaaccgagagtgtcccttttgagggcctgctgagcgaaggcaacaccatccgcatcgagttcacgtccgaccaggcccgggcggcctccaccttcaacatccgatttgaagcgtttgagaaaggccactgctatgagccctacatccagaatgggaacttcactacatccgacccgacctataacattgggactatagtggagttcacctgcgaccccggccactccctggagcagggcccggccatcatcgaatgcatcaatgtgcgggacccatactggaatgacacagagcccctgtgcagagccatgtgtggtggggagctctctgctgtggctggggtggtattgtccccaaactggcccgagccctacgtggaaggtgaagattgtatctggaagatccacgtgggagaagagaaacggatcttcttagatatccagttcctgaatctgagcaacagtgacatcttgaccatctacgatggcgacgaggtcatgccccacatcttggggcagtaccttgggaacagtggcccccagaaactgtactcctccacgccagacttaaccatccagttccattcggaccctgctggcctcatctttggaaagggccagggatttatcatgaactacatagaggtatcaaggaatgactcctgctcggatttacccgagatccagaatggctggaaaaccacttctcacacggagttggtgcggggagccagaatcacctaccagtgtgaccccggctatgacatcgtggggagtgacaccctcacctgccagtgggacctcagctggagcagcgaccccccattttgtgagaaaattatgtactgcaccgaccccggagaggtggatcactcgacccgcttaatttcggatcctgtgctgctggtggggaccaccatccaatacacctgcaaccccggttttgtgcttgaagggagttctcttctgacctgctacagccgtgaaacagggactcccatctggacgtctcgcctgccccactgcgtttcggaggagtccctggcatgtgacaacccagggctgcctgaaaatggataccaaatcctgtacaagcgactctacctgccaggagagtccctcaccttcatgtgctacgaaggctttgagctcatgggtgaagtgaccatccgctgcatcctgggacagccatcccactggaacgggcccctgcccgtgtgtaaagttaatcaagacagttttgaacatgctttagaagtagcagaagcggcagcagagacgtcgctggaaggggggaacatggccctggctatcttcatcccggtcctcatcatctccttactgctgggaggagcctacatttacatcacaagatgtcgctactattccaacctccgcctgcctctgatgtactcccacccctacagccagatcaccgtggaaaccgagtttgacaaccccatttacgagacaggggaaaccagagagtatgaggtttctatctaaagagagctacacttgagaaggggacttgtgaactcaaccacaatctcctcgagacattcatccagagaccatgtggcacttgattgaaaccccagaatgtcgactgtcttttgtttagactctttatcaaaggtttactgttttcttccctgtatttattatatttaaaagtgaaataggtgtgggtttggatgtttcgcggcctcagccaaattcatgttacagcctcaattctgaaggcaggtggaagacttgcaaaatggcaaaccgcggcagcaaaaacacaaaacagcagatggagtttctcccatcagcaatgccatgctaaggctgcattgaattgcatgcatctttgggaaccatgcccatgatgttttcagtacaaatctaagtcccaagattaggttggaaagggtatttcttgttggcttagtttgggttggaatttagcatgggtacttaaacccatttggagagctgtgctcctaaacaaattctgtgtcctctcttcccattttgccagcttctgaaaggtttttccacagcccctccctctcacggttcttctgaaggtagcaaaggtgttatataaacattgtcttttaccactctggcctcgctggacagtgacaaaacaagaaaacgttttctttctagaaaggtgataaacgaccaaaggcaatttttcagagacaaatgagagatttgagagttccaatgaagaattgggtgagggggatcattgggtaagggaattgggttaaaatgttcttttctttgacactctttcaatgatgaaagagcgtgtaatttatgctacaagtgccagaattgatcaccatgttcagcaagccactctcaagctgtggtaataaacacacaggcttgggaggcaccagcggccccactcatacagtgacaaggatttgtgatgggaaaaaggaggtgccatgtttggaaatgcaggggtgagctctggtttctcctggggttctggaatatctcagccctcaaaatagaggagactcaagtgcactgattctctaaaaggtgtcatcttcagaatatacttgccatcaagtatttcagggggcgggagggtcccatgagaagaaactatttttctattctccaaagctgtctggatgttggagggtggtgtgaatgctgactgaggaggtgcagagaacaggggcaggggattttaaatcacagcagaccatccagtggaatcctgtatcatctgatctgaacatcaatgaagacagagagaggaatttcattcagaaaggattccatagccccacatctagtcacacgggcattcctcttattttatcagggtctgttttcccccaacccagtgaaaccggtgagtgtgtaactcttgggaagattcttttctaaatacaggtataaagagaaggtggagggtgcgggtgcatggaagaaatactatgtgtgaagcagattcaccttcctgggaccggtgacatggtggtgacagtcaatggcttggacagacagacgggctcagtggcatttggaaccctctttggtgccctcccattctctctggaattgtttcaagtctgctggttttcaaacaagaaaagacctttctggccatagggagaatagcagggagtctatgttttggtggttacattggaaacatcttaagcaagagagggaaagttgattttaggcacacatgtaccctccttgacagcaggaactcagacttcaatcttgggggtctaagaccagaatattttccttctgccagaaaagaatcttgcacatatactcctgaggcatgagtgtgtggtccatggcaagaaatagctaaaggctgctttccaggacccaaagccccatttaatgcaagaaccagagaagtgttctaggccattagtggacaatgtcatgtttggagaaagataacaacacaaataatgtaacctttccttaaaaggcagaactcaatccattttatttgatgcttattctaaccctaaccctgggtcacctggaatgaagaactctatgaataatatttgattttacaacgtgttatggttatgtgaaaactaaacatttgccttttataaagactgacaaaatataaatctttattctaaccctatccccaaaactagccaggccacaccccagatgttcttattgactattgggaagatagaaaaggcgttgtgttttttgtttttttgttgttgttgtcattgttgtttttttcagaagaccagtgtctcagttctgtcttagtagtaccacacccgtaaccgtgttttaaaagtttgttttagcctagagacagatcatacgagttcaacaatgtacagtgtgattgaaaagacaggttggtgtctatttttctttttaaaatatctgaatgtgtatttgtaatacgtaaaggtaaaaaaaaatagtgccaaaaatgtgcaaggcatctcattacagctcatgtacgtctgtttttataagatcaatattaaaacccattgggattaaatatttttgaataggatacactcttgagaaactcgagaatggactgagccttcctacaagccactctttgtttttaaaacagtggggaaatacgtttacagagattgtgagcttcagagaatgcatgtgatggtgtgtattacatgctaattcatataagctgtatctgtcagctaccaccctgtgctttaaaaatgcacacactcaaccctctttagcttggagctcagctttttgcttttttttttttttttttgtagaattatttagctaacataagtattctgattgctacctgatggccattcttacttagtttcatagatgtgctttaactatgatcctttgaagctcaccccttggagagcctacagaacctcaggctgatagctttgaagactgccaaacagcccagaaggaagcaaagcatctgcataatcaggagggttgtataacaagtagtgatttggcaaatatgtgggtagctttaggctgaggcacgggcctcaggcaaaaatgcccttcgagtgaatccgaagggcatgatcttcctatgtccttgactaggcatgacgagtcatttgaggtcagatattatttgagttgttcagcacccccaaaggtaggcattctcctgggaaattttcatttccattttatcgccaaacaaaataaaaagcaaaacaaactttctaagctagaataatgaaattaagtcattttccactttgtatatattgatgctaataaaacagatgaaaaagaaaaaaaaatg

SEQ ID NO: 243249 - DNA, 3821 bp, Homo sapiens
catctcatcagagctccttctggcttgcatttcagcggaggagtccctggcatgtgacaacccagggctgcctgaaaatggataccaaatcctgtacaagcgactctacctgccaggagagtccctcaccttcatgtgctacgaaggctttgagctcatgggtgaagtgaccatccgctgcatcctgggacagccatcccactggaacgggcccctgcccgtgtgtaaagttaatcaagacagttttgaacatgctttagaagtagcagaagcggcagcagagacgtcgctggaaggggggaacatggccctggctatcttcatcccggtcctcatcatctccttactgctgggaggagcctacatttacatcacaagatgtcgctactattccaacctccgcctgcctctgatgtactcccacccctacagccagatcaccgtggaaaccgagtttgacaaccccatttacgagacaggggaaaccagagagtatgaggtttctatctaaagagagctacacttgagaaggggacttgtgaactcaaccacaatctcctcgagacattcatccagagaccatgtggcacttgattgaaaccccagaatgtcgactgtcttttgtttagactctttatcaaaggtttactgttttcttccctgtatttattatatttaaaagtgaaataggtgtgggtttggatgtttcgcggcctcagccaaattcatgttacagcctcaattctgaaggcaggtggaagacttgcaaaatggcaaaccgcggcagcaaaaacacaaaacagcagatggagtttctcccatcagcaatgccatgctaaggctgcattgaattgcatgcatctttgggaaccatgcccatgatgttttcagtacaaatctaagtcccaagattaggttggaaagggtatttcttgttggcttagtttgggttggaatttagcatgggtacttaaacccatttggagagctgtgctcctaaacaaattctgtgtcctctcttcccattttgccagcttctgaaaggtttttccacagcccctccctctcacggttcttctgaaggtagcaaaggtgttatataaacattgtcttttaccactctggcctcgctggacagtgacaaaacaagaaaacgttttctttctagaaaggtgataaacgaccaaaggcaatttttcagagacaaatgagagatttgagagttccaatgaagaattgggtgagggggatcattgggtaagggaattgggttaaaatgttcttttctttgacactctttcaatgatgaaagagcgtgtaatttatgctacaagtgccagaattgatcaccatgttcagcaagccactctcaagctgtggtaataaacacacaggcttgggaggcaccagcggccccactcatacagtgacaaggatttgtgatgggaaaaaggaggtgccatgtttggaaatgcaggggtgagctctggtttctcctggggttctggaatatctcagccctcaaaatagaggagactcaagtgcactgattctctaaaaggtgtcatcttcagaatatacttgccatcaagtatttcagggggcgggagggtcccatgagaagaaactatttttctattctccaaagctgtctggatgttggagggtggtgtgaatgctgactgaggaggtgcagagaacaggggcaggggattttaaatcacagcagaccatccagtggaatcctgtatcatctgatctgaacatcaatgaagacagagagaggaatttcattcagaaaggattccatagccccacatctagtcacacgggcattcctcttattttatcagggtctgttttcccccaacccagtgaaaccggtgagtgtgtaactcttgggaagattcttttctaaatacaggtataaagagaaggtggagggtgcgggtgcatggaagaaatactatgtgtgaagcagattcaccttcctgggaccggtgacatggtggtgacagtcaatggcttggacagacagacgggctcagtggcatttggaaccctctttggtgccctcccattctctctggaattgtttcaagtctgctggttttcaaacaagaaaagacctttctggccatagggagaatagcagggagtctatgttttggtggttacattggaaacatcttaagcaagagagggaaagttgattttaggcacacatgtaccctccttgacagcaggaactcagacttcaatcttgggggtctaagaccagaatattttccttctgccagaaaagaatcttgcacatatactcctgaggcatgagtgtgtggtccatggcaagaaatagctaaaggctgctttccaggacccaaagccccatttaatgcaagaaccagagaagtgttctaggccattagtggacaatgtcatgtttggagaaagataacaacacaaataatgtaacctttccttaaaaggcagaactcaatccattttatttgatgcttattctaaccctaaccctgggtcacctggaatgaagaactctatgaataatatttgattttacaacgtgttatggttatgtgaaaactaaacatttgccttttataaagactgacaaaatataaatctttattctaaccctatccccaaaactagccaggccacaccccagatgttcttattgactattgggaagatagaaaaggcgttgtgttttttgtttttttgttgttgttgtcattgttgtttttttcagaagaccagtgtctcagttctgtcttagtagtaccacacccgtaaccgtgttttaaaagtttgttttagcctagagacagatcatacgagttcaacaatgtacagtgtgattgaaaagacaggttggtgtctatttttctttttaaaatatctgaatgtgtatttgtaatacgtaaaggtaaaaaaaaatagtgccaaaaatgtgcaaggcatctcattacagctcatgtacgtctgtttttataagatcaatattaaaacccattgggattaaatatttttgaataggatacactcttgagaaactcgagaatggactgagccttcctacaagccactctttgtttttaaaacagtggggaaatacgtttacagagattgtgagcttcagagaatgcatgtgatggtgtgtattacatgctaattcatataagctgtatctgtcagctaccaccctgtgctttaaaaatgcacacactcaaccctctttagcttggagctcagctttttgcttttttttttttttttttgtagaattatttagctaacataagtattctgattgctacctgatggccattcttacttagtttcatagatgtgctttaactatgatcctttgaagctcaccccttggagagcctacagaacctcaggctgatagctttgaagactgccaaacagcccagaaggaagcaaagcatctgcataatcaggagggttgtataacaagtagtgatttggcaaatatgtgggtagctttaggctgaggcacgggcctcaggcaaaaatgcccttcgagtgaatccgaagggcatgatcttcctatgtccttgactaggcatgacgagtcatttgaggtcagatattatttgagttgttcagcacccccaaaggtaggcattctcctgggaaattttcatttccattttatcgccaaacaaaataaaaagcaaaacaaactttctaagctagaataatgaaattaagtcattttccactttgtatatattgatgctaataaaacagatgaaaaagaaaaaaaaatg

SEQ ID NO: 243250 - DNA, 3096 bp, Homo sapiens
cgcgcgtccgcccagggggctccggaagctgccccggcccgcggcctcctccctcgctcccgcttcccctttctcgctcaccgccgccctccttccccagctccctcgccgtccgcccgccccacagccagcggctccgcgccccctgcagccacgatgcccgcggcccggccgcccgccgcgggactccgcgggatctcgctgttcctcgctctgctcctggggagcccggcggcagcgctggagcgagatgctcttcccgagggagatgctagccctttgggtccttacctcctgccctcaggagccccggagagaggcagtcctggcaaagagcaccctgaagagagagtggtaacagcgccccccagttcctcacagtcggcggaagtgctgggcgagctggtgctggatgggaccgcaccctctgcacatcacgacatcccagccctgtcaccgctgcttccagaggaggcccgccccaagcacgccttgccccccaagaagaaactgccttcgctcaagcaggtgaactctgccaggaagcagctgaggcccaaggccacctccgcagccactgtccaaagggcagggtcccagccagcgtcccagggcctagatctcctctcctcctccacggagaagcctggcccaccgggggacccggaccccatcgtggcctccgaggaggcatcagaagtgcccctttggctggaccgaaaggagagtgcggtccctacaacacccgcacccctgcaaatctcccccttcacttcgcagccctatgtggcccacacactcccccagaggccagaacccggggagcctgggcctgacatggcccaggaggccccccaggaggacaccagccccatggccctgatggacaaaggtgagaatgagctgactgggtcagcctcagaggagagccaggagaccactacctccaccattatcaccaccacggtcatcaccaccgagcaggcaccagctctctgcagtgtgagcttctccaatcctgaggggtacattgactccagcgactacccactgctgcccctcaacaactttctggagtgcacatacaacgtgacagtctacactggctatggggtggagctccaggtgaagagtgtgaacctgtccgatggggaactgctctccatccgcggggtggacggccctaccctgaccgtcctggccaaccagacactcctggtggaggggcaggtaatccgaagccccaccaacaccatctccgtctacttccggaccttccaggacgacggccttgggaccttccagcttcactaccaggccttcatgctgagctgcaactttccccgccggcctgactctggggatgtcacggtgatggacctgcactcaggtggggtggcccactttcactgccacctgggctatgagctccagggcgctaagatgctgacatgcatcaatgcctccaagccgcactggagcagccaggagcccatctgctcagctccttgtggaggggcagtgcacaatgccaccatcggccgcgtcctctccccaagttaccctgaaaacacaaatgggagccaattctgcatctggacgattgaagctccagagggccagaagctgcacctgcactttgagaggctgttgctgcatgacaaggacaggatgacggttcacagcgggcagaccaacaagtcagctcttctctacgactcccttcaaaccgagagtgtcccttttgagggcctgctgagcgaaggcaacaccatccgcatcgagttcacgtccgaccaggcccgggcggcctccaccttcaacatccgatttgaagcgtttgagaaaggccactgctatgagccctacatccagaatgggaacttcactacatccgacccgacctataacattgggactatagtggagttcacctgcgaccccggccactccctggagcagggcccggccatcatcgaatgcatcaatgtgcgggacccatactggaatgacacagagcccctgtgcagagccatgtgtggtggggagctctctgctgtggctggggtggtattgtccccaaactggcccgagccctacgtggaaggtgaagattgtatctggaagatccacgtgggagaagagaaacggatcttcttagatatccagttcctgaatctgagcaacagtgacatcttgaccatctacgatggcgacgaggtcatgccccacatcttggggcagtaccttgggaacagtggcccccagaaactgtactcctccacgccagacttaaccatccagttccattcggaccctgctggcctcatctttggaaagggccagggatttatcatgaactacatagaggtatcaaggaatgactcctgctcggatttacccgagatccagaatggctggaaaaccacttctcacacggagttggtgcggggagccagaatcacctaccagtgtgaccccggctatgacatcgtggggagtgacaccctcacctgccagtgggacctcagctggagcagcgaccccccattttgtgagaaaattatgtactgcaccgaccccggagaggtggatcactcgacccgcttaatttcggatcctgtgctgctggtggggaccaccatccaatacacctgcaaccccggttttgtgcttgaagggagttctcttctgacctgctacagccgtgaaacagggactcccatctggacgtctcgcctgccccactgcgtttcggaggagtccctggcatgtgacaacccagggctgcctgaaaatggataccaaatcctgtacaagcgactctacctgccaggagagtccctcaccttcatgtgctacgaaggctttgagctcatgggtgaagtgaccatccgctgcatcctgggacagccatcccactggaacgggcccctgcccgtgtgtaaaggtaaagaaacctactcaccacacagggtccacggggcctggagatgtcaggctcctggctcacaggagttctgaacttgctctaaaaaattggactaggagttcgagaccagccgaggcaacatagtgagacccccatctctacca

SEQ ID NO: 243251 - DNA, 6316 bp, Homo sapiens
cgcgcgtccgcccagggggctccggaagctgccccggcccgcggcctcctccctcgctcccgcttcccctttctcgctcaccgccgccctccttccccagctccctcgccgtccgcccgccccacagccagcggctccgcgccccctgcagccacgatgcccgcggcccggccgcccgccgcgggactccgcgggatctcgctgttcctcgctctgctcctggggagcccggcggcagcgctggagcgagatgctcttcccgagggagatgctagccctttgggtccttacctcctgccctcaggagccccggagagaggcagtcctggcaaagagcaccctgaagagagagtggtaacagcgccccccagttcctcacagtcggcggaagtgctgggcgagctggtgctggatgggaccgcaccctctgcacatcacgacatcccagccctgtcaccgctgcttccagaggaggcccgccccaagcacgccttgccccccaagaagaaactgccttcgctcaagcaggtgaactctgccaggaagcagctgaggcccaaggccacctccgcagccactgtccaaagggcagggtcccagccagcgtcccagggcctagatctcctctcctcctccacggagaagcctggcccaccgggggacccggaccccatcgtggcctccgaggaggcatcagaagtgcccctttggctggaccgaaaggagagtgcggtccctacaacacccgcacccctgcaaatctcccccttcacttcgcagccctatgtggcccacacactcccccagaggccagaacccggggagcctgggcctgacatggcccaggaggccccccaggaggacaccagccccatggccctgatggacaaaggtgagaatgagctgactgggtcagcctcagaggagagccaggagaccactacctccaccattatcaccaccacggtcatcaccaccgagcaggcaccagctctctgcagtgtgagcttctccaatcctgaggggtacattgactccagcgactacccactgctgcccctcaacaactttctggagtgcacatacaacgtgacagtctacactggctatggggtggagctccaggtgaagagtgtgaacctgtccgatggggaactgctctccatccgcggggtggacggccctaccctgaccgtcctggccaaccagacactcctggtggaggggcaggtaatccgaagccccaccaacaccatctccgtctacttccggaccttccaggacgacggccttgggaccttccagcttcactaccaggccttcatgctgagctgcaactttccccgccggcctgactctggggatgtcacggtgatggacctgcactcaggtggggtggcccactttcactgccacctgggctatgagctccagggcgctaagatgctgacatgcatcaatgcctccaagccgcactggagcagccaggagcccatctgctcagctccttgtggaggggcagtgcacaatgccaccatcggccgcgtcctctccccaagttaccctgaaaacacaaatgggagccaattctgcatctggacgattgaagctccagagggccagaagctgcacctgcactttgagaggctgttgctgcatgacaaggacaggatgacggttcacagcgggcagaccaacaagtcagctcttctctacgactcccttcaaaccgagagtgtcccttttgagggcctgctgagcgaaggcaacaccatccgcatcgagttcacgtccgaccaggcccgggcggcctccaccttcaacatccgatttgaagcgtttgagaaaggccactgctatgagccctacatccagaatgggaacttcactacatccgacccgacctataacattgggactatagtggagttcacctgcgaccccggccactccctggagcagggcccggccatcatcgaatgcatcaatgtgcgggacccatactggaatgacacagagcccctgtgcagagccatgtgtggtggggagctctctgctgtggctggggtggtattgtccccaaactggcccgagccctacgtggaaggtgaagattgtatctggaagatccacgtgggagaagagaaacggatcttcttagatatccagttcctgaatctgagcaacagtgacatcttgaccatctacgatggcgacgaggtcatgccccacatcttggggcagtaccttgggaacagtggcccccagaaactgtactcctccacgccagacttaaccatccagttccattcggaccctgctggcctcatctttggaaagggccagggatttatcatgaactacatagaggtatcaaggaatgactcctgctcggatttacccgagatccagaatggctggaaaaccacttctcacacggagttggtgcggggagccagaatcacctaccagtgtgaccccggctatgacatcgtggggagtgacaccctcacctgccagtgggacctcagctggagcagcgaccccccattttgtgagaaaacggaggagtccctggcatgtgacaacccagggctgcctgaaaatggataccaaatcctgtacaagcgactctacctgccaggagagtccctcaccttcatgtgctacgaaggctttgagctcatgggtgaagtgaccatccgctgcatcctgggacagccatcccactggaacgggcccctgcccgtgtgtaaagtagcagaagcggcagcagagacgtcgctggaaggggggaacatggccctggctatcttcatcccggtcctcatcatctccttactgctgggaggagcctacatttacatcacaagatgtcgctactattccaacctccgcctgcctctgatgtactcccacccctacagccagatcaccgtggaaaccgagtttgacaaccccatttacgagacaggggaaaccagagagtatgaggtttctatctaaagagagctacacttgagaaggggacttgtgaactcaaccacaatctcctcgagacattcatccagagaccatgtggcacttgattgaaaccccagaatgtcgactgtcttttgtttagactctttatcaaaggtttactgttttcttccctgtatttattatatttaaaagtgaaataggtgtgggtttggatgtttcgcggcctcagccaaattcatgttacagcctcaattctgaaggcaggtggaagacttgcaaaatggcaaaccgcggcagcaaaaacacaaaacagcagatggagtttctcccatcagcaatgccatgctaaggctgcattgaattgcatgcatctttgggaaccatgcccatgatgttttcagtacaaatctaagtcccaagattaggttggaaagggtatttcttgttggcttagtttgggttggaatttagcatgggtacttaaacccatttggagagctgtgctcctaaacaaattctgtgtcctctcttcccattttgccagcttctgaaaggtttttccacagcccctccctctcacggttcttctgaaggtagcaaaggtgttatataaacattgtcttttaccactctggcctcgctggacagtgacaaaacaagaaaacgttttctttctagaaaggtgataaacgaccaaaggcaatttttcagagacaaatgagagatttgagagttccaatgaagaattgggtgagggggatcattgggtaagggaattgggttaaaatgttcttttctttgacactctttcaatgatgaaagagcgtgtaatttatgctacaagtgccagaattgatcaccatgttcagcaagccactctcaagctgtggtaataaacacacaggcttgggaggcaccagcggccccactcatacagtgacaaggatttgtgatgggaaaaaggaggtgccatgtttggaaatgcaggggtgagctctggtttctcctggggttctggaatatctcagccctcaaaatagaggagactcaagtgcactgattctctaaaaggtgtcatcttcagaatatacttgccatcaagtatttcagggggcgggagggtcccatgagaagaaactatttttctattctccaaagctgtctggatgttggagggtggtgtgaatgctgactgaggaggtgcagagaacaggggcaggggattttaaatcacagcagaccatccagtggaatcctgtatcatctgatctgaacatcaatgaagacagagagaggaatttcattcagaaaggattccatagccccacatctagtcacacgggcattcctcttattttatcagggtctgttttcccccaacccagtgaaaccggtgagtgtgtaactcttgggaagattcttttctaaatacaggtataaagagaaggtggagggtgcgggtgcatggaagaaatactatgtgtgaagcagattcaccttcctgggaccggtgacatggtggtgacagtcaatggcttggacagacagacgggctcagtggcatttggaaccctctttggtgccctcccattctctctggaattgtttcaagtctgctggttttcaaacaagaaaagacctttctggccatagggagaatagcagggagtctatgttttggtggttacattggaaacatcttaagcaagagagggaaagttgattttaggcacacatgtaccctccttgacagcaggaactcagacttcaatcttgggggtctaagaccagaatattttccttctgccagaaaagaatcttgcacatatactcctgaggcatgagtgtgtggtccatggcaagaaatagctaaaggctgctttccaggacccaaagccccatttaatgcaagaaccagagaagtgttctaggccattagtggacaatgtcatgtttggagaaagataacaacacaaataatgtaacctttccttaaaaggcagaactcaatccattttatttgatgcttattctaaccctaaccctgggtcacctggaatgaagaactctatgaataatatttgattttacaacgtgttatggttatgtgaaaactaaacatttgccttttataaagactgacaaaatataaatctttattctaaccctatccccaaaactagccaggccacaccccagatgttcttattgactattgggaagatagaaaaggcgttgtgttttttgtttttttgttgttgttgtcattgttgtttttttcagaagaccagtgtctcagttctgtcttagtagtaccacacccgtaaccgtgttttaaaagtttgttttagcctagagacagatcatacgagttcaacaatgtacagtgtgattgaaaagacaggttggtgtctatttttctttttaaaatatctgaatgtgtatttgtaatacgtaaaggtaaaaaaaaatagtgccaaaaatgtgcaaggcatctcattacagctcatgtacgtctgtttttataagatcaatattaaaacccattgggattaaatatttttgaataggatacactcttgagaaactcgagaatggactgagccttcctacaagccactctttgtttttaaaacagtggggaaatacgtttacagagattgtgagcttcagagaatgcatgtgatggtgtgtattacatgctaattcatataagctgtatctgtcagctaccaccctgtgctttaaaaatgcacacactcaaccctctttagcttggagctcagctttttgcttttttttttttttttttgtagaattatttagctaacataagtattctgattgctacctgatggccattcttacttagtttcatagatgtgctttaactatgatcctttgaagctcaccccttggagagcctacagaacctcaggctgatagctttgaagactgccaaacagcccagaaggaagcaaagcatctgcataatcaggagggttgtataacaagtagtgatttggcaaatatgtgggtagctttaggctgaggcacgggcctcaggcaaaaatgcccttcgagtgaatccgaagggcatgatcttcctatgtccttgactaggcatgacgagtcatttgaggtcagatattatttgagttgttcagcacccccaaaggtaggcattctcctgggaaattttcatttccattttatcgccaaacaaaataaaaagcaaaacaaactttctaagctagaataatgaaattaagtcattttccactttgtatatattgatgctaataaaacagatgaaaaagaaaaaaaaatg

SEQ ID NO: 243252 - DNA, 6040 bp, Homo sapiens
aaaggaagggagggagggagaaaggagaagttggtttagaggccagccggacgagctttgggcaccgcccttaggagggccaccctcagagtctgacagcaggtgaaggtcctaaatctccccaaactaactggtgtcttttctcctcttccaagatgctcttcccgagggagatgctagccctttgggtccttacctcctgccctcaggagccccggagagaggcagtcctggcaaagagcaccctgaagagagagtggtaacagcgccccccagttcctcacagtcggcggaagtgctgggcgagctggtgctggatgggaccgcaccctctgcacatcacgacatcccagccctgtcaccgctgcttccagaggaggcccgccccaagcacgccttgccccccaagaagaaactgccttcgctcaagcaggtgaactctgccaggaagcagctgaggcccaaggccacctccgcagccactgtccaaagggcagggtcccagccagcgtcccagggcctagatctcctctcctcctccacggagaagcctggcccaccgggggacccggaccccatcgtggcctccgaggaggcatcagaagtgcccctttggctggaccgaaaggagagtgcggtccctacaacacccgcacccctgcaaatctcccccttcacttcgcagccctatgtggcccacacactcccccagaggccagaacccggggagcctgggcctgacatggcccaggaggccccccaggaggacaccagccccatggccctgatggacaaaggtgagaatgagctgactgggtcagcctcagaggagagccaggagaccactacctccaccattatcaccaccacggtcatcaccaccgagcaggcaccagctctctgcagtgtgagcttctccaatcctgaggggtacattgactccagcgactacccactgctgcccctcaacaactttctggagtgcacatacaacgtgacagtctacactggctatggggtggagctccaggtgaagagtgtgaacctgtccgatggggaactgctctccatccgcggggtggacggccctaccctgaccgtcctggccaaccagacactcctggtggaggggcaggtaatccgaagccccaccaacaccatctccgtctacttccggaccttccaggacgacggccttgggaccttccagcttcactaccaggccttcatgctgagctgcaactttccccgccggcctgactctggggatgtcacggtgatggacctgcactcaggtggggtggcccactttcactgccacctgggctatgagctccagggcgctaagatgctgacatgcatcaatgcctccaagccgcactggagcagccaggagcccatctgctcagctccttgtggaggggcagtgcacaatgccaccatcggccgcgtcctctccccaagttaccctgaaaacacaaatgggagccaattctgcatctggacgattgaagctccagagggccagaagctgcacctgcactttgagaggctgttgctgcatgacaaggacaggatgacggttcacagcgggcagaccaacaagtcagctcttctctacgactcccttcaaaccgagagtgtcccttttgagggcctgctgagcgaaggcaacaccatccgcatcgagttcacgtccgaccaggcccgggcggcctccaccttcaacatccgatttgaagcgtttgagaaaggccactgctatgagccctacatccagaatgggaacttcactacatccgacccgacctataacattgggactatagtggagttcacctgcgaccccggccactccctggagcagggcccggccatcatcgaatgcatcaatgtgcgggacccatactggaatgacacagagcccctgtgcagagccatgtgtggtggggagctctctgctgtggctggggtggtattgtccccaaactggcccgagccctacgtggaaggtgaagattgtatctggaagatccacgtgggagaagagaaacggatcttcttagatatccagttcctgaatctgagcaacagtgacatcttgaccatctacgatggcgacgaggtcatgccccacatcttggggcagtaccttgggaacagtggcccccagaaactgtactcctccacgccagacttaaccatccagttccattcggaccctgctggcctcatctttggaaagggccagggatttatcatgaactacatagaggtatcaaggaatgactcctgctcggatttacccgagatccagaatggctggaaaaccacttctcacacggagttggtgcggggagccagaatcacctaccagtgtgaccccggctatgacatcgtggggagtgacaccctcacctgccagtgggacctcagctggagcagcgaccccccattttgtgagaaaattatgtactgcaccgaccccggagaggtggatcactcgacccgcttaatttcggatcctgtgctgctggtggggaccaccatccaatacacctgcaaccccggttttgtgcttgaagggagttctcttctgacctgctacagccgtgaaacagggactcccatctggacgtctcgcctgccccactgcgttttagcagaagcggcagcagagacgtcgctggaaggggggaacatggccctggctatcttcatcccggtcctcatcatctccttactgctgggaggagcctacatttacatcacaagatgtcgctactattccaacctccgcctgcctctgatgtactcccacccctacagccagatcaccgtggaaaccgagtttgacaaccccatttacgagacaggggaaaccagagagtatgaggtttctatctaaagagagctacacttgagaaggggacttgtgaactcaaccacaatctcctcgagacattcatccagagaccatgtggcacttgattgaaaccccagaatgtcgactgtcttttgtttagactctttatcaaaggtttactgttttcttccctgtatttattatatttaaaagtgaaataggtgtgggtttggatgtttcgcggcctcagccaaattcatgttacagcctcaattctgaaggcaggtggaagacttgcaaaatggcaaaccgcggcagcaaaaacacaaaacagcagatggagtttctcccatcagcaatgccatgctaaggctgcattgaattgcatgcatctttgggaaccatgcccatgatgttttcagtacaaatctaagtcccaagattaggttggaaagggtatttcttgttggcttagtttgggttggaatttagcatgggtacttaaacccatttggagagctgtgctcctaaacaaattctgtgtcctctcttcccattttgccagcttctgaaaggtttttccacagcccctccctctcacggttcttctgaaggtagcaaaggtgttatataaacattgtcttttaccactctggcctcgctggacagtgacaaaacaagaaaacgttttctttctagaaaggtgataaacgaccaaaggcaatttttcagagacaaatgagagatttgagagttccaatgaagaattgggtgagggggatcattgggtaagggaattgggttaaaatgttcttttctttgacactctttcaatgatgaaagagcgtgtaatttatgctacaagtgccagaattgatcaccatgttcagcaagccactctcaagctgtggtaataaacacacaggcttgggaggcaccagcggccccactcatacagtgacaaggatttgtgatgggaaaaaggaggtgccatgtttggaaatgcaggggtgagctctggtttctcctggggttctggaatatctcagccctcaaaatagaggagactcaagtgcactgattctctaaaaggtgtcatcttcagaatatacttgccatcaagtatttcagggggcgggagggtcccatgagaagaaactatttttctattctccaaagctgtctggatgttggagggtggtgtgaatgctgactgaggaggtgcagagaacaggggcaggggattttaaatcacagcagaccatccagtggaatcctgtatcatctgatctgaacatcaatgaagacagagagaggaatttcattcagaaaggattccatagccccacatctagtcacacgggcattcctcttattttatcagggtctgttttcccccaacccagtgaaaccggtgagtgtgtaactcttgggaagattcttttctaaatacaggtataaagagaaggtggagggtgcgggtgcatggaagaaatactatgtgtgaagcagattcaccttcctgggaccggtgacatggtggtgacagtcaatggcttggacagacagacgggctcagtggcatttggaaccctctttggtgccctcccattctctctggaattgtttcaagtctgctggttttcaaacaagaaaagaatcttgcacatatactcctgaggcatgagtgtgtggtccatggcaagaaatagctaaaggctgctttccaggacccaaagccccatttaatgcaagaaccagagaagtgttctaggccattagtggacaatgtcatgtttggagaaagataacaacacaaataatgtaacctttccttaaaaggcagaactcaatccattttatttgatgcttattctaaccctaaccctgggtcacctggaatgaagaactctatgaataatatttgattttacaacgtgttatggttatgtgaaaactaaacatttgccttttataaagactgacaaaatataaatctttattctaaccctatccccaaaactagccaggccacaccccagatgttcttattgactattgggaagatagaaaaggcgttgtgttttttgtttttttgttgttgttgtcattgttgtttttttcagaagaccagtgtctcagttctgtcttagtagtaccacacccgtaaccgtgttttaaaagtttgttttagcctagagacagatcatacgagttcaacaatgtacagtgtgattgaaaagacaggttggtgtctatttttctttttaaaatatctgaatgtgtatttgtaatacgtaaaggtaaaaaaaaatagtgccaaaaatgtgcaaggcatctcattacagctcatgtacgtctgtttttataagatcaatattaaaacccattgggattaaatatttttgaataggatacactcttgagaaactcgagaatggactgagccttcctacaagccactctttgtttttaaaacagtggggaaatacgtttacagagattgtgagcttcagagaatgcatgtgatggtgtgtattacatgctaattcatataagctgtatctgtcagctaccaccctgtgctttaaaaatgcacacactcaaccctctttagcttggagctcagctttttgcttttttttttttttttttgtagaattatttagctaacataagtattctgattgctacctgatggccattcttacttagtttcatagatgtgctttaactatgatcctttgaagctcaccccttggagagcctacagaacctcaggctgatagctttgaagactgccaaacagcccagaaggaagcaaagcatctgcataatcaggagggttgtataacaagtagtgatttggcaaatatgtgggtagctttaggctgaggcacgggcctcaggcaaaaatgcccttcgagtgaatccgaagggcatgatcttcctatgtccttgactaggcatgacgagtcatttgaggtcagatattatttgagttgttcagcacccccaaaggtaggcattctcctgggaaattttcatttccattttatcgccaaacaaaataaaaagcaaaacaaactttctaagctagaataatgaaattaagtcattttccactttgtatatattgatgctaataaaacagatgaaaaagaaaaaaaaatg

SEQ ID NO: 243253 - DNA, 3865 bp, Homo sapiens
tggcacaattttggacacgcggtgagtgttcagtaattattcactatcactgttgttgatcttgggtcttatctatctcatcttctcttgggaacttaggaagtgaatagtccaggcacgttcactgattatagtggcccaagataagtaaaaacataccactaatttcaccaaagcatggcatgggcttttgcatcaaattttttggcctcatttcatgcaaacgaagtgaattcactttacattgaccaatgcttcctgatttctctttcagttaatcaagacagttttgaacatgctttagaagtagcagaagcggcagcagagacgtcgctggaaggggggaacatggccctggctatcttcatcccggtcctcatcatctccttactgctgggaggagcctacatttacatcacaagatgtcgctactattccaacctccgcctgcctctgatgtactcccacccctacagccagatcaccgtggaaaccgagtttgacaaccccatttacgagacaggggaaaccagagagtatgaggtttctatctaaagagagctacacttgagaaggggacttgtgaactcaaccacaatctcctcgagacattcatccagagaccatgtggcacttgattgaaaccccagaatgtcgactgtcttttgtttagactctttatcaaaggtttactgttttcttccctgtatttattatatttaaaagtgaaataggtgtgggtttggatgtttcgcggcctcagccaaattcatgttacagcctcaattctgaaggcaggtggaagacttgcaaaatggcaaaccgcggcagcaaaaacacaaaacagcagatggagtttctcccatcagcaatgccatgctaaggctgcattgaattgcatgcatctttgggaaccatgcccatgatgttttcagtacaaatctaagtcccaagattaggttggaaagggtatttcttgttggcttagtttgggttggaatttagcatgggtacttaaacccatttggagagctgtgctcctaaacaaattctgtgtcctctcttcccattttgccagcttctgaaaggtttttccacagcccctccctctcacggttcttctgaaggtagcaaaggtgttatataaacattgtcttttaccactctggcctcgctggacagtgacaaaacaagaaaacgttttctttctagaaaggtgataaacgaccaaaggcaatttttcagagacaaatgagagatttgagagttccaatgaagaattgggtgagggggatcattgggtaagggaattgggttaaaatgttcttttctttgacactctttcaatgatgaaagagcgtgtaatttatgctacaagtgccagaattgatcaccatgttcagcaagccactctcaagctgtggtaataaacacacaggcttgggaggcaccagcggccccactcatacagtgacaaggatttgtgatgggaaaaaggaggtgccatgtttggaaatgcaggggtgagctctggtttctcctggggttctggaatatctcagccctcaaaatagaggagactcaagtgcactgattctctaaaaggtgtcatcttcagaatatacttgccatcaagtatttcagggggcgggagggtcccatgagaagaaactatttttctattctccaaagctgtctggatgttggagggtggtgtgaatgctgactgaggaggtgcagagaacaggggcaggggattttaaatcacagcagaccatccagtggaatcctgtatcatctgatctgaacatcaatgaagacagagagaggaatttcattcagaaaggattccatagccccacatctagtcacacgggcattcctcttattttatcagggtctgttttcccccaacccagtgaaaccggtgagtgtgtaactcttgggaagattcttttctaaatacaggtataaagagaaggtggagggtgcgggtgcatggaagaaatactatgtgtgaagcagattcaccttcctgggaccggtgacatggtggtgacagtcaatggcttggacagacagacgggctcagtggcatttggaaccctctttggtgccctcccattctctctggaattgtttcaagtctgctggttttcaaacaagaaaagacctttctggccatagggagaatagcagggagtctatgttttggtggttacattggaaacatcttaagcaagagagggaaagttgattttaggcacacatgtaccctccttgacagcaggaactcagacttcaatcttgggggtctaagaccagaatattttccttctgccagaaaagaatcttgcacatatactcctgaggcatgagtgtgtggtccatggcaagaaatagctaaaggctgctttccaggacccaaagccccatttaatgcaagaaccagagaagtgttctaggccattagtggacaatgtcatgtttggagaaagataacaacacaaataatgtaacctttccttaaaaggcagaactcaatccattttatttgatgcttattctaaccctaaccctgggtcacctggaatgaagaactctatgaataatatttgattttacaacgtgttatggttatgtgaaaactaaacatttgccttttataaagactgacaaaatataaatctttattctaaccctatccccaaaactagccaggccacaccccagatgttcttattgactattgggaagatagaaaaggcgttgtgttttttgtttttttgttgttgttgtcattgttgtttttttcagaagaccagtgtctcagttctgtcttagtagtaccacacccgtaaccgtgttttaaaagtttgttttagcctagagacagatcatacgagttcaacaatgtacagtgtgattgaaaagacaggttggtgtctatttttctttttaaaatatctgaatgtgtatttgtaatacgtaaaggtaaaaaaaaatagtgccaaaaatgtgcaaggcatctcattacagctcatgtacgtctgtttttataagatcaatattaaaacccattgggattaaatatttttgaataggatacactcttgagaaactcgagaatggactgagccttcctacaagccactctttgtttttaaaacagtggggaaatacgtttacagagattgtgagcttcagagaatgcatgtgatggtgtgtattacatgctaattcatataagctgtatctgtcagctaccaccctgtgctttaaaaatgcacacactcaaccctctttagcttggagctcagctttttgcttttttttttttttttttgtagaattatttagctaacataagtattctgattgctacctgatggccattcttacttagtttcatagatgtgctttaactatgatcctttgaagctcaccccttggagagcctacagaacctcaggctgatagctttgaagactgccaaacagcccagaaggaagcaaagcatctgcataatcaggagggttgtataacaagtagtgatttggcaaatatgtgggtagctttaggctgaggcacgggcctcaggcaaaaatgcccttcgagtgaatccgaagggcatgatcttcctatgtccttgactaggcatgacgagtcatttgaggtcagatattatttgagttgttcagcacccccaaaggtaggcattctcctgggaaattttcatttccattttatcgccaaacaaaataaaaagcaaaacaaactttctaagctagaataatgaaattaagtcattttccactttgtatatattgatgctaataaaacagatgaaaaagaaaaaaaaatg

SEQ ID NO: 243254 - DNA, 2968 bp, Homo sapiens
cgcgcgtccgcccagggggctccggaagctgccccggcccgcggcctcctccctcgctcccgcttcccctttctcgctcaccgccgccctccttccccagctccctcgccgtccgcccgccccacagccagcggctccgcgccccctgcagccacgatgcccgcggcccggccgcccgccgcgggactccgcgggatctcgctgttcctcgctctgctcctggggagcccggcggcagcgctggagcgagatgctcttcccgagggagatgctagccctttgggtccttacctcctgccctcaggagccccggagagaggcagtcctggcaaagagcaccctgaagagagagtggtaacagcgccccccagttcctcacagtcggcggaagtgctgggcgagctggtgctggatgggaccgcaccctctgcacatcacgacatcccagccctgtcaccgctgcttccagaggaggcccgccccaagcacgccttgccccccaagaagaaactgccttcgctcaagcaggtgaactctgccaggaagcagctgaggcccaaggccacctccgcagccactgtccaaagggcagggtcccagccagcgtcccagggcctagatctcctctcctcctccacggagaagcctggcccaccgggggacccggaccccatcgtggcctccgaggaggcatcagaagtgcccctttggctggaccgaaaggagagtgcggtccctacaacacccgcacccctgcaaatctcccccttcacttcgcagccctatgtggcccacacactcccccagaggccagaacccggggagcctgggcctgacatggcccaggaggccccccaggaggacaccagccccatggccctgatggacaaaggtgagaatgagctgactgggtcagcctcagaggagagccaggagaccactacctccaccattatcaccaccacggtcatcaccaccgagcaggcaccagctctctgcagtgtgagcttctccaatcctgaggggtacattgactccagcgactacccactgctgcccctcaacaactttctggagtgcacatacaacgtgacagtctacactggctatggggtggagctccaggtgaagagtgtgaacctgtccgatggggaactgctctccatccgcggggtggacggccctaccctgaccgtcctggccaaccagacactcctggtggaggggcaggtaatccgaagccccaccaacaccatctccgtctacttccggaccttccaggacgacggccttgggaccttccagcttcactaccaggccttcatgctgagctgcaactttccccgccggcctgactctggggatgtcacggtgatggacctgcactcaggtggggtggcccactttcactgccacctgggctatgagctccagggcgctaagatgctgacatgcatcaatgcctccaagccgcactggagcagccaggagcccatctgctcagctccttgtggaggggcagtgcacaatgccaccatcggccgcgtcctctccccaagttaccctgaaaacacaaatgggagccaattctgcatctggacgattgaagctccagagggccagaagctgcacctgcactttgagaggctgttgctgcatgacaaggacaggatgacggttcacagcgggcagaccaacaagtcagctcttctctacgactcccttcaaaccgagagtgtcccttttgagggcctgctgagcgaaggcaacaccatccgcatcgagttcacgtccgaccaggcccgggcggcctccaccttcaacatccgatttgaagcgtttgagaaaggccactgctatgagccctacatccagaatgggaacttcactacatccgacccgacctataacattgggactatagtggagttcacctgcgaccccggccactccctggagcagggcccggccatcatcgaatgcatcaatgtgcgggacccatactggaatgacacagagcccctgtgcagagccatgtgtggtggggagctctctgctgtggctggggtggtattgtccccaaactggcccgagccctacgtggaaggtgaagattgtatctggaagatccacgtgggagaagagaaacggatcttcttagatatccagttcctgaatctgagcaacagtgacatcttgaccatctacgatggcgacgaggtcatgccccacatcttggggcagtaccttgggaacagtggcccccagaaactgtactcctccacgccagacttaaccatccagttccattcggaccctgctggcctcatctttggaaagggccagggatttatcatgaactacatagaggtatcaaggaatgactcctgctcggatttacccgagatccagaatggctggaaaaccacttctcacacggagttggtgcggggagccagaatcacctaccagtgtgaccccggctatgacatcgtggggagtgacaccctcacctgccagtgggacctcagctggagcagcgaccccccattttgtgagaaaattatgtactgcaccgaccccggagaggtggatcactcgacccgcttaatttcggatcctgtgctgctggtggggaccaccatccaatacacctgcaaccccggttttgtgcttgaagggagttctcttctgacctgctacagccgtgaaacagggactcccatctggacgtctcgcctgccccactgcgtttgtgagtcctgtttaatgaattgggcccccagtaggtagaagcagattcactttctcttgttcatgatggaaggctgggctgctaggaggccttctgcttttcgacaggggcttttattatcattactatgacaaaacagtacctaacactgattgggagcacacatactataacatttacagtaaatttatcacgcgttgctctaagtcttct

SEQ ID NO: 243255 - DNA, 515 bp, Homo sapiens
ccattataataaaataggaggccaggtgtggtggctaatgcctgtaatcccagcattttgggaggctgaggcaggaggattgcttgaggccaggagtttgagaccagcctaggcaaccatagcaagaccccatctctagaaaaaaattaaaaatcagctgggtgtgatggcagtgaggtgtgatcctgtcactgcacttcagcctgagcaacagagcaagatcctggctctaaaatacaagaaataaaatatgtaactttgttcagagatgtcttttaaaaattgtggcacatttactattttaatcactgttgaccgccttaatatgtgtcaaactgtcaatttaagtaggaactactagatctcagatctattctttttaaaaaagtgttacctattttattactgttaaaattttgatgtagtatgaaaaagccctgagtcatagttacagccatttgccacagaaattctaaatctcgtaattttaattccaaataaattgataattgtta

SEQ ID NO: 243256 - DNA, 379 bp, Homo sapiens
gagttgctggtctccggttcccaggctaggtggggatgctgtgagcctgcaatattgtcactcttgttttctgaagcatttcccaagagaaggccagaatgtttcaagattgataccctgcttggggaaagcgtgtagcctcctcggggtcagctttgaaaagagacagctgtctttgttgtattttgaaagtggtgttttcgcacttcatagtctcactctgcatttagtggtggcttacaattatttgtgattttatttaatagccactggcacacagtgcttattatgtgccaggcagcgatctaagcactttacaaaattaactcatttaaacctcatgatagcttatgaggtagatcccagtattatctgcatt

SEQ ID NO: 243257 - DNA, 346 bp, Homo sapiens
ctgaggttcagagaagttaagtgattagctcaagatcacacagctaattagaagagcccaaatccaaacctgacctgttcgtctctcagcaccgagctcctaccccaggcaacatgatctgaatgggggctgggtacccactggtatggactgaattgtgcctccaatacaaaataattgtatgttgaaaccataactcccaatgtgaccgcattcagaggtcaggcttttaggaaggtagttaaggttcaatgaggtcataagggggtgcccaaagcaatagaactgatgttcttataagcaaaggaagcctgggcaacacagtgagaccctctttctataacat

SEQ ID NO: 243258 - DNA, 516 bp, Homo sapiens
  misc_feature (306)..(306): n is a, c, g, or t
  misc_feature (334)..(334): n is a, c, g, or t
acattgacatcaaacaaggattactctgaatgtggcttgcagtggtgtcgtctctgctttggagggagagtggaaagtcctacgaccgttctcattggagaaccccttgggatccccgccccccattttattcctgaaatattctacaaagtggaggatttcctaatgttcagatgccttgaccccaaatcccccaggactttcgtggcccgccccatggctaatctgcttttctcggattgtcgcggtcccgtgatctctcccggacagtggccaccctccttccagagcaggcctcccagctgnaagtctcttcgagaggctcaggccatgngatctaggatcatggctcggtacagcgcggcattacaggccaggagatgcccacccgtctccgggggccgtttgacaaacatcggctacttccggacaagccactggtcctgccatcttggtttgttcatgcatattcagcaagagaactgcatattcatgagcaaccgcccttccccggga

SEQ ID NO: 243259 - DNA, 460 bp, Homo sapiens
atatcccagagcgctgctgtaagaataaaataatgtgtataaagcacttagtgtaatacctggcacatggtgggtgcacctgtcagtattgctgggggacctttccaaattgttttcattatttcagaattagtactatacatgttagataataagaaatatagacaagtggccgggcacagtggctcacacctgtaatccaagcactttgggaggccgaggcgggaggatcacctgaggtcaggagtttgagaccagcctggccaacatggtgaaaccccgtctctattaaaaatacaaaaattagccaggcatgatggtgggtgcctataatcccagctactcaggaggctgaggcagaagaatcacttgaacccgggaggcgtaggttgcggtgagccaagatcgtgtcattgcactccagcctaggcaacaaaagcgaaactccatctcaaaaaaa

SEQ ID NO: 243260 - DNA, 231 bp, Homo sapiens
attgagcccatggtagagtgatcaactgtcctagcttgcctgggactgggggatttcccaggatgtgagacttgcagtggtaaaactggggaagtcctcggtaaaccttgaagagttggccactgtgccaggggaatcacttgaacccgggaggcgtaggttgcggtgagccaagatcgtgtcattgcactccagcctaggcaacaaaagcgaaactccatctcaaaaaaa

SEQ ID NO: 243261 - DNA, 375 bp, Homo sapiens
agccaagatcgcgccattgcactccagcctgggcaacaagagcaaaattctgcaaaaagaaagaaagaaagcccacaaaatcaaacaaaaaaccaaaaataacagaggggaattgtaaagtcaatttggtaagtaaccaccagaattcaaaacaaaatgtcagggtgtatcatacatcatgataaatatgtttcatagattttgtttgtttgtttgagacagagcctttgtctgttgcccaggcaggagtgcagtggcgtgatcacagctcactgcagccttgaactcctgggttcaagtgctcttcccacctcaacctcccaagtagctgggactatagatgcatgctgctgagcctggcttattattattttt

SEQ ID NO: 243262 - DNA, 507 bp, Homo sapiens
ctcggcgcctctctcgtgccttttcctcttggctctacagcgggagtgggccccgggggaaccgggaccggccccggggttcgcgtcggggcggcgaggcttgggacgtggagcgcaatccccggggctccggactctacgtttccccttttggggcgcttccttcctggggaccgtcctcctccggctcttggctctgggcagtccgggggaagaggtcggggttctctggcgaggtcccctgccttcatcgggagggtttgcacggaaggggcccgggaagcccaggcgggccgaacgccgaccgagtcagtctacccgagcctggcggcgggggactggtgtgggctgcagctgtggtgattgatgtgccttcgacctgcacggcaaccacgtcaccatctcctggcgtctttgggcttaattttgtgcgggaatccactttggggtggaacgtttgctgctggagccgggggagatacctttattctgacacttaaaaaaaaa

SEQ ID NO: 243263 - DNA, 468 bp, Homo sapiens
taagcacttcatgtatattaactcaattgttcccacaacatgagatggatacctcatcattcccactttgcaggtgatataacagtaaatgcagcagaaaactgtaaactgttaagcagtttgtccaaggtcacccagccaaaagtgatggagttagaattcagatccactctgatacatacctctcatagatggccaccagcagcctgaggttcatatcaccctaaaaacaaacaaatgagcatatcctccacaatcatgtccagcacaaccatatccatcccccagaagggccctgaatgggccttgcccatccctgaaccagtcccctggggcggggtagggccactccggttgctctgattgagtctctcaccctcctctgtgatacaggtggggccttgtggttgacagccccagagattaggaaggagcacttgtagagagaaaaagatactaggcaggaaa

SEQ ID NO: 243264 - DNA, 370 bp, Homo sapiens
ccacttgtgaggacacaggttgcaggcccctgaagctgggcgtctgtattaattaagattctgggtttacaaatgagagaagccaagtcatgcttgttctgcaagaattacttcacggaacggttactgtggtgtatggaatctgagggagaggtgatcaagtgaggggttttggcctgtgccgcagactcagctgggatgagcccccaggcccctgtcctctcatctctgccctcctcagagtagcagctctgtcctctgccttcggatgtacactgaggattgagcagcccaggcaactcctgagttttccattttaagcttcagccaccagagagactcactgacacgctcttggtctcctaaatgc

SEQ ID NO: 243265 - DNA, 524 bp, Homo sapiens
gtgaagaatcacagttcattatttctaactatttcatctaagatttgaaaggaaaaaatcccttctatgaattacagttggccctccgtatccatgagttctgcacccacaaattcaactgacctcagatcaaaattatttgaaaaagcgtatttgaaaaaaatacaacaataaaaacactacaaatgtaaaaaaagtacaatataacaactatttacataacatttatatatattactatgtattataattaatctacagatgatttgaagtatgcaggggatgctaggttatatacaaattctacactgttttagatcagggatgtgaacacttgcagattttggggtccacaggggtcctggaattaattccctgtggatactgagagatgactggacatccattctgcatgctatatattttccttttaattattattgctgtttcggtttccctgaaaaatacaacatgttttaaacttctctatattataaatctcatttaaaaagtgttgaatcaat

SEQ ID NO: 243266 - DNA, 488 bp, Homo sapiens
agttgggggcaccaaccctctgcacagtcgaaaattcacaataactcttgactctccaaaagtttcattagtagtaacctactgttgacctagctgataacataagcaattcattaaggcttattttatatgttatgtgtattatgtactgtattcttaataaagtatgctagagaaaagaaaatgttactaagaaaatcataagagaaaatatatttactattcatcaagtgggagtggatcgtcattaatccacttcatcctcatcacttcacatcgagtaggctgaggaggaggaggaagaggaggggttggatttgccctctcaggagtggcagaagcagaaaatcctcatataggccaggcgtggtggttcacgcctgtaatccagcgctttgggaggccaaggtgggaagataatttgagctcaggagtttcagaccagcttgggcaacatagcaagacccccgtctctattgaaaaaaaaa

SEQ ID NO: 243267 - DNA, 506 bp, Homo sapiens
tagtaaataggaatttagcttcaattagaggtgtgtgtgtgtgtgtgtgtttcccactaccaggcacataataggtgttcagttattgattaaaagaaatgtctttaatttcttcagtcttctctgaaattggcagtgggtcagttgattctggcatcatatatgcagaaaatactcattctgtactgtctttgccagtcttttgaacctaaattattgttgagagttgattaaacaatatcacttggttgaaaagattgtttttaattcatcctttaatgcaggctcttcagttttcaagtactttttagactaccctggttctcttccaaattataagattattgatatgagaaagaattgtaaatgaacatcagccctgacacatttgttaatatttatttgcccctctggaacataggccagtaaatttttattattttatgtgattattatagtgaaaaggacccaaaccatcaaataaaaacattttaatagttacctga

SEQ ID NO: 243268 - DNA, 557 bp, Homo sapiens
acagctgatctcagtcccaggggcccattggctgggcaagtggggcaggaggtgggcaggactggggcaggctagggaaaggtcatttatggctgattaaatctttctctcctgtctcaatctcttgattacctttcctcttgcttcccctacttcatttttggtggggagtggggagggaagaagtccctactttttatttatatatatttaaatttgtattatcttaagagttattgttttttcccctttatttctcccacctgttctttctctcttcttctttctttcctctccttctcctctcctctcctcccctctcctttttcttttcttttctttttccctttcctttcctttccttttctcttctcttttctctctctctttctttctgtacctctctttcctttttctttttttttcttttttgagacagagtttcactctctcgcctaggctggagtgcagcagcatgatcttgacttactgcaatctctgcctgccgagttcaagcaattctcctgcctcagcctccctagtagctgggattacag

SEQ ID NO: 243269 - DNA, 513 bp, Homo sapiens
acagctgatctcagtcccaggggcccattggctgggcaagtggggcaggaggtgggcaggactggggcaggctagggaaaggtcatttatggctgattaaatctttctctcctgtctcaatctcttgattacctttcctcttgcttcccctacttcatttttggtggggagtggggagggaagaagtccctactttttatttatatatatttaaatttgtattatcttaagagttattgttttttcccctttatttctcccacctgttctttctctcttcttctttctttcctctccttctcctctcctctcctcccctctcctttttcttttcttttctttttccctttcctttcctttccttttctcttctcttttctctctctctttctttctgtacctctctttcctttttctttttttttcttttttgagacaggaggattgcttgaagccaggagtttggaaccagcccggtcaacatagcaagactccatctctaccaaaaaaaaa

SEQ ID NO: 243270 - DNA, 450 bp, Homo sapiens
catgaagcatgcccacttgcagaagccctcagggatttaggaacctgccttctgtcccattagatgctattagggtgaatccgaaggatgtgagagtgagtgggctaagtagctaagctatttagagtgagtgagttaaatagctaagcagtactccattgccattctcttccctctctactcacacccctgcctgggcttctcacagctctgagaagctctggagtactccttttcctcctcacttgagactatctcaagaaatcatggtgtagagacactagcagcgtaatctgtggactcttacattgtcttggtgtttttttccttattaattccatggccacagttttctcacctgtagcatggcggatgatactgccttcttcataagattagtcctttgaattttttagaatttgcatttcatagatgcaacaacaggaccca

SEQ ID NO: 243271 - DNA, 200 bp, Homo sapiens
ttaatcatatcgtcgggaaaatgtactgaagcactacttcctgtggtattttttttacaaaatgataacatagtttattgcctataggttgattatgacctaaaattatatttttgcattttattgtgccattatatattttaaaatgtgaggttcacatggttgcatttgctctgtgaataaaaatgtctaaaatcata

SEQ ID NO: 243272 - DNA, 526 bp, Homo sapiens
ctcctcaaactttccactccccagtctcaactgtaatcgcctgtcagtgggagtgggaaaagggaaggatggggaggaaatgaagaaaacacaagcaagactcctcttctgaagctgttgaagtaacttcttatcgaacactctaccctagggctgccagttggcagttggaagaaaaggaaaagcgaagggtaaaaagatgacaaggttatcagtccagagatagagtgaagatataaaaaggctactcagtggtagtagtgactctgcgctacctcctaggcagcccagtcccacagagacccagcagttggccagaaggactgtgtattggcagctttcacaaaagtggacttcgtcaagtctgaagagtcttcaagtgtgaaacttggtgcacaagcatttgtatcacaccatttcaacactattcctaatatcataaagctgttcaatgtccaaaaactggtgacttacaatgcacttaaaaggcactcattaataaaagtatcttcaaaaaccacataaa

SEQ ID NO: 243273 - DNA, 288 bp, Homo sapiens
cattgtgtcttcatatggcctttcctctttgcaggtatggagagaaggacacagaccactggagtctctttgtttgctaagggtaccagtcttattggattagtaccctacccttctgacctcatttaacctcaactacctccctagcggccctatatccaagtacagtgacattgggggctaggtttcaacgaatgaatgaatttggggagggatacaattcagttcgtaacaataaccaatggcgagtgagaaaagtgtctctttataaaattattccagttaaaa

SEQ ID NO: 243274 - DNA, 441 bp, Homo sapiens
ataataaaaactcacaaaaaaacacaaccacaaccttgcacaaaggccatcacagccttacacagaaaatactggcagtaagtgcctctccatcctgagactggcatcacccttgttactgattttgtggccaatcttatttcaaaacaattatgtaatccttctcatttttttctttaaaaacctctgtctttcctttacgtctcggagaacacacatagtttactttggcatgtacattctcattgcagtgcattatttccatataaacatcttttattttagagagcctctctgttacttaggttgacaggtcctgttttattttaagtctagtatctgttagttatttttcctgatcttcttactcctcccaccctctaccctccagtaggccccagtgtatggacagatagtgttctaaggaaataaagccaaatt

SEQ ID NO: 243275 - DNA, 416 bp, Homo sapiens
tattataacaaatgtaggcagtatgggtcaaatgtagctgtgttataaccataaattcaataaatacactttgaaataatttcattaaatatcaaactgcaataactgtacagactgagaaagtacattataaaagaatatgtttaagcatgaattaatgctcaaacttttaagcttttatatttctaaaaaggagcttggcaatcatttttcaatttagtaacagattggtattggaataaattagaactaactagcaaagaaatgactaaagaagagacaagaagtttcttttctgtgcatttacttattgaatgctcctattagccattctgaccatgctgtattgatagcagttgtctcgctccaattgtgaaatatccatattagagcaatgaataccaattgaatatcaa

SEQ ID NO: 243276 - DNA, 462 bp, Homo sapiens
gagaatatccatgaaatgtgggacagttacaaaaggtgtaacatatgcataatggaaattccagaaggagaagaaagagagaaagaaataaaagaaatatctgaaacaataataattgagaattcccccaaatgaatgtcagataccaaaccacagatccagagagctcagagaacaccgaaaagaataaacacacgcacaaaaaaacgcaaaaatctacacctaagcttataatttttaaactacagaaaatcacaagtaaagggaaaaatcataaaagaagccagaaggaaaaaacaccttacctataaaaaaacaaagataagaattacatgcaacttctcctcagaaaatgtgtagtatatactccacaagtaggttcttgccaagaattgaatttactctaaaatgcaacactttgcttaagtgttgtttgtccagcagatgtcagccttgcacaag

SEQ ID NO: 243277 - DNA, 342 bp, Homo sapiens
gtgctgggttctcaggacatatgcaatgaatccagtataacatccctacttccttgagccttccgaccttttcttcaatatgatatcaaggaagttctgtcatctccacttcatttgatgtggaacattatcagatcaatgcttcaagaagtcatctcattaagttattaggaattctgaatcatggggtctcactatgttgacaaggctggtcttgaactcctggactcaagcaatcctgctgcctcagcctctgaaagtgccgagattacagatcctgacttttcttcttataatgactaataaaaccagtttgccaggctctgtgccaagtgctttaaa

SEQ ID NO: 243278 - DNA, 532 bp, Homo sapiens
gaaagagctatggtctgtgactcgaattcggtgcccccccagcggctactgacattatcaatctgagggaaagggcatgaagcaggtcagaagacacaaagctggaaagggcagccccaaaccagggcaggctggcatggaatccaaaggcagagaaaacatcagggaaaaggaaggtcctgactccctgatggagctctgaaagattcctggacgtggcattgtcacatgtgcagcagtaaagggtgttcactgtgcaagggcagtgggctaaggggcaagcgtgcatggaatccagcctacaggccactccccaaactctggcatggagctacatccacttggagaaaggggaccgttttccttttcacgcaaaggtggcttaagggctagtggtggcccgggaagtgtgctgagaatgggtggatttcactaagcaaagacatggcaagcaatgtcttggacagccgatgctgcccagacaaaggcctggttgtcgggcatgagctgaggtgtgacaaggagatagaag

SEQ ID NO: 243279 - DNA, 551 bp, Homo sapiens
gtgctgtacctcctgaaggaacaacattagtggctaaacacagtttggagaaaagggacttcactaaaataatccagtcgtttactacataaataagcacattataataagctccagagaaggggggaccagcaaccagagttactacaatatatgattttcaatatctagttttaaaccaaaaattacaaagcacaaggaaacaggaaagtacaacccaaacagcagaaaaaaagcagacaacagaaattgacagtaagaggaaccagatgttgcatttatcagaaaagactttaaagtagccattatgaacctgttcagagaactaaaaggagccatgattaaagaagtaattgaaggtaggatgacaatgtcacatcaagtaagacaatatcaacaaaaaaattgagattattaaaggagccaaatggaaattatggagttgaaaagcacaataaccaaaaaattcaccaaagggctcaacaataggtttgaactgacagaggaaagaataacagactaatagagattagacacactgaaaaacagag

SEQ ID NO: 243280 - DNA, 437 bp, Homo sapiens
agtaaccttgtcctagaccttgggggagtagtccatggcttgagtccaggtattacccatttctctttgttcccacagctaagcgagggccactcaaatgtcagtttttgataacagttcatccaacattttatatgcagctattttaatggaatttactcaaagctcatgacaggtttttgttggggaaaaaaaatgattgtcttctatttccatttccctccacctaggcaccctgtcctttcgaagtttttaaatcatttccctaagattcatatccttattctctgagaagtattaaatatattaagttatccagcgtgcattatgttatatatttgtgtgatcttggtcataggtaataaaaccacattttggagatgatcataaagttggtctttgctttttgttttatatttactttcacctaaatgcaa

SEQ ID NO: 243281 - DNA, 211 bp, Homo sapiens
gaggagggattcgagaagtggacaattgtattgtgcccttgattaggaagcagaaatagaattagaaatagaattctaattaatagaattagaatagaaatagaaagggtgccctagtatggagtactgcagacataagttgctggggagagggagctaaacgctccgttggtgtacaagcaaggtttaaattaaaatcctctgtgcgtat

SEQ ID NO: 243282 - DNA, 886 bp, Homo sapiens
  misc_feature (790)..(790): n is a, c, g, or t
  misc_feature (799)..(800): n is a, c, g, or t
  misc_feature (834)..(834): n is a, c, g, or t
  misc_feature (849)..(849): n is a, c, g, or t
aacccagttatttctgactgggaaacataaaaatctcaaccattaaactgtatatccatgtattgagcacccactatacacaaagcactatgctagacaatgaatcccttgcctaactggtccttaaactcttcaggatcacaggtactttgaaaacactgatgaaagctatgcatgctcttttcaaaaaatgtacccaatgcacaaaccttggcataccttttcagtggattcaagaaatttctgaacccatctcatcttaagaactcctactttaaagaattgcacagaattcagttggtgaagaagatatgatagaagaagaaatgtagccagcaatgacttggccttcaagttgcagcaaagttcctcccacaggaaaaggggaggtggtcatgatttattctacaagtacttattgggtgcctcccttgtgaggccctgggaatacaacaggagattgtacaaagtccagtcttcatggagaatactgcccaggaaaggatgtaggtaagtgagcaggcatttgatttggagtcctcattctgcatttttgtattctttgatgcttctaagagtatccgaaaaactagctaattcgatattgggtgtttatagtaaagatattgctattgcataatttctgtccccatgtgtgaagttgaagatataatgaacatttctgttaacaaaaatattttccctattccctttggtgaaaaggaagcaaatacacctgttctttcaaacaccgttccaaccattctttttcttttccaaaaaattgggntatttaaanngggaatggaaaatggtcctttttttgggggcccnggcccgctttcttcnaaaaaatttttttaaaaaccacccccctttttttttg

SEQ ID NO: 243283 - DNA, 256 bp, Homo sapiens
acatgtattgtcaaagctaattgttttaaacaaggtgttttatctttgattaaagtgatcaatgcctataagtataaaagaaatgatagtagagtttcatggtctctttcataacacagtcccatacttaacactttgatgtgctgacactgataatgaagatacaaggcctgacttaagcaatagttagccttcaaaatagaaaggtgaatggtacattcatttctgaaattcctgaggtttttccttgctctac

SEQ ID NO: 243284 - DNA, 517 bp, Homo sapiens
aagtggcaagattgattggaaatattgataatgaggtttatggaatatatcatattgttgctgttatactaccacttatactttttgtttttcccaattggtttcttatagagtttgatgctatttcctcaaattcatttgcttgtattattttacataaagatacatatggaactttataaactatattgtatatatattatgtgtatatatatttttatttatgcgtgtatatgaacatatgtgtgtgtgggtgtgtgtgtgtgtgtttgtatgtatttaaagaatgagggaggctcaaagaaatcttgagaaatccagtccttgattccaggcatattctttcaggaatgaaaatattctatccattttcctcttctaaatgtccagatatatttaatcacatagttttgccttaaattcccaaaacaaataaaatgattaggtaaaatcacattagctttaagtgccattttataaggaggttttaaaacatgttatgcattgaaaaaaaaga

SEQ ID NO: 243285 - DNA, 554 bp, Homo sapiens
atctccctgcagaagaaaacccagggcccagagctaggctttttccaagtgagatctcctaagaccccttcatcctccttgccccttaagatggcccattgcctctttagcctttggaccaaataatagctgctcacattgcaaccccatattctgataattgcagggaagcagattcttactcaaattcaccattcacatctccatcattaaatcaacctttttatgttatatttgcaaagaagtggcttcaaacagatctggaaacacaagcccccagtgagcgagcactcacacagctctgcccagtacctgaatttatgtacaccttgtatatctgtgtgcacagatatattcacacactcacacaaatgcaaagacatctgaagtcattcaaatgtatatttatgtacccctttatgcatatatttttgtgtttttatatctatatccatttgagtgagagctagagaaatgtacacagcaatgcaatatttagcctacattccactttccctcctaatgtaaatgtcttaaaaaaaagttggcggccg

SEQ ID NO: 243286 - DNA, 362 bp, Homo sapiens
cagaagaattatctgagacccaagaagatttgctaagcaaataaaatgacaaaatgctaagcaaataagatacaaacccaaacattgtggaaaataataatttgtgggattttaaaagaaatgactgaaatactgtacaaagtagaacgtatatttaagagtgggatgatcagatcttaggttttcaaaagcccttttattatgcaggagaagagagttataatacattgtttagactttgttaaatttttacagtaaaatttaagggtatcattaaaagaatacacaaatctaaaacctgtgaggataaaataatgaagtaagaagaggatgagccaaaaaaaatcaatacaagaaaatgc

SEQ ID NO: 243287 - DNA, 512 bp, Homo sapiens
ggtggtccgagatccgaggcaacggtggctcctcgaggtccacggtcccggccggtgaactcgataccttgcaagcctgtagccccagctcacacgcctctgggcgtccgcctggatctgtctggtgaatggaactaggatggcctgtgagcccacagaacgtctagaaaagtcagctttacattgggaccaacagaaaattacagggaattatctacatcatccacaggcatcccatttacttaaaaataatcatttttattttgtgacacttaatacggagaatattgtaaatactgtacacccatcaccctaaattgactactggcattatgatttatttgcttattttttaaaagctagataatacaataaaagttaaacttacctgttttttctactctcaagcctattaccctctcatcctctccagaagcaactattatgaattagaattagcttgtgttctcccagtccatttttaataattatatgtagccatgactatatag

SEQ ID NO: 243288 - DNA, 594 bp, Homo sapiens
gttacaccatgttggccaggatggtctcaatcccttgacctcgtgatccacctgccttggcctcccaaaatgctgggattacaggcgttagctaccatgcccggcctgagttatacttttttagtattggagaaaaaaatctttgaagctagaatcttgcactcatccggattggcatttaaatatgaaaagtgcaatagaaataatctcagccgtataaaacctcagaaaggttgccacacaaagaccctattgaaaatattggctacaataatagtaggagactttaataccacattctcaatggcaaatattacaagtagacagaaaataaataaataacacaaacaacactgtagacaaattggactaacagacatatagagaatactatgcccaacaacagcagaatatatatttttctcaactgcacagggagcattctccagggtagaccatatgttaggtcacaaaacaagcctgaataaattttaaaagattgaaatcatactgtgtatctttcccaatcaaaatggaatgaaactagaaatcaacagcagaagaaaaaaataaaaattcacaaattgtggaaag

SEQ ID NO: 243289 - DNA, 609 bp, Homo sapiens
gttgctttcccagtccacgttacagcctgttacccgacggccttgacagaccaaactcttccttcacactggacagtttaggacaagctcatacgtcttccagcctctccaggtcaaagctcctgcctcacactggcctctataggcccaggtgctgaatcgcaatggtctgtttaggtccatctcatgcctttctcagactctccaagcgacgatctggcctgacacttgcttctgtgggccatgtgatcactcacactggcctctttaggatcaggggatgcctctccacaggccgagatcctgcctgttgtaggccccttcaggatgcgccgctgcctgacagtggaccctccaggcctagatgttacgtgatcatggcctctgcaggtcaagaatttaaattttcgcagcctctataggccaggctactgcctcctgataatggcttctgcaggcccaaatcgtcctgaaataagcctcgccaggaacagcacgtgtgttggatgcccgaacaaccatagcttctcccgcacagtggcccatgggggccgggctcttgcctcagcctggccacctcaggcccagttcttgcctgttggcggccgc

SEQ ID NO: 243290 - DNA, 483 bp, Homo sapiens
cctgctcagtcaaggccatgatgggcccagactgtctgcaagctggccgcagctctttaggccatacctggagcaaatcaggagactttcctatctggattctcctgcagtggctctgttatactgagaagcttctgttgtcatgtcacctgcctgtagtcctgtccctttcaagcctgggagggagggggcagctcttgtcccttagggctgaacatgcctctgagcccctgccaaccctccatctcatcttcttctttcttcttttggaggagacacaacacttcctgtggtgctttattgcagtggactctaggtgctgactttccatatttatacaaaagagtctaaaatcagaaacactaaaaccaattagaaataccttttttgatctcttaagcttgctaacaaaagccagggcctctgagattaaagacaaaataaagcaatatattcaacatttgtcctaagctgtctccacta

SEQ ID NO: 243291 - DNA, 370 bp, Homo sapiens
ggagaatagtacttgacctacttatttcaccaagttgttgtgcagcttcacgagagaggaaactttttcacagctaaatgtttagggcttggaacacagaaggaacacatttttaccgaatgaatggaatcatataacacattcaaaaggccttggtaaatggcaaagcattatgcaaacattagtcactaccgttatccgttatcatttttaactggtctactctattggtgccacttgtgcctttcataagctatgtcactgccaacacacttccggttaattgtaccagaaactgctgacttcctattggaagattcctcatatttcctgataaagacagtaaagggctgccagcttgccgaagaga

SEQ ID NO: 243292 - DNA, 783 bp, Homo sapiens
caaaagatccctgagtatagggctatttagttttttttttagtatctgaaggaaatgagcctggctcaggaagaggggttcagaagcgtttcattccgctctcattcctgggactccaccaaaaacaaccaccaaaaagataaaatattgttttaattgctgaagcaaggaaactagcaaatgtctccaaacaataaattattaattatatctgccaaatgctgtcttgatggagatgtgagaaccaggtgggagaccgcatttactgcctccggtatctggaagggtgaggatttccctaggggaagtgtccttgtcccaaagttgatacccagggattctctgagtggagtggcagtgtctggcatcatctacaagctacaagagaggtggacatacattgtagagaacaagttcatgtggaatggagaagagtggctttaggagtaatgatggtaatacatatttttagatatccagataatgaataaatgacaatatagcataaagataaaaaataagattgtacaatattgaaggagaacaaagttggagatgctacctgattttaagacttactatcaagctacaataatcaagactgcatggtactagggaagaaagagacaaatggatccatggaacagaatagagggcccggaaatagacctacaaaaataatagcctgctgatctttgacaacggagcaaaagcaataaaatggaggaaaaaaaagtcttttcaacaaatacagctggaacaactgaacatgcacatgcaaga

SEQ ID NO: 243293 - DNA, 474 bp, Homo sapiens
actgcacgttgagggcaaggccatctcggactgcagaccctcacggccttcccacactttgtcctcacttgcaacgggggcttcgcgtgggcctcccctttctaaagcacccactatggatgcacagcaggacagacccaagtcccaagactgcctaggcctagtggcccccctagcatctgctgcagaggtctcctctacagctcccgtgtctgggaagaagcacagaccaccaggacccctgttctcctcctcagatccccttcctgccacctcttcccactccggggactcagcccaggacacctcgctgattcctgcccccctcacacctgcaagcagggatgccggcgtgagaagaatgttttgtgttcgaaattgtttgaggggtttgggtttatttttgttggttttttcttttttgtttttgcttacatgggcatccttcagcttttaataatctgaaaagctcta

SEQ ID NO: 243294 - DNA, 438 bp, Homo sapiens
ttttctgtgcttttcgctggtatgataaaaataattacactggtactctggtgaagatgagaagcatggattagccattatctgtgtctgattaatttttaaattccattaattacttattaatgcaatttggaagaaaaatctttcatcccatgatatgggcagaggagggagaaataataaaaggctgggattcccttgtttgtgaaaaggttggaaaataccacccaagtggacattggaatgtagaatgtgagcacgatgctgggcaggtgcactgtagcacatgatgtgccctgaaccagtggaaagggaccgtgtgatgctgtgcattctctgaacctgtatcctcttgaaaccaacaaacagaaggcatttttgttgtggagccctctgtacaatgtacagcaaaataactcagaaccagagatgttgctc

SEQ ID NO: 243295 - DNA, 376 bp, Homo sapiens
acataaatcgctgggcagagccgcctctcctgtcccttctcattttttgtttacttacgagcagctgagcagcccaagctttcccctacaccgacaggcacgtccaagcctcttcccccttccctcgggggcctggagcacctgcttgaagagtcagcctccctttgagaatagtttaacatatgaatttgaaactagttgaagaagaaactcaatccctgaatcattagcctaagtatctggcatgacagaatgggtctgttctagcagtgagaaatgaccttgactgtccttggatggtaagggcagaaaattgaaaataaaactcttttgatttttaaaaatataataaagtcctcaaaatagctatatcctt

SEQ ID NO: 243296 - DNA, 407 bp, Homo sapiens
caatttaaaggattcttaaataaacatttagaggaagaagaaaaaggtttctgactacttggggaagatgatgcagttgttaggtaacagaaaactgatctgtattttgtttttgttgtttgtttgtttcgctttctaataagaggataggtctgcctataagaaagagtagaacaaataatgtaattatgaaattgaagttcaaattagatgagaaaaataaaaaaattcctcatcgatttaagtgaattcaggtttcaggtgcagaagttgacagcccagagtacacttataagtatgtgagtatgattataaaagcacagttgatcatctttgagaactaatgggagaaatgaaaattggttatagatggatacatattccacttttgtataaaggatctaact

SEQ ID NO: 243297 - DNA, 171 bp, Homo sapiens
ataactacagtacagtataaaaatgaggaaagtcaatgaaatgttaaactaagaggtaaaaatcattggaaatgagaagacagtttgtaggtagtatgacttctagtttgacaaccgtaagaaaatcaataaaatatttaaaataaatgagacttaaggttgccatacaaa

SEQ ID NO: 243298 - DNA, 688 bp, Homo sapiens
gcttctccatcagcacttgctattccataaaataaaagtttgcactttgtctttccttaaatgtcatgaaccaacctctgctagctttcaacttttcttctgtagcttcctctcctccctcagcttcacaaaattgaagagagggagggacttgctctgaattaggctttggcttaaggaaatgttgtggctggtttgatcttctatccagagtactcagactttctccatgtcagcaataaagctgttttgcttttttatcattaatgtgttcacttgagtaatacttttaatgtccctcaggaatttttccttttaattcacaacttggccagctagcacaacttttgccctagctcgactttttacatgtctttttcacaaagcttaatcatttctaggttttatgtgaagtgagagacatgcaagtcttcctttcacttgaacacctagaggccactatagagttatttattagttggcctaatttcaatattgtcaatgcctcagggaataggaaggtctgaggagagggagagagactggggaatggctggtcaatagagcagtcacagcatacacaacgttgattgattgattgattgattgattgattgattgcaagtataaccaaaagacgacacagaaacatgaagcaagtgcatgctgttggaaaaatggtgccaat

SEQ ID NO: 243299 - DNA, 586 bp, Homo sapiens
gtagagacaggcactccctatgttgcctaggctggtcttgaattcctgggctaaagcaatcctcccaactcgggcgcccaaagtgctgagattataggcatgagtcactgtgcccagccacttttaacttttcaatatatattcactaaatactgcatgctagtaatctaatagcagaatcttacgtactaaaaacttatggaaaatatggcttattgtttctttgagttgtaagaatattcctattatttaattccagcagcagatatcatctttggttaagggttctctgagaatgcactttgaaaacaactagtgtagaaaatctctcaagtccttcccaccaacaaaaggattcacgaaacgagctctagaaaatacttataaaacttctatctctccattaagtccacaagcatatgtttttgaaaagtttgttagaagtataaaaagcatgaaagtataaaagatacaaacatactggattttttaaaagagggtttacactctttttcgataaattaattttataatgtctataataaaagattcaaatggatgattacgtttgcactaaaatcttcca

SEQ ID NO: 243300 - DNA, 379 bp, Homo sapiens
gcatttggttatagtcacttactggtctttattttctattttatttatttagctatttttttgcacaagactgtggtattagttatacatttgacatctttgatgtatattttattggaaacattttctcacaccattaaaaaattatcaaagtactgcatgatctcacttatatgtggaatttgtaagagttgatctcatagaagtagtgagtagcatcatggttaccagaggcttgagtggtcaggggagatgagggacggggagatattggtcaaagaatatataattacagttaggaagaatgtctgaaaatatccataagaggcaaatacatagaggtggaaagtaggggtgattgcccagggtggggagaaga

SEQ ID NO: 243301 - DNA, 582 bp, Homo sapiens
tttgagacggaatcttgctctgtccccaggttggagtgcagtggcgagatcttggctcagtgcaagctccccctcctgggttcacgtcattctcctgcctcagcctccagagtaactgggactacaggcacccgacaccatgcccggctaattttttgtatttttagtagagacagggtttcactctgttagccaggatggtctcgatctcctgacctcgtgatcttcccacctcggcctcccaaagtgttgggattacaggcgtgggccactgcgcccggccgaagctgtgtgtttttaagatgaaaaaaccagacacacagttgacgtcaactctttctgggaattactctcttgaagcccagaatgtgttttcatattagatctaaacaaattataggttcaaaatattaaatgtttacatacacaagagaacagaagcactcaaccaactctcactagtgatttgtcggagcacaagccgctctctgttcccccagtaaaacacactgctggcgcccacagccagggggctctctggcagtcctgtaactcttctactcccactggattaattgaatt

SEQ ID NO: 243302 - DNA, 441 bp, Homo sapiens
tgtgtttccatagcaacaagggcagctatatggagccattactcttctctgtggcttcagaggtcaggggccgtgttgtaggacattggatatgctttcagattaaggccttgggaatgagctttaagcagaagcaacatgttgcagaaacaatttggggcattggttgaatgatgcatttgatcattcgactgatcaaagtaaccaggacccatttacccatggaggagctgagtttggggtccagcccttctggaaacatccatgccatgcgtggtctccagaatgactcctgatctttgtcttgaccccaaatgacttcatcacttctgttccatgtacacacatgaagagccaaactcaagcacaagagtgtcgcaagtttgctttgctccaggacttagtgtaaagtttattctacaagggctgcattcctcttaa

SEQ ID NO: 243303 - DNA, 984 bp, Homo sapiens
ccacaattaaatttttcagatacatgaattatatttcatttataactaaaacgactaaccaaaccaaaaagacaatttctaaaatgtgtatttctattacttggtttctctaaagagagtaatggaccttatttacagcagattattaatgacttaaggccatgattccaaacatcagttaatgggctacacctgtggagtataatgaaccccctccgggtttttttttttttttttttttttttttttggtggtgggggttgggctttgggaattctgaaggctcattgccttgatagttgagactgtcaaattgtgtcttttattacgttgttttgtaattgctaatcttcctatgactaaatagtaccttaaaagcaaggattatgcctgattcttctctattccccacttttctgttggtgcttagaacaatgccagtaaaagttccgtaaatatttggttgatttctaaagatagcacaattctcttaacgttggctaaaaccacattagcttttttttgttttttgtttgtttgtttttttggcagacatctgtgttactcaggttgggcttagtgtcagaactcttttctttttcacatgaattgctgttttgccccaattggtgcttttttggactgttacctgaattgaagtaggtatttacatttatccctaagacttcacaaaagctaccactgtcacttttccccccataggaaatttcttagaaatgctgcctaattaggttaattttagcccattgtgctaatctgtcacaggttttttggggatcttgattcactattccaaaatatgcactgccttctttaatgtcaaatttggaaaaccttattttcctctagtttaagatggtaatacaaattaaaatattgtatagaaaatgtccaaggaaggtcagagctgtaaaggctgaatctcaacgctctcctccaggttgataatctatagatcatcag

SEQ ID NO: 243304 - DNA, 616 bp, Homo sapiens
gttttcactccatcagctaccaatgttaatacttccttgtacatctttccagaggtactttattatgtttataggtaataaaactgattaaacgtggagaacattacatatggactttaagttcactacagatatactcagaaaaggaaaaatggtccttattttaggtgccatattgtctgtgagaaacaaaatacagcaaaatgtgtcttttatttaaatacatcatatgcagacatttaagaagctcttttttcattactttgtagtatttttaaagctaggtacaaggaattttctggaccaaagttaccagggacctttgccccacagcatccaaccgcgatgaagtgcagaactcttgctgatagaacacctactattcccttgctccaggctttataatggcttctcctgatcttaagggacccttaaggcttggccgggcaaggtggctcccacccataattccaatactttgggaggccaaggcaggaggattgcttgaggtcaggagtttcagtccagcctgggcaacatagtgagatccctgtctctacaaaaaatttaaaaattagctgggcatagtggtgcatgcctgtagtcccagttactc

SEQ ID NO: 243305 - DNA, 402 bp, Homo sapiens
gacatgaatcaaataactgcagacaatatgaccacctccttctttcagttttggagtcatggattagtgattatatacagggctcaacataacccatcaaccatataaacaagaatctagtactccttcaggccagaagcctctctggcttataaaaccttagcaagctgagagataacccacaaatttatatgggaagataaccataatagtgtttgaaatgaaataactgctttcttagtggtaaggatattttaaccccaagaagataaagttaaaaaaaactaaagaaaggcacatgttattaatatatttctttatgaatgtatatgtaaatattttctctgggtaaaaaaacttccctaaagaagattaaaaacacttatatataacaggaaaaca

SEQ ID NO: 243306 - DNA, 247 bp, Homo sapiens
ccagcagtttcctctgcctggaacactttccgcagcgctggattacaactgctggtctccctgcctgccttccctgcttcccagagcacgaagaagcttgcctccgcaacccactatttgtgtgaccttggtccaggaactggactgggctctcctcctgaaagtgggtaaataatgtcaccgacctaatgaggctgttgaggcatggaatctgatcaggcagataaagtgcccctggcaaacctca

SEQ ID NO: 243307 - DNA, 475 bp, Homo sapiens
ggtctcactatgtttcccaggctggtcatgaactcttgggctgaagtgatcctcctgcctcagcctcccaaagtgttaggattacaggtgtgagctactgtgcccagctggctttcatctttagatattatttctttgggcttgaaggcttttataaaatagacctctctctacaagaggtaaatcttatgtctcactcagcagatggttgaactctaggtcagctactgaggaggaaatagaagaaggagtgtccctaacacattaatcccataaatatctagtgagcatctactatgtgttaggcacaggggcatggacatgaacaagacccagtcactgccctcaaggcttttaatctaatgaaggaccaaggctaggaaacaggtgattacaagtcccatgtgatgtatgctaatccaggaaggaattatgggagcacagaggagggacactgaactaagactcagagcat

SEQ ID NO: 243308 - DNA, 628 bp, Homo sapiens
atcacttctttacttcttttatttcacttctggctttctgtcctcccacgctgaggaagactgatttggtggacatgtatttattctgctgagtaccagttgatgtggaagtagttgttttatagtcaacatgtttttatgactaatgatctgtcttatgacagtttcacctataagaggaaatatacttatgtctaggtggactccaatgtgtctgtttactgatacttatttattcattattttcaagtaaaatgtagaagtgaataacttaagagaataactatttttatgagagaaaaatacccactttcttttttattactttgttcctctagaggttcatgaataatatattgaacatgtgaggagtgaggcctgtctagctcttttcctaacatcttccactcctgtggcctcttattaggtacctttctcagtgaagatatacaataagaattttgcatgcttattgggaatttatctgtgaaaaatcactcaaatgtcattaagtcttttctgataaaccttaatcatccaacaaccagagtttttatggcagtcaaggatcctggttccaagtatgagctctgaagaagatagactatgttcaccgcttactatagct

SEQ ID NO: 243309 - DNA, 574 bp, Homo sapiens
atcacttctttacttcttttatttcacttctggctttctgtcctcccacgctgaggaagactgatttggtggacatgtatttattctgctgagtaccagttgatgtggaagtagttgttttatagtcaacatgtttttatgactaatgatctgtcttatgacagtttcacctataagaggaaatatacttatgtctaggtggactccaatgtgtctgtttactgatacttatttattcattattttcaagtaaaatgtagaagtgaataacttaagagaataactatttttatgagagaatattgaacatgtgaggagtgaggcctgtctagctcttttcctaacatcttccactcctgtggcctcttattaggtacctttctcagtgaagatatacaataagaattttgcatgcttattgggaatttatctgtgaaaaatcactcaaatgtcattaagtcttttctgataaaccttaatcatccaacaaccagagtttttatggcagtcaaggatcctggttccaagtatgagctctgaagaagatagactatgttcaccgcttactatagct

SEQ ID NO: 243310 - DNA, 705 bp, Homo sapiens
tggggaacaacattgtcttcaaagacattttttctatcaacccaataaaattcaaaatgagaaaaaaagttgcattcactgttacgatttccctctactaccagataaaattccttattcattcattattttatgacatttaaataagttaaactagaaaatgacttttaaaaaaaaacagtattaatccatgctagggatgacacttgcttttagtgacagatgtatgtttcgttgagaaaatgaaggatattgaaaccatgttagaatacctcagataaagtgttcaccacagatgctttgtcagcctttcagactggctgaaatgaatctttcagaaaagaagccaaagaagatatttttaaaaattctgtaggtgacacaactgaagcgagaggttaggtcatttttaatgacctaactaggtaggaccatagagaaattgggggcacttactctgaactattcacagtgcttacaaggcagagatctgaaattgtgaaggacttcaactgctctgtgttgaatgcttttattatgtttggtttatgtagtttgtttcatctcccaacttgagatcagataaagtcatttatattttgtcatattttcttccagctttattgaggtataattgacaaagttatatatatttaaagtatgaataccacatttggggaatgaacctgtccatcacctcacgta

SEQ ID NO: 243311 - DNA, 425 bp, Homo sapiens
attttgtatcaagtgccaaaccttaaaaatagagagatttcaagtgctctctttttctggtttctcttgaaaaaacttgggggtgggcaatggggagggaaacatggcaggtgctgttagcccaagaaaatcagaaaaagaagtcatggtggctcacatctgtaatcccaacactttgggaggccaaggtggtaggatcatttgaggccaggagtttgagactagcctgagcagcatagggagaccccatctctacaaaaactttcaaaaaattagccaggtgtggtggccacatagctgcagtcctagctactcaggaggatgaggcaggaggatcgcttgagcccaggagtttgaaattacaatgagctatgatggcgccactacactccagtctggacaacagcaatacagtatgaccctgt

SEQ ID NO: 243312 - DNA, 398 bp, Homo sapiens
gtgatgctgatgacctggacagccaatcatcccccacatctgctttgtagtgttcctgtacggatgatataatatattggtgatctatagtttagtatcatagcaggatcacaaggaaagttacattggaaaggtaaattttaaactttgacgttggttttgcttgcattttttggtggactccagacgttgaatgcctgacatattctccagcatgattctctaccaaatcacttttgcaaatgttgaacttcaagaattttacctctaaaaaaacaaatacatttcactgaagtaaaaacgtattctagccaccaccacctaaaaatagttatttgaagttcttgctaagtagttctgaactaagtgaatcctcggagtagaaatacttaacttta

SEQ ID NO: 243313 - DNA, 402 bp, Homo sapiens
ctcagctactcaggaggctgagacaggagaattgcttgaacccagaagactgcggttgcggttagtggagatcgtgccgctgcactccagcctgggcgacagagcgagactccgtctcaaagaaacaaaaaaaacaaaaactgagtatccatgagccacgggaaccccctctctgtttacttatcattcatccattctgctgctttctcttggacacctgctacgtaccaggcctgctatgtaccaggccgcctgtgcgggctcaggacagaagatgagttagcacaatggcctcacctttcttttattttattttatatttttttaagacagagtcttgctctgtcacgccactgtactccagcctgggtgacaaagcaacactgcatctcaaaaacagaa

SEQ ID NO: 243314 - DNA, 591 bp, Homo sapiens
gtgaattaagcttgataattgaatatgtcagatgctttcattttaattttcatgtgaggctgaaaaagattttatatgaagaaagaggttctgctttttctttcttaatcagcctaccttttcccttgacattttacttacttcaaaagtacagtgtgggccgggcatggtggctcacacctgtaaacccagtactttgggaggctgaggcaggaggatcattttagctcaggagtttaaggctgcagtgagctgtgattgtactgctgcactccagcctgagtgacagagcaagactctatctcaaaaaaacatgctttagaaacaaaaataaggccgggcacggtagctcacacctgtaattccagcactttgggaggccaaggtgggcggatcatctgaggtcaggagttcaagacccgcttggccaacagtgaaaccccatctctactaaaaatacaaaaaaattaagccgggcttagtggctcatgcctgtaatcccagcactttgggaggctgaggcaggcagatcacttaaggtcaggagttcaagaccagcctggccaacatggtgaaaccccatctcaacta

SEQ ID NO: 243315 - DNA, 413 bp, Homo sapiens
aggaagtcttttttgcagtgatttatgtgctctgttcccagagcctgcccatactctcgaagagcaacacaatctgccgatcataggagcagggaacgttgaccttgctgcagggtttggacactccggaagccagacaggatgtgggagctccaaaggtgcagaaaaaggactccagaatgttgacttttacctctgtcctcgaaatcaccctaactctagttgtcgagattcttaccagtttttctgccctgactggacatgtgtaactttggccacctactctgggggatcaacccgatcttcaaccctttccatagcttgtgcttcctgtcctaaactgtggactaagagaaattgtaatccccttactataactgttcataatcctaatttagctcaatggaattaaa

SEQ ID NO: 243316 - DNA, 475 bp, Homo sapiens
ctcttaacgatgtaagcacggaattaattttcctcttatattattgcaagagtttatctgaataaatatcattaatgctaatctctggattaatctggccaaattccttatatagtgattttccttaatgaatattttcctattggccatactgtgttttattcccaaaggttatgtatggttaagtcggcatggagcagggataggaaggcatgttggcatgtgtttgtgcttttgaaaaaagccttcaacaaacacatgagaaacactattttcacagtgacagaaatggagtgtatctaattacttgtacacgcttaagtgacagtagtcctcctgaaatgttggagcactatatatatgtgtgtatatacatatatatgtatatacacacacacacatatatatatttaaaggaattgtgatgggttgatagctgcagccaacaatcatggcacacatttacctatataaa

SEQ ID NO: 243317 - DNA, 432 bp, Homo sapiens
gcgtggtgaacagaacacccacagccacagccagttcgacaaagcaggttaattacttacagacaggcagcgagggacagcggaagcctaggctgcatgactcactggtcccccgaggctcaggagcacggcccagggcagatagagtctcccgtgcttgccccacttgcaccacagctgaggactcagcagtgagctctgggttttatatgtggtggacacgtcctgggctagtgttacaggagaccccctctggaagggatgggaatgaggccagggctgtcctgggcagtttctctgtagctcaagttgttgcattctctgggaagaatagaaacgaagcccgggcactttcaggcagttcctcctttcttaggatggtgcattctgatatagtttggctctgtgtccccacacaactcttctctcaaa

SEQ ID NO: 243318 - DNA, 476 bp, Homo sapiens
tatcacaattcttcctcatattacctggtcctctccagtccagccagctccattgcacagcaagagggcacacatcatttgactaaaatgcaagagacccttggagtgcaagaaacaccagtaagtaagtggtaggtaaataattccatattcttggctggttgcaatggctcacccctgtaatcccagcaacgctggggttacacgtgggagccactgcaccaggccaagaaaaaaaccattaaaatacttccctctggaactgctccccagactctgttggtctcatgctttggcgtaggcatcgggatagaactggtttcttataaccagcaagcgctgatctttttcttttgtaactaaaacttttcctttaagaaaataaaatatgatggctaggaaatgcccaccagagacttccacccaattaaaacttttcctgtagttgggtagagctcaacttgttctccgtcaaa

SEQ ID NO: 243319 - DNA, 313 bp, Homo sapiens
gaatgttcgtatccctccaaaattcacgttgaaacttaatctccaatgcaacagtattaagtggtggggtctttaggagttgattaggtcatgagggctcctcccttgtgaataggattaggaaagtttttcgatggaggaaactagcttggtctagtttgcccttccagcttctgccatgtgagaacacagcaacaaagcatcatcttagaagcaaagactgggccttcaccaaacatcagacctacttgtgccttaatcttagacttcccagcctcgacactgtgagaaataaatttctattatttataaa

SEQ ID NO: 243320 - DNA, 457 bp, Homo sapiens
aacttgtttggttctgttcctctgagctgccttccatccagatctactgattttctattgttgaatttaaaaggactttttatttatgtacccgtggccaatttaaaggtatgttgaacgagttctttttttgttgtccttttatcttaaatagtcttagactttattattaacagaagtcattttaccttaaatcatagatcaggttactgtggttgcatgaatgggtgtttaaaaccgaggttgtcatgattaaattcccaccttctttccctttacacctcaggaaatgagacaaaaataagtaagccattccctagtgggttactccagtccttacaatcgcaggactatcagtatgccactgtattattcgctgtcctcaaaatggattttaatttgtggagaatattgagtaaacccttatttttccaataaagttttttcactttatcat

SEQ ID NO: 243321 - DNA, 446 bp, Homo sapiens
ctgtggaactaatttttaaatatcatttaagattttctccatactctgggtggtctcttcagagggaggctgataagcatatagttgcacagttattctatcttgatctctgttgatatggctgcagacatccttggggaaaacctacacctgttttggttttagcttttacagcgtttgacagaatcacagaataatcaacccaatgggaattccttaaaaggaatgtagaagagaagaggaggggttatccttaggccaggtctcccacctttgagccggacaaaaccagagtcacctaagactcttaggaaaggtcttttgcaggtcagtgcagtggctcatgcctctactcccaggaggccgaggcgggcagatcacctgaggtcaggagttagagactagcctggccaacatagtgaaaactccatctctactaaaaatac

SEQ ID NO: 243322 - DNA, 459 bp, Homo sapiens
tgtgctgcttggagcatcttctgctatcttgtatccattcagaagctgcgttgaagatggcacagcagaatgatgctccctgagaagaggatcttcaattcatttatgcctcccggagctcctggaacagcactgccttacagatagcagtgtgttatccagggctgacaccagaaccatttacagcaaggctgcctctgtcctcacaatattacttttgaggaagaaatcagaagaaaaatggaagacaaaaagagacagaactctttgcagtaggggcatctttttaaggaagctcagaatagccctccagaaccatttacccagacctcttcaatgttcaaacatgagcctgtgaagctcccagttcctccttttctcaattaagctataattagcagaatagttgttcttagatactttggtgaccttggaaatataagatattccagaaataga

SEQ ID NO: 243323 - DNA, 470 bp, Homo sapiens
agtttactgtggccttttgatgcatcattagtagtcttttggcttggtgaaattgagagagaaggctatcagtcactcagcaaagctgcttatgggacagataggctcataccacctgatatatgaaccactacatgtgattaacttcgacaggtagctcctggccggctggaagctgaagagcattttaagtacaaataatagttctggggtatgtcttgagtgatagaatgatgactgagtggaacagattcccttaattttagctcatgaaaacacatttggtttccttcagaagcggggatcctaccaaaaaatcaattaacaaaacttctcagagatcttccttgatacttggaagtttggcttttattgcacttatattaaatatgggaccaccctggggggccagactcattcatctcagtcttcaaagggcctatcatgatcatttgcaacaatttaataat

SEQ ID NO: 243324 - DNA, 374 bp, Homo sapiens
tttaaactcttaattttgaattgtttgtttggggatctccctctaaccacccatgccctttaagacataccagaaattcttgttaaaggagttggtctatgtatactgtacatttcatacagtgaaaattaatttaaatctatattttgtacgtagttcttatttgaaataaaatcctttaaggattactttcacttgaaaattgaactcataatcatactagaaattttgatgtgaaaaacttaataaatttattttcttcctaagaatttatagcgtttacatatataaaggatcatctgcctaaatgcataagttactgtaatgaaaaaccaaaggaaaatactattgccatgtagccaggcacagtcata

SEQ ID NO: 243325 - DNA, 421 bp, Homo sapiens
tgagagggaccagcaatggtggttatttcctctgtgggccccaagataccagcataagagagtgaggagacaagggtacagcaaggggtgactgagggagttcagctcaaaaatcctgccttcccaagatgccggggagatgaatttaggtctgactccattgagaagacacttggtggtgcctcaatgttcttttctgtaacagatgcattcatttgatatttatctaggacctactatgtagcaggtgccaggctgggtgctggggacacaacagtgattaagacaacagtgaacaatgtagatacttgccctctagctgaaaatataggaataaatgtagatataatacatactatattatatataattgtaatgtataatatcaatattataatatatagtgtcatatctgatatta

SEQ ID NO: 243326 - DNA, 567 bp, Homo sapiens
tagtttgtaatacaattttactcttcagaatatactaaagataatatttacatatgcgctgtatgtcacataatattctattttctcctgttcactttattgaggtataactgacaaaaattttatgtatttatgatgttaaatgtgatgttttgacatatgtatacattgtgaaatgattacatcaagctatctttcttgtggtgaaaacatttaagatctacttttttttttttagcaactttcaagtacacagtacatattttattttattttttatttttgagacagagtctcactctttcgcccaggccagactgcagtagcgctatctcggctcactgcaagctccgcctcccgggttcacaccattctcctgcctcagcccccggagtagctgggactacaggcgcccgccaccacgcctggctaattttttgtatttttagtggagaccgggtttcactgtgttagccaagatggtcttgatctcctgacctcgtgatccgcccacctcggcctcgcaaagtgctgggattacaggcgtgagccaccgcgcccagccta

SEQ ID NO: 243327 - DNA, 373 bp, Homo sapiens
gatttaaatacaccttcactctttatcagtatgtcctcatgaattaactaacagattaagtattgtcaggcgtggtgtgttccatcaggaatatttactggacagttgtagactagaaactgtttagtttatgtacctccttactcttcactgatgctttcttatttccagccaactgttgtctggcagcatgaccttaacagttatccttcatattagaacttgctttttcacggctgggtgtggtggctcacgcctgtaatcccagcactttgggaggctgaggtgggcggatcacctgaggtcaggagttcaagaccatcctggccaacatggtgaaaccccatctctactaaaaatacaaaacaattag

SEQ ID NO: 243328 - DNA, 423 bp, Homo sapiens
gagggtcgcctggtctccgcggcaaccgggtgccttaggattgtgacttcaccaccactgccttcgttggtggggacactccgagggggcggtatctgcctccctctagcccttgccttggtttcccagcctcccagcgccattcctaggcctcctgcctccaagcctctcccaccagcctctgcacctgcctgctggctcctctgagacgtatagagggagataaagtcccaccggcctcaggggagcatgcggcctgtttcaggggagcaggcacagtgctttaatcactcagtcctgacactgtaaaaattgggttttccgatgtcattagtgctttgtgatcggctccatttgtatcatgccagccccgttgcctcatctctgctaattgtttttactcagtcctttcatttttaaact

SEQ ID NO: 243329 - DNA, 217 bp, Homo sapiens
accctggttatgttaacatttccaagcctcgttttctttacctttcaaaaactggggataaaccttctaattctgcagcataatgtcaagaatccatgacatcaagcatgcaaaagtgattgtgctgtactttgcacatggtaggtgtacaataagcattacttctcctaaatgtctgtaactgcatatattaaagacattagatattacttgatct

SEQ ID NO: 243330 - DNA, 491 bp, Homo sapiens
aaaagggatgaggggatgacaaactagggaacttttgttaggatgtgctgctcgtggattctattggaaaggaagtttattgagcggggataattaagacaatcctaaaatgtaattaaatctctacttaaaagtaatagtcttcctatgggaccatgacacatctgacttcccagggaaaaatatctttgggactcaaccttgaaggtttattttcacataatctttaaattctaataagtgcttgattcaaatgtagcatgactctgcttaaagggaatgatactgctatatcagagacagataattacctgtttttcacttcctatgtccttagtaaatctgctttttctgaaccaccaactgtgtcctctgctttccagagagttctgatagccagtggacaaaaggtcatgctgaagttccagtgatggcattacaccgaatcatacaggatggtcagcattcgactattttgtatttgaaatatg

SEQ ID NO: 243331 - DNA, 392 bp, Homo sapiens
ctgtgtgaaaattatggaggcccatatgtgaattaaactttgaagcattttcacattctccatgatccacataattttaaggtaaaatacttttatgtgcaatgaatatgttgtattttttaaagcagatacctcttgttacacattttggtcttctgctatttttggaaattataaagtggattataacaaatactctagtaatggaaatttgtacacatcccaatgtgaagtgaaaggcattcaaattttataatggttaaattatatttaaagctcttgaaatacattgccaacttcactccagaagagttggaccaatttacaattttaatgagagtgccagcttacctaaaccctcattaaccctggttagccattgttaaaaaaaa

SEQ ID NO: 243332 - DNA, 425 bp, Homo sapiens
acgagcatccacctgagtgtgatgtggcacacccagacctgctgctctttggttcttagttctccacgggccccttctagcatcagcatcttcctaggctaagtatgagtctagtgtttaaagacacatattttttatacaacaggaagcctaagtagaaaacattttttttaatctggcaatgctagagggaattttgttcatattcctatttttccttttgtgctgacttttcaatgtgagattgttcaagtatataaagaacaggacaacgaaaacccatttatcaagtatgtagagcaagtgttcacatgttgccatatttgcttcatctctctatgctcatatccattttttattaaactgttacaaagttacagacatcatatcacttcacccttaatgcttcaaaatgtagctccaaa

SEQ ID NO: 243333 - DNA, 274 bp, Homo sapiens
gaccctggcaggtcattaaagattcctcaggagacctaggtattgtggctcagggctgtaattcccgtgctaatgcacgaaggctaatgcaggaggatccctcgaacccaggagttcaggacaagcctgggcagcatagcacgaccccatctctgcaaaaatgaaaataaaaagattgactgacatagtgatgcacttgtagttcccactactcagaaggatgaggcaggaggatcgattgatcctagaacgtcaacactacagtgagttatgg

SEQ ID NO: 243334 - DNA, 661 bp, Homo sapiens
ttttattttcaaacttttgcagtagtgctaggggcaaggtatgttggacataaatttaatttaaaaaataatttagacttctttcaagattcctgttgcaagaaaaagttaagactctaaatgtccactattcttaaaaaaatctaatgagtatgcatttcaaataatggttctgaattcagagcattctttttgacagtgtgtcaaaaaatacagtttttataatgttaatctaattgtatagtctcatgccaattaaaatggtgtagacttggtataggtttcaaagctacttgaaatgtaaaatgttgtctttaaaatgttttaaagataaataactaaaaggaggatattgaatgctctaacaaagaaatgataagtgtttaagatgatagatgtgccagtcaccctgatttaattactatacattgtacgcatcaaaacaccgctatgtatctcataaatatgtacagttatgatatgtcaatttaaaaaataaaatacatttttaaaagtttaaaaaattgagttctgaggctgaggtgggaggatcacttgaagccagcctcagcaacataatgagaccctgtctctataagcaaaatattttaattaagaattaaaaaaattaaaaattaagttctgattacaaaaggtttga

SEQ ID NO: 243335 - DNA, 506 bp, Homo sapiens
tacagggagcctggcactcagcatcctggatttcagaaccagacagaccccctgggtatccctcatcagccccaagggaaacgcatccacattgcaaatcctataaacacaggacaagactctgacccctgcctcagaagaacacttcctttctttagaaaacctcacttcttcagtgtgaaattctgtgaatgctgttactaatcctgtcacgagatgaatctcatttcaccaaaattaaattatgtttttccactaaaatgatgatacaagttgaagacacagcactctgaaattggaagacctcaccacttaaggctccgcagcggcttactcagctgaactccaggttactactctttactttgttcacccattggggagttcagtttgtttttaaacattgggagatggccattctaactactgttcaatgtctctgttttgggaaggcataacaagaaataaaaaggaatatatatgaagggaaaaaaaaaaacctcact

SEQ ID NO: 243336 - DNA, 277 bp, Homo sapiens
atatccacatgcaaaagaattaaatcaaacccttatcatataccatacacaaactcaatgcaaaatggataaaagacctaaatgggatacccaaaaccataaaagtcccagaagaaaacaaagggggaaagattcttgacaatggccttggaaattattctttggatatcacatcaaaagctcagtctataaaagcaaaaataagcccaagcttctgcacagctaaacaaaacaaaacaaaaacccagcaaaaaaaaaaaggcagcctacagattac

SEQ ID NO: 243337 - DNA, 738 bp, Homo sapiens
atgactgagagtttggcaggaaatgggttcgtggacctgtggtacagtcgcactaccacagcagcattggcctagcaaaatgttgagccctctttcccttgcatgctcccctggggcagaagtccagtgctatctccgcttccctgaccctctccactcagagcccagcatgacaagcacacctttaaatgggttcaaggaagggaatagcagaaatgaacgcagcccgacagcctcctttctcttgataacccctgtcactgtggagctggacttctaggctatctcacagaggcccagaggcactggaatcgatctcatttccttacagacatcaccttgtcaattagagaacacataacgttgattgaatttaagattcttatcagtgcctagctctttttctcccaaatccgaaattcagccatggcagatccataatcaagaaatatacttacattcccatcctttgttgttggtttcaaaaatatttcttttttgtgagtatgtatccatgttttacaaaccaaaaaaatgggacatatggtctgacaaagggaaggatatttgaacctggggactgcctgggagagtccggaagcacatggtcactctagagactgtcatcaagggctgctcctgagattaatccactgtcgaaggcattatcccatctcccttacagcagccttttgcaggaaactgtctaagatgttgtgctttttttctcattgactt

SEQ ID NO: 243338 - DNA, 409 bp, Homo sapiens
agtctttaatcagctttacattttaatttaaataaagtaatattttgacacagcatgtagttatgtgatttctgggtgcttttttaattgttgaagtttttgactattaagtactgactgtaaaacatctaatttgtttttggcttctgtgtactcatcttcctaaatctataatatgtatcacagtgtttgccaaagttgtttatagctgtttattaaaatatttattgtctttcttattataaaagcgttatacagaaagtataacaaaatgtaatgaaaaaaataaccttcaggttacagtgacccatgcctgtaatcccagcactttgggaggctgaggtgggaagataccctgagcccaggagttatcagcttgggcaacagagtgagactcccatctctattt

SEQ ID NO: 243339 - DNA, 1052 bp, Homo sapiens
tcagtgcaacatattatgcaatattataatcaactaacctcttcattgataatgacttcatattgagaggttttttaaatctagaaatattcttgttttaaattccaggttaaaatgtaaaggtatttttatttttttaattttaattcttctcaaagctactagtacattataaaacaacaatttcacatttagaatttttatatgtatataaattaggattattttttaatattagccttaactttctttaacttttatgaaaaacaactagtcccaagggtatttttactatttaatatacattattcctgtgattcaaaatcttagcagtagaacctgttgagctacttaactttctgtcttgggactatccaggtgcagttataactggtttcaaagttgtgaccttttccttgcttgtttcaaaatcattccttaaaaaatgttcagtatttttcttttgtcaaaaaataaaaacaggatttgtgggttgttctgttttttaaaattagtttgagaaacttcctttgccacttgttttctgtgcaaatgttgtaagagctcaaattccctgggggtagggaggacttttataaggtttttttggttgaagggtataaaaggcacttaaaaggtatacagttacttttatttcgatatcccagtcattttgacattatgataagctttccccactttataggttatctgaaaatttggtggggggcgggtattttatttatacttaatataacaaaattattttcctatgtgtagtcaatagcacatacaaaaaattatctcctgtttgtagtcagtagcacagtcagtattcaccgtgggttgggtattgtcagtccttctttttcagataactttctaaatggtcattcaatctgtaatcttaaacttttttaatgttataaattcttcaaatcagtatttgtattaaatgcagtgaccagactatgtcactgatacaatgtcatgattagatgtgcagaagactatgttacatggatgataaatgaacttttaacatatagaaa

SEQ ID NO: 243340 - DNA, 669 bp, Homo sapiens
attgtcacaaggaactaaaaacaaggcaaataagtgtttcaacttatgctcttagaaattatttcttaaataccacaaactgatttgggtatatcacaaggaaagatcagataattctaatccatgctgaacatgtgattttgaaacagaaacagtaaagatgaaaggtgaaagctcccatagtaggaccagtactggaagagagagagagtgctttttgactgatgtactctcgccttacctgagtcttttggtgtgaaatcatggtcttttagcactggaacaaaccttagagatcgtcgtgtagtcaaacatcttttttttgtagatgaaggaaactaaggactggaaaggtgaactaagttgcccaggtcaaagagctacttggaggaagaaaatctgaatctcaagaagttggtttgcaaacttctaagtccagtgttctttcttctctttccacacactgtttcttccactgaactcttcctctgaacaacaggagagcagcagcagtaataagtccagcaccatcaggtccgggccacagctgatttttagaggaggccccttgcacacaaaccaagtttgcttctggccaatagacctagaaattacaggctgatcttgctttactcctctatacgtgcttcagaaatgacttctttgcag

SEQ ID NO: 243341 - DNA, 520 bp, Homo sapiens
tgtgacacccaacaagatagacacagatgtatgaaacgctctacagccacccgaaaaaggtagaaattctgcaacaaaattaactggggaaaaaaaaactagggagaaaacgggaaaggaaaggcattgtccggaagaagcctcttgcagtgtggatgggaacctgccacagctgggcttgggcgaggggcccacggtgtcgctggggacttctgctgcccccagccccccttccttccagccagtggctctgtgagccgcctcttgtctgcatttcttgcaggaacatggagggaccggaacatggagggaccagtccagaatggccccacgtcaggagaaagagtccccaatccccagcccctacctcataggccaaatcactccatgtgggaggctgggaggcaaacatttttgtgtgagctagctactctgaacataatcataattgcattggtaaggaagaacaggaagttgtctcaaaataaagggggatcaggtggctggtccacttgttctt

SEQ ID NO: 243342 - DNA, 375 bp, Homo sapiens
cacaacatacagaaagtggccatgaatgtgaaccctcagctacctgccttcagtccagccgtctatgacacgtctcttaaaaaggttatatctggctgggcgcggtggctcacgcttgtaatgccagcactttgggcggccaaggcaggtggatcacctgaggtcaggagtttgagaccagccttgccaacatggtgaaaccccgtctctactaaaaatacaaaaattagctgggtgtggtggcatgtgcctataatcccagctactctggaggctgagacaggagaatcacttgaacctagggatggaggttgcagtgagctgggatcacgccacatcactccagcctgggcaaaagagcaaaactctgtctca

SEQ ID NO: 243343 - DNA, 365 bp, Homo sapiens
agttgtaataaggagcaaaaagcactccaaaatgaaatggccaatactagagagcagcagagctgtgcatcaccaggggtcactatgtcttcccagatcacagaagtttggcagttgtaacaaagcagtctatagacatcagaatttgtgtgaacgagatacagagagagaagaaacctttaaaatataaaaagtgtaatttatctagggtgactatagttacctataatttattgtatatttcaaaatagctagacgaaaaaaaaaaacacataaacacacagcaaaatcagcaaacaaaactaagtagcatttaggcggagaacagtggctcacgcctgtaatcacagcactctgagagcgcg

SEQ ID NO: 243344 - DNA, 468 bp, Homo sapiens
tagcacattgggcatgtggtaaagagataagagatgagggagagaggtagattgaggccatttatggaagtgttattaatttcatcctttctccactctgtgggatagtgggtggttattgcctttttagtgataatctgaggctggtgaataagtgacttgcctcaggccacatggtgagtagcagagccaatgttcaacttataaattctttgtgctctccactataccatgatgccaaatcctagctttttactaataagaagagattactttatatcttaatgtgcctgagccacagattttgatgtgagcattatcgaaactgtgatttttaaaaataggaccaatataacaaagttttactgattattgcatttacttaatcagatatgaatttccattcattcatttatttaaatatttatttccactgcttcacttggctagcctaaaaatatatgtatt

SEQ ID NO: 243345 - DNA, 460 bp, Homo sapiens
agctaagtaaagtcaatgaagggcgagtggccctatggccacctgggcacacacctgccccttggccaccttgcataggcaggctgaggaggtcactaaggcttggttttcctgacctgccctgattccacatgctgtaaggaggacccagaaggctgtgtggctacagaggtgcccagcatggtgggggtcacttcagtgtggacactagactggaccgcgtggaactacaaccagctcagagcgccagccagagtgctgttctggccagaaggaggagccaagacccacacccaggaggacaatgagcccctctctgcagacaggagccagccacacctggggtctggggagactcttcctgattccaaatgggactgaactttaaaccagactgggcatttgagcaattttttaaaagctgtcaaccaaataaaggaatgccattttctttacccag

SEQ ID NO: 243346 - DNA, 360 bp, Homo sapiens
tttcatgacaaaaaaggtcttccatggtgttttagttatgtgtctcagtgatgtggggagatatctcttctagggatgtaacagttttggtctttgatgcctgaattttcctagaaaaaaatgttttagcatttttttctcttttaaactaggagtgggagtcattagtgctcagtaaatatttctggtgaccttgtctgttctcaccttatctttgttggcccagtttggggcagtttacaactttaacagaggaaatctggattagttagagtaggcaaaagacatggaataaagaataaaagaatcaggagttgctgacttttaaaagcaagaaggcactgaaattatctagcatta

SEQ ID NO: 243347 - DNA, 687 bp, Homo sapiens
cggccgcccggcagctgctgggcccctgctgaagaggagccactccgtccccgcgccttccattcgcaaacagatcttggaggagctggagaagcccggggcaggtgaccctgacccttcggccccacaagggggcccaggcagtgccacttctgatctggggatggcatgtgaccgtgccagggtcttcctgcactcggacgagcaccccgggagctccgtggccagcaagtccaggaaaagcgtgatggttgcagagataccctccacggtctcccagcactcagagagtcacacggatgagaccctggccagcaggaagtcggatgccatcttcagagctgccaagaaggacctgctcaccctgatgaagctggaagactcatctctgttggatggccgggtggcgcttctgcacgttcctgcaggcacggtggtgtcaaggcagggagaccaggacgccagcatcctgttcgtggtctcggggctgctgcacgtgtaccagcggaagatcggcagccaggaggacacctgcttgttcctcacgcgccccggggagatggtgggccagctggccgtgctcaccggggagcctctcatcttcaccgtcaaggccaacagggactgcagcttcctgtccatctccaaggcccacttctatgagtgagtcccacgggccaggacctc

SEQ ID NO: 243348 - DNA, 486 bp, Homo sapiens
cggccgcccggcagctgctgggcccctgctgaagaggagccactccgtccccgcgccttccattcgcaaacagatcttggaggagctggagaagcccggggcaggtgaccctgacccttcggccccacaagggggcccaggcagtgccacttctgatctggggatggcatgtgaccgtgccagggtcttcctgcactcggacgagcaccccgggagctccgtggccagcaagtccaggaaaagcgtgatggttgcagagataccctccacggtctcccagcactcagagagtcacacggatgagaccctggccagcaggaagtcggatgccatcttcagagctgccaagaaggacctgctcaccctgatgaagctggaagactcatctctgttggatggccgggtggcgcttctgcacgttcctgcaggcacggtggtgtcaaggcagggagaccagacgctgccgaaatgtttccagtgaagtcc

SEQ ID NO: 243349 - DNA, 562 bp, Homo sapiens
tgatttctattttagacccaaggaattaaatggatcaaccggggtgggggggcgttgaattccagtatttcgagttcctgggttttgggaagaggaagaggtagtggaaaaccaggagccaaatgaatatgcttcttataataaaatttgaacagagcagcgggtgggcctagaagcagtgactggggaggttagaattcttgcacgcagagaacccccccaagcccgctcacgcccggcctggctccgaaggtctcagaatccgagcctccaggccagattttccctctagccattcctggccacgcagcgcggagccgcgagcacacagaaaaggatgtcttcatcgccaaccgggatggaacgaacccgcccgctcagggagtactgagaactaaagggtccctccagcgccggccgcagccagcatgccttgactgcctccatcccgcgcggtccccactctccagaagcccccgccctgcccgggtgcgcgcgcgcacgagtcggcgaaccggggagctgtgcgctcggcagcctgcgggcggcggcggcggccgca

SEQ ID NO: 243350 - DNA, 403 bp, Homo sapiens
caccaaggagccggtcagggagtggagacctctcagggcacccctcctctggggaaggcaagtcacagaaaccaagctggaggagcactgtgggttgagcagcgtctccgaagactcatgtccaccagtacctgagaaagtggcctcgctcggaagcaaggtctgtgccgatataatcaaaccaggatgaggcgatactgggttagggttggccctgaatgcagtgtgagcagtgttcttgtaagaaaaggaaaattgtccgggtgcagtgtctcacgcctgcaatcccagcactttgggaggccgaggcgggcagatcacttgaggtcaggagttctagaccagcctggccaacatagtgaaaccccgtctctactaaaaaacacaaaaattagctgggtgt

SEQ ID NO: 243351 - DNA, 447 bp, Homo sapiens
aatgaccattgtagtttagcctacagggaatttaaaattgttcataaggcacttatgaatttaagcgaaagtattctgatttcttttaaatttctctgttggaggatgtcaatgggattttctttggcagatgctatggtctgaacagttgtgtcgcccccaaatttatatgttgaaatggtaatcccgaaggtgatggtattagaagagggggcctttgggaggtgattaggtcttgagggtggagctcttatgattggaattagtactcttataaaagagattcatctcagagagctagctagctcctgccaccacatgaggaaacagtcagaggtgtcatctatgaatcagcaagtgaaccctcattggacatcaaatctattggtgccttgatcttggacttaccagcctcaagaactgtgagaaataaatttctgtagttgg

SEQ ID NO: 243352 - DNA, 371 bp, Homo sapiens
tttccatgggagcaatattgcagtaacattttcagatgagacaaagacttttaataaacatttgttttattttattaaaaaaaagctgaaaggggttgcttaaattcagtgcttgataacaagggaatacatgggaattcttctcttccttttttgaactcttgccaaagagaaaaccttctgtgttaggcaaacgtatcagtagtggggggataccctagattaaagtcactgtcttcaaagttgtacatagttttacaaattaactttttttttctaaatatctcacatattcttagcatgctgaggctataataactcagttctaactgaggccctttctgggtactctttggtcaaccgggaccact

SEQ ID NO: 243353 - DNA, 396 bp, Homo sapiens
ctttctgggaaaggtaaaaccctggagacagtgtaaagatcagtggttgctggggctagggagaagagaggggaatttaagtacggcaccaatttctaaggcagtgaaataattattctgtgattctataatgctggatacatgtcatcatacatttgtcaaaatctatagaatgtacaacaccatgagtgaatcctaatgtaaactatggactttagttaataataatgtattattggctcatcaactctaacaaatataccacaataatgcaagatgttaatagggaattaaaagtgagtaataaagggtatatgggaactctgtacttttagctcagttttttccatttatctaatgctgctaagaaataaagcctattgattaaaaacatta

SEQ ID NO: 243354 - DNA, 301 bp, Homo sapiens
tcatttatctgaaattcaaatttaattgggcatcctgtatttgtgtttgcctcatctggcagccctactatggacacttctctaaattccagactcaagtccagtccacaggttgtccacccttctcagaagtccagggataagggatatggaccaatctctaaagaaaaacctccatttcaggaggagttatgctacaggtgcctgtgactccaggtctagatgctggctttcaccacttgacagggattccctgcaatgggagaggttcagtggcctggggctgactcatatctgagaa

SEQ ID NO: 243355 - DNA, 4326 bp, Homo sapiens
gaattcccaacacccaggtaatttttgtatttttagtagagattgggtttcaccatgttggccaggatggtctccatctcttgacctcgggatcctcctggcttggtctccaaaagtgctgggattacaggcatgagtcaccatatccagccaactgcagtcattcttatggggcaaacacttggctgaacccaggttttctaaagatacaaacccatgggcaacaccaagcattctaatggaataggcacctggctgactccaggcattctaataatagagacacctgggcgaactcagacggtcgcccctccccggattcccccaccctccgtgcctgcaggagcccctgggctttcccggaggagctcgccctgaagggcccggacctcggcgagcccaccaccgttccctccagcgccgccgccgccaccgcagcagccggagcagcatggtccagctgaggaagctgctccgcgtcctgactttgatgaagttcccctgctgcgtgctggaggtgctcctgtgcgcgctggcggcggcggcgcgcggccaggagatgtacgccccgcactcaatccggatcgagggggacgtcaccctcggggggctgttccccgtgcacgccaagggtcccagcggagtgccctgcggcgacatcaagagggaaaacgggatccacaggctggaagcgatgctctacgccctggaccagatcaacagtgatcccaacctactgcccaacgtgacgctgggcgcgcggatcctggacacttgttccagggacacttacgcgctcgaacagtcgcttactttcgtccaggcgctcatccagaaggacacctccgacgtgcgctgcaccaacggcgaaccgccggttttcgtcaagccggagaaagtagttggagtgattggggcttcggggagttcggtctccatcatggtagccaacatcctgaggctcttccagatcccccagattagttatgcatcaacggcacccgagctaagtgatgaccggcgctatgacttcttctctcgcgtggtgccacccgattccttccaagcccaggccatggtagacattgtaaaggccctaggctggaattatgtgtctaccctcgcatcggaaggaagttatggagagaaaggtgtggagtccttcacgcagatttccaaagaggcaggtggactctgcattgcccagtccgtgagaatcccccaggaacgcaaagacaggaccattgactttgatagaattatcaaacagctcctggacacccccaactccagggccgtcgtgatttttgccaacgatgaggatataaagcagatccttgcagcagccaaaagagctgaccaagttggccattttctttgggtgggatcagacagctggggatccaaaataaacccactgcaccagcatgaagatatcgcagaaggggccatcaccattcagcccaagcgagccacggtggaagggtttgatgcctactttacgtcccgtacacttgaaaacaacagaagaaatgtatggtttgccgaatactgggaggaaaacttcaactgcaagttgacgattagtgggtcaaaaaaagaagacacagatcgcaaatgcacaggacaggagagaattggaaaagattccaactatgagcaggagggtaaagtccagttcgtgattgacgcagtctatgctatggctcacgcccttcaccacatgaacaaggatctctgtgctgactaccggggtgtctgcccagagatggagcaagctggaggcaagaagttgctgaagtatatacgcaatgttaatttcaatggtagtgctggcactccagtgatgtttaacaagaacggggatgcacctgggcgttatgacatctttcagtaccagaccacaaacaccagcaacccgggttaccgtctgatcgggcagtggacagacgaacttcagctcaatatagaagacatgcagtggggtaaaggagtccgagagatacccgcctcagtgtgcacactaccatgtaagccaggacagagaaagaagacacagaaaggaactccttgctgttggacctgtgagccttgcgatggttaccagtaccagtttgatgagatgacatgccagcattgcccctatgaccagaggcccaatgaaaatcgaaccggatgccaggatattcccatcatcaaactggagtggcactccccctgggctgtgattcctgtcttcctggcaatgttggggatcattgccaccatctttgtcatggccactttcatccgctacaatgacacgcccattgtccgggcatctgggcgggaactcagctatgttcttttgacgggcatctttctttgctacatcatcactttcctgatgattgccaaaccagatgtggcagtgtgttctttccggcgagttttcttgggcttgggtatgtgcatcagttatgcagccctcttgacgaaaacaaatcggatttatcgcatatttgagcagggcaagaaatcagtaacagctcccagactcataagcccaacatcacaactggcaatcacttccagtttaatatcagttcagcttctaggggtgttcatttggtttggtgttgatccacccaacatcatcatagactacgatgaacacaagacaatgaaccctgagcaagccagaggggttctcaagtgtgacattacagatctccaaatcatttgctccttgggatatagcattcttctcatggtcacatgtactgtgtatgccatcaagactcggggtgtacccgagaattttaacgaagccaagcccattggattcactatgtacacgacatgtatagtatggcttgccttcattccaattttttttggcaccgctcaatcagcggaaaagctctacatacaaactaccacgcttacaatctccatgaacctaagtgcatcagtggcgctggggatgctatacatgccgaaagtgtacatcatcattttccaccctgaactcaatgtccagaaacggaagcgaagcttcaaggcggtagtcacagcagccaccatgtcatcgaggctgtcacacaaacccagtgacagacccaacggtgaggcaaagaccgagctctgtgaaaacgtagacccaaacagccctgctgcaaaaaagaagtatgtcagttataataacctggttatctaacctgttccattccatggaaccatggaggaggaagaccctcagttattttgtcacccaacctggcataggactctttggtcctacccgcttcccatcaccggaggagcttccccggccgggagaccagtgttagaggatccaagcgacctaaacagctgctttatgaaatatccttactttatctgggcttaataagtcactgacatcagcactgccaacttggctgcaattgtggaccttccctaccaaagggagtgttgaaactcaagtcccgccccggctctttagaatggaccactgagagccacaggaccgttttggggctgacctgtcttattacgtatgtacttctaggttgcaaggttttgaaattttctgtacagtttgtgaggacctttgcactttgccatctgatgtcgtacctcggttcactgtttgttttcgaatgccttgttttcatagagccctattctctcagacggtggaatatttggaaaaattttaaaacaattaaaattttaaagcaatcttggcagactaaaacaagtacatctgtacatgactgtataattacgattatagtaccactgcacatcatgttttttttttttaagacaaaaaagatgtttaaagaccaaaaactgtgctgagaaagtatgccccacctatctttggtatatgataggttacataaaaggaaggtattggctgaactgaatagaggtcttgatctttggaatgcatgccagtaatgtattttacagtacatgtttattatgttcaatatttgtatttgtgttctcttttgttatttttaattagggtatatgaatattttgcaataattttaataattattaagctgtttgaaggaaagaatatggatttttcatgtcttgaggttttgttcatgccccctttgactgatcagtgtgataaggactttaggaaaaaaagcatgtatgttttttactgtttgtaataagtactttcgttaatcttgctgcttatgtgccaatttagtggaaaaaaacaacccttgctgaaaaattccctctttccattctctttcaattctgtgatattgtccaagaatgtatcaataaaatactttggttaactttttt

SEQ ID NO: 243356 - DNA, 1229 bp, Homo sapiens
  misc_feature (56)..(56): n is a, c, g, or t
gcacgagggcccgcacgcgcgggagttgagttttggaaagagcttctgtgccctgnctgctttttaagagtatatgtcagttataataacctggttatctaacctgttccattccatggaaccatggaggaggaagaccctcagttattttgtcacccaacctggcataggactctttggtcctacccgcttcccatcaccggaggagcttccccggccgggagaccagtgttagaggatccaagcgacctaaacagctgctttatgaaatatccttactttatctgggcttaataagtcactgacatcagcactgccaacttggctgcaattgtggaccttccctaccaaagggagtgttgaaactcaagtcccgccccggctctttagaatggaccactgagagccacaggaccgttttggggctgacctgtcttattacgtatgtacttctaggttgcaaggttttgaaattttctgtacagtttgtgaggacctttgcactttgccatctgatgtcgtacctcggttcactgtttgttttcgaatgccttgttttcatagagccctattctctcagacggtggaatatttggaaaaattttaaaacaattaaaattttaaagcaatcttggcagactaaaacaagtacatctgtacatgactgtataattacgattatagtaccactgcacatcatgttttttttttttaagacaaaaaagatgtttaaagaccaaaaactgtgctgagaaagtatgccccacctatctttggtatatgataggttacataaaaggaaggtattggctgaactgaatagaggtcttgatctttggaatgcatgccagtaatgtattttacagtacatgtttattatgttcaatatttgtatttgtgttctcttttgttatttttaattagggtatatgaatattttgcaataattttaataattattaagctgtttgaaggaaagaatatggatttttcatgtcttgaggttttgttcatgccccctttgactgatcagtgtgataaggactttaggaaaaaaagcatgtatgttttttactgtttgtaataagtactttcgttaatcttgctgcttatgtgccaatttagtggaaaaaaacaacccttgctgaaaaattccctctttccattctctttcaattctgtgatattgtccaagaatgtatcaataaaatactttggttaactttttt

SEQ ID NO: 243357 - DNA, 473 bp, Homo sapiens
caatttcctggaacaaaaatgtgaaaagctaattccccccaccccctcatcacctgctcctctctctgcttttgccatagcaaagccctataaagaaactggccaccagggtcattatcagtctgagctgaaaatttgattaagctggcctcctagggttagtatgaaaaatgctacatttttgttcttggaccttaattcctctttccctcatttttgtcatgtttgcaaatttcatttgcatttaatttcctgtggtttgccaaagtccagactgagacttgagctgttgtttttattcaggtgagaagtgcaactgctactgaccatctgcactggcatctagtcaagcgattgtctgaggaaaggattttggagattcccatctgatattcttctatttggtctcttgtacccattgtcatcctgtaccacacataataaagtttaagaatgtcaagcaatcaaaaaaa

SEQ ID NO: 243358 - DNA, 3534 bp, Homo sapiens
ggagggagacggagaaaaaatgggaggaaggcggatccggggccgctgagcggtgggttctgccgcagtgttctctcgcctcctgctccagcagcctctgccccatggctcctgagctgcactggggagatgcccttctatcctgtctcagtttcccaatcctaaacgtccttcaaaaatcccccagattagttatgcatcaacggcacccgagctaagtgatgaccggcgctatgacttcttctctcgcgtggtgccacccgattccttccaagcccaggccatggtagacattgtaaaggccctaggctggaattatgtgtctaccctcgcatcggaaggaagttatggagagaaaggtgtggagtccttcacgcagatttccaaagaggcaggtggactctgcattgcccagtccgtgagaatcccccaggaacgcaaagacaggaccattgactttgatagaattatcaaacagctcctggacacccccaactccagggccgtcgtgatttttgccaacgatgaggatataaagcagatccttgcagcagccaaaagagctgaccaagttggccattttctttgggtgggatcagacagctggggatccaaaataaacccactgcaccagcatgaagatatcgcagaaggggccatcaccattcagcccaagcgagccacggtggaagggtttgatgcctactttacgtcccgtacacttgaaaacaacagaagaaatgtatggtttgccgaatactgggaggaaaacttcaactgcaagttgacgattagtgggtcaaaaaaagaagacacagatcgcaaatgcacaggacaggagagaattggaaaagattccaactatgagcaggagggtaaagtccagttcgtgattgacgcagtctatgctatggctcacgcccttcaccacatgaacaaggatctctgtgctgactaccggggtgtctgcccagagatggagcaagctggaggcaagaagttgctgaagtatatacgcaatgttaatttcaatggtagtgctggcactccagtgatgtttaacaagaacggggatgcacctgggcgttatgacatctttcagtaccagaccacaaacaccagcaacccgggttaccgtctgatcgggcagtggacagacgaacttcagctcaatatagaagacatgcagtggggtaaaggagtccgagagatacccgcctcagtgtgcacactaccatgtaagccaggacagagaaagaagacacagaaaggaactccttgctgttggacctgtgagccttgcgatggttaccagtaccagtttgatgagatgacatgccagcattgcccctatgaccagaggcccaatgaaaatcgaaccggatgccaggatattcccatcatcaaactggagtggcactccccctgggctgtgattcctgtcttcctggcaatgttggggatcattgccaccatctttgtcatggccactttcatccgctacaatgacacgcccattgtccgggcatctgggcgggaactcagctatgttcttttgacgggcatctttctttgctacatcatcactttcctgatgattgccaaaccagatgtggcagtgtgttctttccggcgagttttcttgggcttgggtatgtgcatcagttatgcagccctcttgacgaaaacaaatcggatttatcgcatatttgagcagggcaagaaatcagtaacagctcccagactcataagcccaacatcacaactggcaatcacttccagtttaatatcagttcagcttctaggggtgttcatttggtttggtgttgatccacccaacatcatcatagactacgatgaacacaagacaatgaaccctgagcaagccagaggggttctcaagtgtgacattacagatctccaaatcatttgctccttgggatatagcattcttctcatggtcacatgtactgtgtatgccatcaagactcggggtgtacccgagaattttaacgaagccaagcccattggattcactatgtacacgacatgtatagtatggcttgccttcattccaattttttttggcaccgctcaatcagcggaaaagctctacatacaaactaccacgcttacaatctccatgaacctaagtgcatcagtggcgctggggatgctatacatgccgaaagtgtacatcatcattttccaccctgaactcaatgtccagaaacggaagcgaagcttcaaggcggtagtcacagcagccaccatgtcatcgaggctgtcacacaaacccagtgacagacccaacggtgaggcaaagaccgagctctgtgaaaacgtagacccaaacagccctgctgcaaaaaagaagtatgtcagttataataacctggttatctaacctgttccattccatggaaccatggaggaggaagaccctcagttattttgtcacccaacctggcataggactctttggtcctacccgcttcccatcaccggaggagcttccccggccgggagaccagtgttagaggatccaagcgacctaaacagctgctttatgaaatatccttactttatctgggcttaataagtcactgacatcagcactgccaacttggctgcaattgtggaccttccctaccaaagggagtgttgaaactcaagtcccgccccggctctttagaatggaccactgagagccacaggaccgttttggggctgacctgtcttattacgtatgtacttctaggttgcaaggttttgaaattttctgtacagtttgtgaggacctttgcactttgccatctgatgtcgtacctcggttcactgtttgttttcgaatgccttgttttcatagagccctattctctcagacggtggaatatttggaaaaattttaaaacaattaaaattttaaagcaatcttggcagactaaaacaagtacatctgtacatgactgtataattacgattatagtaccactgcacatcatgttttttttttttaagacaaaaaagatgtttaaagaccaaaaactgtgctgagaaagtatgccccacctatctttggtatatgataggttacataaaaggaaggtattggctgaactgaatagaggtcttgatctttggaatgcatgccagtaatgtattttacagtacatgtttattatgttcaatatttgtatttgtgttctcttttgttatttttaattagggtatatgaatattttgcaataattttaataattattaagctgtttgaaggaaagaatatggatttttcatgtcttgaggttttgttcatgccccctttgactgatcagtgtgataaggactttaggaaaaaaagcatgtatgttttttactgtttgtaataagtactttcgttaatcttgctgcttatgtgccaatttagtggaaaaaaacaacccttgctgaaaaattccctctttccattctctttcaattctgtgatattgtccaagaatgtatcaataaaatactttggttaactttttt

SEQ ID NO: 243359 - DNA, 4113 bp, Homo sapiens
gtgagcgcgagcgcggcgcgccggccggctaacccgagagcgcgaggcgccccaggctggcaggcgccgcgggacccctcaccctctctggtcgcccctccccggattcccccaccctccgtgcctgcaggagcccctgggctttcccggaggagctcgccctgaagggcccggacctcggcgagcccaccaccgttccctccagcgccgccgccgccaccgcagcagccggagcagcatggtccagctgaggaagctgctccgcgtcctgactttgatgaagttcccctgctgcgtgctggaggtgctcctgtgcgcgctggcggcggcggcgcgcggccaggagatgtacgccccgcactcaatccggatcgagggggacgtcaccctcggggggctgttccccgtgcacgccaagggtcccagcggagtgccctgcggcgacatcaagagggaaaacgggatccacaggctggaagcgatgctctacgccctggaccagatcaacagtgatcccaacctactgcccaacgtgacgctgggcgcgcggatcctggacacttgttccagggacacttacgcgctcgaacagtcgcttactttcgtccaggcgctcatccagaaggacacctccgacgtgcgctgcaccaacggcgaaccgccggttttcgtcaagccggagaaagtagttggagtgattggggcttcggggagttcggtctccatcatggtagccaacatcctgaggctcttccagatcccccagattagttatgcatcaacggcacccgagctaagtgatgaccggcgctatgacttcttctctcgcgtggtgccacccgattccttccaagcccaggccatggtagacattgtaaaggccctaggctggaattatgtgtctaccctcgcatcggaaggaagttatggagagaaaggtgtggagtccttcacgcagatttccaaagaggcaggtggactctgcattgcccagtccgtgagaatcccccaggaacgcaaagacaggaccattgactttgatagaattatcaaacagctcctggacacccccaactccagggccgtcgtgatttttgccaacgatgaggatataaagcagatccttgcagcagccaaaagagctgaccaagttggccattttctttgggtgggatcagacagctggggatccaaaataaacccactgcaccagcatgaagatatcgcagaaggggccatcaccattcagcccaagcgagccacggtggaagggtttgatgcctactttacgtcccgtacacttgaaaacaacagaagaaatgtatggtttgccgaatactgggaggaaaacttcaactgcaagttgacgattagtgggtcaaaaaaagaagacacagatcgcaaatgcacaggacaggagagaattggaaaagattccaactatgagcaggagggtaaagtccagttcgtgattgacgcagtctatgctatggctcacgcccttcaccacatgaacaaggatctctgtgctgactaccggggtgtctgcccagagatggagcaagctggaggcaagaagttgctgaagtatatacgcaatgttaatttcaatggtagtgctggcactccagtgatgtttaacaagaacggggatgcacctgggcgttatgacatctttcagtaccagaccacaaacaccagcaacccgggttaccgtctgatcgggcagtggacagacgaacttcagctcaatatagaagacatgcagtggggtaaaggagtccgagagatacccgcctcagtgtgcacactaccatgtaagccaggacagagaaagaagacacagaaaggaactccttgctgttggacctgtgagccttgcgatggttaccagtaccagtttgatgagatgacatgccagcattgcccctatgaccagaggcccaatgaaaatcgaaccggatgccaggatattcccatcatcaaactggagtggcactccccctgggctgtgattcctgtcttcctggcaatgttggggatcattgccaccatctttgtcatggccactttcatccgctacaatgacacgcccattgtccgggcatctgggcgggaactcagctatgttcttttgacgggcatctttctttgctacatcatcactttcctgatgattgccaaaccagatgtggcagtgtgttctttccggcgagttttcttgggcttgggtatgtgcatcagttatgcagccctcttgacgaaaacaaatcggatttatcgcatatttgagcagggcaagaaatcagtaacagctcccagactcataagcccaacatcacaactggcaatcacttccagtttaatatcagttcagcttctaggggtgttcatttggtttggtgttgatccacccaacatcatcatagactacgatgaacacaagacaatgaaccctgagcaagccagaggggttctcaagtgtgacattacagatctccaaatcatttgctccttgggatatagcattcttctcatggtcacatgtactgtgtatgccatcaagactcggggtgtacccgagaattttaacgaagccaagcccattggattcactatgtacacgacatgtatagtatggcttgccttcattccaattttttttggcaccgctcaatcagcggaaaagctctacatacaaactaccacgcttacaatctccatgaacctaagtgcatcagtggcgctggggatgctatacatgccgaaagtgtacatcatcattttccaccctgaactcaatgtccagaaacggaagcgaagcttcaaggcggtagtcacagcagccaccatgtcatcgaggctgtcacacaaacccagtgacagacccaacggtgaggcaaagaccgagctctgtgaaaacgtagacccaaacagccctgctgcaaaaaagaagtatgtcagttataataacctggttatctaacctgttccattccatggaaccatggaggaggaagaccctcagttattttgtcacccaacctggcataggactctttggtcctacccgcttcccatcaccggaggagcttccccggccgggagaccagtgttagaggatccaagcgacctaaacagctgctttatgaaatatccttactttatctgggcttaataagtcactgacatcagcactgccaacttggctgcaattgtggaccttccctaccaaagggagtgttgaaactcaagtcccgccccggctctttagaatggaccactgagagccacaggaccgttttggggctgacctgtcttattacgtatgtacttctaggttgcaaggttttgaaattttctgtacagtttgtgaggacctttgcactttgccatctgatgtcgtacctcggttcactgtttgttttcgaatgccttgttttcatagagccctattctctcagacggtggaatatttggaaaaattttaaaacaattaaaattttaaagcaatcttggcagactaaaacaagtacatctgtacatgactgtataattacgattatagtaccactgcacatcatgttttttttttttaagacaaaaaagatgtttaaagaccaaaaactgtgctgagaaagtatgccccacctatctttggtatatgataggttacataaaaggaaggtattggctgaactgaatagaggtcttgatctttggaatgcatgccagtaatgtattttacagtacatgtttattatgttcaatatttgtatttgtgttctcttttgttatttttaattagggtatatgaatattttgcaataattttaataattattaagctgtttgaaggaaagaatatggatttttcatgtcttgaggttttgttcatgccccctttgactgatcagtgtgataaggactttaggaaaaaaagcatgtatgttttttactgtttgtaataagtactttcgttaatcttgctgcttatgtgccaatttagtggaaaaaaacaacccttgctgaaaaattccctctttccattctctttcaattctgtgatattgtccaagaatgtatcaataaaatactttggttaactttttt

SEQ ID NO: 243360 - DNA, 2714 bp, Homo sapiens
ggagggagacggagaaaaaatgggaggaaggcggatccggggccgctgagcggtgggttctgccgcagtgttctctcgcctcctgctccagcagcctctgccccatggctcctgagctgcactggggagatgcccttctatcctgtctcagtttcccaatcctaaacgtccttcaaaaatcccccagattagttatgcatcaacggcacccgagctaagtgatgaccggcgctatgacttcttctctcgcgtggtgccacccgattccttccaagcccaggccatggtagacattgtaaaggccctaggctggaattatgtgtctaccctcgcatcggaaggaagttatggagagaaaggtgtggagtccttcacgcagatttccaaagaggcaggtggactctgcattgcccagtccgtgagaatcccccaggaacgcaaagacaggaccattgactttgatagaattatcaaacagctcctggacacccccaactccagggccgtcgtgatttttgccaacgatgaggatataaagcagatccttgcagcagccaaaagagctgaccaagttggccattttctttgggtgggatcagacagctggggatccaaaataaacccactgcaccagcatgaagatatcgcagaaggggccatcaccattcagcccaagcgagccacggtggaagggtttgatgcctactttacgtcccgtacacttgaaaacaacagaagaaatgtatggtttgccgaatactgggaggaaaacttcaactgcaagttgacgattagtgggtcaaaaaaagaagacacagatcgcaaatgcacaggacaggagagaattggaaaagattccaactatgagcaggagggtaaagtccagttcgtgattgacgcagtctatgctatggctcacgcccttcaccacatgaacaaggatctctgtgctgactaccggggtgtctgcccagagatggagcaagctggaggcaagaagttgctgaagtatatacgcaatgttaatttcaatggtagtgctggcactccagtgatgtttaacaagaacggggatgcacctgggcgttatgacatctttcagtaccagaccacaaacaccagcaacccgggttaccgtctgatcgggcagtggacagacgaacttcagctcaatatagaagacatgcagtggggtaaaggagtccgagagatacccgcctcagtgtgcacactaccatgtaagccaggacagagaaagaagacacagaaaggaactccttgctgttggacctgtgagccttgcgatggttaccagtaccagtttgatgagatgacatgccagcattgcccctatgaccagaggcccaatgaaaatcgaaccggatgccaggatattcccatcatcaaactggagtggcactccccctgggctgtgattcctgtcttcctggcaatgttggggatcattgccaccatctttgtcatggccactttcatccgctacaatgacacgcccattgtccgggcatctgggcgggaactcagctatgttcttttgacgggcatctttctttgctacatcatcactttcctgatgattgccaaaccagatgtggcagtgtgttctttccggcgagttttcttgggcttgggtatgtgcatcagttatgcagccctcttgacgaaaacaaatcggatttatcgcatatttgagcagggcaagaaatcagtaacagctcccagactcataagcccaacatcacaactggcaatcacttccagtttaatatcagttcagcttctaggggtgttcatttggtttggtgttgatccacccaacatcatcatagactacgatgaacacaagacaatgaaccctgagcaagccagaggggttctcaagtgtgacattacagatctccaaatcatttgctccttgggatatagcattcttctcatggtcacatgtactgtgtatgccatcaagactcggggtgtacccgagaattttaacgaagccaagcccattggattcactatgtacacgacatgtatagtatggcttgccttcattccaattttttttggcaccgctcaatcagcggaaaagctctacatacaaactaccacgcttacaatctccatgaacctaagtgcatcagtggcgctggggatgctatacatgccgaaagtgtacatcatcattttccaccctgaactcaatgtccagaaacggaagcgaagcttcaaggcggtagtcacagcagccaccatgtcatcgaggctgtcacacaaacccagtgacagacccaacggtgaggcaaagaccgagctctgtgaaaacgtagacccaaacaatttttttttttggctgtacagtggaacttggattacactttaaattaactttctctaggaatcaaagtaacctctgaggacctcagcttgcacaaagaggattgagataacatttccaaagcttgttcttcttgagctgacccaacacttaggaaaacatgacatggatcagcaactccattttctgtgagaagtgcaactgctactgaccatctgcactggcatctagtcaagcgattgtctgaggaaaggattttggagattcccatctgatattcttctatttggtctcttgtacccattgtcatcctgtaccacacataataaagtttaagaatgtcaagcaatcaaaaaaa

SEQ ID NO: 243361 - DNA, 412 bp, Homo sapiens
gccaggagtggtctgacatgctgttacaggttgaaacccttgtatctgagtttcatacaattatcatcttaggttcagtgctctgatagtgcaagagttcttgaaagtaggaaatgttggctgggcgtggtggctcacgcttgtaatcccagcactttgggaagccaaggcgggtggatcacctgaggtcaggagtttgagaccagcctggccaacatggtgaaacccatctccactaaaaatacaaaatgagccaggcgtggtggcacatgcctgtaatctcagctactccggaggctgaggcaggagaattgcttgaacccgggaggcggaggttgcagtgagccgagatcacgacattgtactccagcctgggcaaaaaagagtgaaactctgtctcaaaaaaaaaaaa

SEQ ID NO: 243362 - DNA, 143 bp, Homo sapiens
atgaggaacttgagattcaagaagaggaagaattgcccaaataacttgttctttgtggctagaaaatgcttacatggaactcaccaggccacattcatattactatgtttgtgatcatccaaacataaaaccagttcctaggc

SEQ ID NO: 243363 - DNA, 470 bp, Homo sapiens
tagatggcattcgatgacctcctaacaaataatctgctacaaccaatagaggagctgtaacactcaccatgaaggtctgcagcttcactcctgaagccagcgagaccacgaacctactggaaggaatgaacaattccagatgcgctgcttttaagagctgtgacattcaccataagggtctgtggcttcattcagcgagaccaagaaccgactgattacggggacactgggtctacaggtgtgcaccaccacacccagctaatttttatattttttagtagatagggggtttcatcatgttgtccaggatggtctcgatctcttgacctcgtgatccaccggcctcggcctcccaaagtgctaggattacaggcgtgagccaagccaccgggcctggccacttacaacatttttataaacaatattttaaagcaataaatctccctttcctcatggaagaaatgtgaaaa

SEQ ID NO: 243364 - DNA, 563 bp, Homo sapiens
ctagaaaaatataaaaccaagtagagtgataaggagcgaatggggtggaatctgttaggttggtgcaaaagtaattgcagctttttgtcattactttgaagtgcaaaaactgcaattatgtttgcaccaacttaatactttatatgggacggtcagggaaggcctcttagagaaggtagtgtttgaactgagacctgaataatgagagaaggtaggcaagtgaacatctggagcaacagtgttctaggcagagggactagccgctgcagaagccctgaggtggagaccgacagaaccacagaatgacagaagattattgaaagaggagcaatgtggagcaagatgcggtctgagatttaggtgagaagcagagtgtgtaagaccttgtagctcctagtgagggatttaggtttatctaaggacccagagaaactacagaaggtgtcaaggaggaagtgagagatgactattttaacaaagatgttctattttcacttttgcaatgagatactgatatttggaataacttaccaaagacactgaaaatattggacaaaaaaaaa

SEQ ID NO: 243365 - DNA, 407 bp, Homo sapiens
tcgtgtgcttaggtgccatatataaaatatatatatatggctcatatataaatatataaatggctcatatatataaatatatatggctcatatatataaaaatatatatggctcatatatataaaaatatatatggctcatatatataaaaatatatatggctcatatatataaaaatatatatggctcatatatataaatatatatatggctcatacatataaatatatatatggctcatatatataaatatatatatggctcatatatataaatatatatatggctcatatatataaatatatatatggctcatatatataaatatatatggctcatatatataaatatatatatggctcatataaatatatatatatagtacgtgtgtgtgtgcgcaaaaaaaa

SEQ ID NO: 243366 - DNA, 318 bp, Homo sapiens
tcaggagactcttgaatcttatggagacatgttagtgagtctatgggccccaggacaagaagtccttaaacctaaacactcaacacactttttttttttttaaaaggcttgtgcttttctgacatttaataaacctaaattcaacatgatggtggcgaagtcataaaatactttgccaccatgctaagtgttcttaaaataagacacattcttctaatgtcacattgagaaatagagaactaacatcatcatatattggctactgcatagtaaataacaaaatgttgtagagcgttaaataaaaatcatcacagtaaa

SEQ ID NO: 243367 - DNA, 446 bp, Homo sapiens
tcgttttatgatttcgattaggcatttcattgctacggtttaataattgaatatacaagaaatactataaaccatcacatccccaacagcccccagccgcccagttcccccatctacttggcaaagattctctttttgaccaaactctaggcggcttcttctgagccctcttctggactaggtggccaccttggtctataaagacctgaacaaacccgaacatagttactaatagccccggtcttctcaagtgcctgcctgagaaaactcaattgatgccgccaaaggaatttactgtttgtttcagtcaacgtctgaagatagggccctcgtctcccaggctctggtaggagtggagcctgattttgatatgtgccagttatgaaacccagatggttccccactgtcagtggttactaaataaaatctgttttcgtcatttaaag

SEQ ID NO: 243368 - DNA, 698 bp, Homo sapiens
actgaccttcctcagattgagaactgtttccagtatatacatcaagtcactgaggtaggacaaaaattgctacagtcctattattttatggttattataagtgtaccaggactctaaaagaaacttgtttgtataatgctatccaaggtatgtagcccagggaataaccaacctgatgtgtgttatgacccattttaagcctcccgtgatcacagtttttaaaataaaattaaggactggtccttttctaggtgacacaagtaaggtaatagctagaacggaaaaaagaggggcccccaaaaatgtaaccttaaaatttggtgcttgtgccgctattgatagtaagcagcatggaataggatgcggttctctaaattggaaaaaaaaagtgacacagtaaaaaaaaaataagtgtatctgtcaagaattgtatttatgtgagatgtgtcaatactggtcttgtgtcatttgggctacttaaaaagaagataaaaaagatcctgtttggcggcttagttgtcttgggcaaaaactgtataatggtaccacaaaaagttacatggtggagttccaattacacagaaagaaatccattcagtaaatttccaaagttgcagactgtttgggcccacccagaactccaccgggactggacagcccccaccgggttatacgcagagcttatgctaagctccctg

SEQ ID NO: 243369 - DNA, 291 bp, Homo sapiens
aatgcaaaagaagagaaaggtgagcctggcagagtggatcagtgttccaggctgagctgtcccacccagtgggaaggttctgcacagcctggtggcaggcctggccatgtgactggccccaaccagtgaatgagggcagaagtgacagccacaactttctaaaggacctttaacatgtgttcctctgtctgtgcccatgactgtcaatttcctgggatagaggctcctcctttagccaaggccctggatggacagtagcacaacgaagaaataaacctttgctacagtaag

SEQ ID NO: 243370 - DNA, 214 bp, Homo sapiens
gcacacatgtgcagaagtagctgaaggctgagggtaaagcagaagcactgaggaatgtcctttggtaacctcaaatcacaaggttatagcagtccactgctggaggaatttgaagcctttgttgatatacaatgaactctaaattcagcccaattcatgactataacgaaaactaatatactaccactcaattaaaaatgtcaggacatacaaa

SEQ ID NO: 243371 - DNA, 597 bp, Homo sapiens
cagagtctcactcagtcacccaggctggagtgcagtggctcgatctctgttcactacaagctccgcctcctgggttcatgccattctcctgcctcagcctcccaagtagctgggactacaggcaaccgccaccacacctggctaatttttttgtatttttttagtagagacggggtttcaccctgttggccaggctgttctcaaactcctggcctcaagtgatccgcccaccttggcctcccaaagtactaggattacaggtgtgtgccactacacatggccaaagaaagtttaaatttaagataatgtagttactatggccagttaaagacataccacacaaccacaacatgcaagacacttccacaataagagaaacagaaataagatgtttaatattaagtagaggagattaagaacaaaacattaatagctgtattcaaaggtaaagtgtatgaaaaaaatttaacaagacagtcatatttgacatgtgctttaaaagaagaacattcaacaggctgaaaatccagggcaaataagggagaacatttcaggaagctaggacagcatgagcaaagggacaggagaaaagctcat

SEQ ID NO: 243372 - DNA, 442 bp, Homo sapiens
cagatcttggagggatggcatttgttcttttgtcacttcaaggatagcaagttcccatccaggaatgttaaggtgaaggtgaagctcactgggtagcttatgcagagtatttatcttccttataaatcacacaccttttctctgctgtgaatggagatttccaactaacatcccaagtgtatgtctcttccctgaccacacaggttgttatttacacagatggcttcccacagtcagacttatttttacctgtacaccatcttcctttttcttcccttacaatcatccagggctcttttccttgctccaatgatgtaattacatctggcttagaaaagtcatgtcctgcttacaaagaaaaaaaggccacttgatatagaaacatactttgctgtcaaaattacaattgtaataaatcaaggatcaaaatgaaaatgaataa

SEQ ID NO: 243373 - DNA, 666 bp, Homo sapiens
aggttaaatctactctaacatgatttacccaggcctcctatgacctacctctctggctgtatctcctgtctccctagttgtaccatttgttctagccttactgaaccacacttctttcccagattgcacagtgtgctgagccttccccacggtatcctcttaagatgtcaccttagataacagttcatccaggaagccttcctgattttctttggcttggttgggtaccttgctttatattccctatatgaatgcttttcctactagctatatgtaaatttttcttacgatagtatcacttgtttagttgtttatcttcttcactgttttttctcaagccttcagcacagggcctggcaaataatagatacccttcaaattttttgagcctatcaactaattggtcaatgtaattttataccgtgttccaataaagatttaaaatggctaacataaatttgtatcatataataatagcagtgccccagcctggttaagatgacgaaaccccatctctactaaaaatacaaaaattagccaagcattgtggcacacacctcttaatcccagatattcgggaggctgaggcacgggaatcgcttgaacctgggaggtggaggttgcagtgagctgagattgcaccactatactccagcctgggtaaca

SEQ ID NO: 243374 - DNA, 421 bp, Homo sapiens
ctgccaccatgcccagttaattttagtatttttactagagatggggttttgccctgttggccaggctggtctcgaacccctgacttcaggtgatctgcccacctcagcctcccagagtgttatgattacaggcatgagccaccgtgcctggcctggatcttctcttttctaaggaaaagccagaaattcgaattatttacttgagatctgtcaattttactttttttttttttaactatatggaccctaaagcaaatgaataaataatatgatatttgaatacgttttccagaacatccattttaagatacgtcatttttttagtttaacattaaaaaaatcgtgtggcccaacattatatgagccaaactcaccatctctgtatactggaattggcctgctataaccatggaaaccctaa

SEQ ID NO: 243375 - DNA, 529 bp, Homo sapiens
ccaagtttctgagatgtaatcagaaagctgtagtggaaggaaatttgaaccagaagactgcagtcctgtctatgaacgttaaacctgtgtggcttaggaaacgagtctaacctcgtctgagcctcagtttgttcacctaaaagatggagatgagagctcatttgtctcattctcaggggttatggtggccatccagacataaagaaattagaacgttcattcatctgcagatgctcacacattcctacaggatgactgaaacccacagcaaacaatcctcatggaatacagctcagctcatcctgaagaataagtgggaggtcagcctcacgggaaattcgatatctccacatgcagctgtcatgccacatggaaacagtcatgcatagggtcctgtcacctggtagactgaccccaggtccactgacccctgacaatcatcaaccgcttctgagggctccatgattgagatttgtccccaggaactcaggggaaactatatattgattaaaatgaactatcaaaatca

SEQ ID NO: 243376 - DNA, 531 bp, Homo sapiens
tctggcagcttaccagggcccgagatatttttagtactcaattttgaagcacagtcctcagctggtttccaaaggagtgtctatgctggcctgacactggcactccagagttctgcattgtgtcagttggaaacatggaatcatttgcaggaaaagccctggccaaccgctggttccaacccctctctatttatgcattctcttccttttttttttttttaaacctgtgattcatatgatttgagatccttttacaaattctatcacatgatgcgcaggggagagctgcctgccacagagctgagcacgagagtctagcacctgcgctgcctcctaggttggggttccaccctgccccgaaggcttttgtgactctgcgtgtcaaaaggggtggcactcagaggcgccacaaggaagcagcaggactatgcattgcagagtatttctcctgtgtgcccctaagcacttagcatgtatacagagtaggtccttggaaagttcttgttgaataaatgaccaacttttccttcc

SEQ ID NO: 243377 - DNA, 786 bp, Homo sapiens
aaaataggcctggcatagtggctcatgtctgtaatcccagcactttgggaggctgaggtgggtggatcacctgaggtcaggagttcgagaccagcctgaccaatatggtgaaaccccgtctctactaaaaatacaaaaattagctggacgtggtggcacgcacctatagttccaactactcaggagcctgagacaggagaattgcttgaacccgggaggcggaggttgcagtgagccgagatcacaccagctgcactccagcctgggtgaaaatgagagtctgtctcaaaaaaaaaaaaagagttcttctggcagggactagaggcaggagactgggtggcaggcagggacctgagcaggaggggaggggccttggccaggatgtggccatggggagagagaaaggtatggtttggagagagatgtgggaggtagagaggctgggatatggggagcgtggtgctgggttttgggaccagggacaagaggagtagaggctgatgttcagattttcaggttacgagagagggacatcattctggaggctttatgggccggtgttccctccccatcctcagcgtgaagctgaccaggggctcagtctgcctcctgggggtttctcctgtacccaggaaaccagatcgggcctcatgtcctgcggcagggcctgacaggaggatggagatctgggcccttgccctggggctgggtagcgaggccggctggctgctgcttctgcctctgtctctctgtcctgccccatcttccatccctacctttgtcatt

SEQ ID NO: 243378 - DNA, 347 bp, Homo sapiens
tacacacacacacacacacacacacgcacacacacacacacacagagtcaaatgtataagtactatataagctaataagctataagctaaaggggaacataaaaatgtatacacaatatctgtattgttttgtcatagaacttcagaaattaaaaaaaaaaaagctagatttattgaaattcatggcaaagatcttttggcttgaccataatggagtagctggtgtagcttttactttctcactataaggtatatacccaaaggactataaatcatgctgctataaagacacatgcacatgtatgtttattgcagcattattcacaatagcaaagacttggaaccaa

SEQ ID NO: 243379 - DNA, 723 bp, Homo sapiens
  misc_feature (723)..(723): n is a, c, g, or t
tactaaattccctgtgagattacagcctgatgggtttcccattctccatatttatttatttaaaatacagacaggcgtctcgatatgttgcccaggctggtcttgaactcttggccacaagcgatcctcccgcctctgcctcccaaaatgctaggattccaggcctgacaccgcgcctgaccccattctcctttttgagattttcttttcgtaacttctaagtctttgatttctgacttatttcgctgcttcagtaacaagccaagaggcctggcgacatctttaggtttgaaggcaatgggaaatagctgatgttctccatttcccatggagggatttcatgtagggattgttcctctcaaaaccaccaaagcaccttcttccaagtgaatcgattgcctcaaacaccaggcttaatgatctccttgcctggataaggtgttccaggtggtactgtaatttccgagttgtggtgcatccatgaggtgcctgcaggttcccacagagacagcagctccaaaatgtgcacgttgaaacttgcaagagactaaccgttgcctctgaaagcagttggcatgtatattcatcgtgactgttttacacatttgataacaaaaacaggagcaaaatacaagataaggcttggcagggtagttttaccaaaaccgaaggacaaatatataataaatattcatgcggccgcatttgagctatttgccattn

SEQ ID NO: 243380 - DNA, 183 bp, Homo sapiens
taggatgctgcctcactgttaggcaccttctttggctgctcacgtatttttcagtcttcaccactcctccctatgtgccatggccctcctcattactctttgctggactcttggaccattttccttgctgttctccataactttgaaaaacttttggctgttcccttctggtatttgcttgtt

SEQ ID NO: 243381 - DNA, 360 bp, Homo sapiens
aaacttgggaaggtttgttcagatttgagtttaaggactggaaggtgagttaggagtacttcttctgaagaagggaccggctaagttaaagcttagcgttcacaatcctgttgtattcatatttgtcttttttttttttaactttgctacctagcctaaaatatttaagtgagtaataagtactgtggctttatataatgtttgagtttagagtaatgataggcacctttttattcattcattaagtattttgagtatccattgagtatcagcaatgtatcaggcattgtgggacattgactcagggagataggcgtggttcctgtcctcaaggaatttttaaaaggtgaatgatcttgg

SEQ ID NO: 243382 - DNA, 463 bp, Homo sapiens
ttacataactatatatgctatgtaataatactcagcaataaaacttgatgcatgaaataaaatggctgaatttcaaaagtatcatgcaaagcaaaagaagttacatacagagactatatgtttccatttatataaaattctagaaaagattaaagtataggagtttacagctccagccaggggctgggggtagaaaagagggcttattttatacaggcataagagaatattttgactaatgaaagtgttatctattttgattgtggtgatggttgtacgactgcataaatctgatgaaactttgaattctgtacacaaaaaagggttaattattgtatgtataattttatctcagcaaacctgccttaaaaactgattgcagggaggccgaggtgggtggatcatgaggtcaggagatcgagaccatcctggctaacaaggtgaaaccccgtctctactaaaa

SEQ ID NO: 243383 - DNA, 394 bp, Homo sapiens
ttgattataaaaattgagtaattcttttcataactaaataaaacagagtggagaatccagtgggaaaacattctgggtacaaagcattgctccaagaatgtaattatctgcaagcctggctgctgaaactgcctgttgtaaccagaaaccagttttatctgtagcttctgaagtagcttactgcaactctagaactaatgtttgctcacactgttgtcacgcaaaaatcggagcttgccagctcaccaaatccttacaaatatcaatgaactttctcaaaaagcaatatgtaaaacctctaaccttctctttgctctttggagataccgaagaccacgtgtatgccctgaactgcaattctttcttcccaaataaaacactacatttagagatt

SEQ ID NO: 243384 - DNA, 495 bp, Homo sapiens
agggtcatctctgtgcccatgcggtcaggttggggctgaggcactttgatcattgctcctcctcagagtgttcttttcctcccctctcagattataataacgaggtagttacagagtgagctccagcctagatcgtctgggtttgaatccagctccatgactgtggccgtgttgcctaatctctctgagtctcagcttccttttctgtaaagtgggtataatagtagagtctacactgtggggctgtggtgggattcattgtgttcacacgtgtgcagggctgagaacagggccccaaacagggtaggcacaatgaagcatgagtcagaataataatacagatgacagtttctctatcactaatttgaacattgcagacagtgcaaagaagaaaattagaaactgggaggatcacttgagcacaggagttcaagtccagcctgggcaacatagtgagacccctgtctctttttaaaaaatttagcacaatttatt

SEQ ID NO: 243385 - DNA, 458 bp, Homo sapiens
ggggagagagctgcacagagtgaactccagagacctgcagagggtcccctggagtcttcagctgatagccgagcagcacacgaacgtgaggaaactactgaggctgagcagggaaccactggaaaggggaggctgagcagagaaccaccggaaaggggtggctggaacaattgctggtgctcacgcaggaccgggaatagtgtatgtgcccccagccagaacagaaacccctcctaacacacaggtcctgcagggggggtcctcagaaggatactgcctcagcagttgacaaataagtcctagaccaggcataagcaaacttcctgaagaaccagagtgtagacatgtgaggctttaagggccatatgttctctgtcacaactactcaaatctgctggtgtaacacaaaagcagccaaacaaagtatataaataaatatctatgttctattgtttata

SEQ ID NO: 243386 - DNA, 450 bp, Homo sapiens
aaaagaggaccaaacaaattctggagctgaagaatacaatgtcagacattgtattcaatagagagcttcaatagaagatgtgatgaagtggaaaaaataattaatgaactcggccaggggtggtggctcatgcctataatctcaacacttttggggggccaaggtgggaggatcacttgagttcagaaatttgagaccagcctgggcaacatggcaaaaaccctgtttctacaaaaagtacaaaaattagctgggcatggtggcacagcctttagtcccagctatgtgggaggctgaggtgggagaatcatttgagcctgggaggtcaagggtgcagtgatccccgactgtgccactgcaccccagcaagggtgagagagtaaggccctgacttttaaaaatacaaactcaaagatagatcattggaaattatccaggcagagtaacaaa

SEQ ID NO: 243387 - DNA, 521 bp, Homo sapiens
cagcgcagtggtgtgatcttggctcactgcagctttgaactcgtgtgctcaagcagttctccccacctcagcctcccaagtagccaggactacaggcaagctaataaatgcctggctaatttatcttttctagagatggggcctcactgtgttgcccaggctggtcttgaactcgtggcctcacgtgatcttcccacctgggctttccaaagtgccaggattacaggcgtgagtcgccatacctggccctattctttcttctgttcttttccacaagactgttaacttcagtggcttttttcctgttggaaaactttctacctttgatgatttaattttatcagctttttaactgttttaactgttcttaattctgtcttgtcaaccactggtatgtcaaaggaggcctcaaaaggctgaagcgattttcctcaaaaattacaactcttttttttcctgatattgtatataatgtataattaacactgttcactattaaatctttgcttagcaaaagagaa

SEQ ID NO: 243388 - DNA, 411 bp, Homo sapiens
aaaggtccattctcagtcctcatccgatttgacccttcagcagcattggaaaagatttattgagtgcttccaactccttgaaacattttctgcatttggcttctaggacaccacacactgctttgttttctctgtcacctttgccagtttctcctttgtccatgaccttgtaatgtcagctctttgtcttctttttaaagacactcccctttgatgaccccattttgtctcatagctttaaataccattggtatgctataacttccatgtttatatttttaacctaaatcttttcctaaattccagatttatatacccaactgcctactcaacctttccacttggatgcctaagcacatctcaaggtgatcatagctaacacagaactcttgggttttagcctgagcctgt

SEQ ID NO: 243389 - DNA, 260 bp, Homo sapiens
caaattcaaaattattctaaaatgcaaagttgatttaagaaaaaaaactaaattaccagaaaaaaataaagcaagaaaaagccaaactgttatgatatgttaatgtaggttcatcaaaggtactgctgtggtaggggatattgataattggggagactgtgcatgtgtggggacaaggaggtatctgggaaatctctgtaccttcctctcagttatgctgtgaacctaaaactgctttaaaagataaagtccttaattta

SEQ ID NO: 243390 - DNA, 413 bp, Homo sapiens
cagtggccctgggggtctcctccagctccacctcatgacaccccgtgctgctgcgtgactgctcctggtgccaaggccaccgctgccatgagtctgaatggctaatgctgagattagcagggcctcccttctactggcctgtcctcctggctctcctcccttttgcctcttctggatttcagggagcttttctgtgccaaaccaggaatcacagacatgcaggggcaagagggtctactctagcacggattaagacgacctcctaaagccatcttatgcccaagtaaataagtatccaataaacagacaatatctcaacagaaaaacagcacccactgaactcaagtgacctgcaactttcctgaagacctatatggcaaggacagacaataaagccagctagagaatgaaaa

SEQ ID NO: 243391 - DNA, 429 bp, Homo sapiens
cagtggccctgggggtctcctccagctccacctcatgacaccccgtgctgctgcgtgactgctcctggtgccaaggccaccgctgccatgagtctgaatggctaatgctgagattagcagggcctcccttctactggcctgtcctcctggctctcctcccttttgcctcttctggatttcagccattgcaggggaaatcctcatctttcccactcactgctacactcactgtgatgtgtttatagaccttcggggaccacacctcctccagctgtctgccttactcgaaaattagacccagcttgtccctgacttctagtagccagaaagtcttccacaagatccagccgcatgatacggagtacacacataaatgtgaaaacaaacccctccatcctttcccactgtaaatcaacagcacatgccctc

SEQ ID NO: 243392 - DNA, 330 bp, Homo sapiens
cactggtgtagtggaagcagcacccttggcgtgcacacaggtgtatccccagagggcagcctgagagcgcagcgcagagcatccgcaggacttgagtgggatcggaggtcaggaaccagtgacgttctggacacacccattattttcaactggttggtaccaggttgggccagtaggacctgcaaatactccagttgtggaagttaacagagtgtcctctctaggcgctttaattgccaccttcataacagccttgaaaaattccacccgccccccaaccttttaaatttcttttcttttcttttttgtcttttgaaacggagtctcact

SEQ ID NO: 243393 - DNA, 542 bp, Homo sapiens
agatcccacttcttaatacacttcgtaatcccacttcttaatatatgatagctgcttaatgtccttgtctactgattcttttgtcttggtaacttctgagcctgtttctactgactaatttttatcctggtcataggtcaaattttcatgcttttttatatgtctagtaatttttgattggatattgtatattgtgaatgcagtgtgattgggtgctagattttgttacatttctttaaagagtgttggaatttttttttttctcctggcgtacagttaagctacttaaagattactttggtcctttttagctttgtttttaagctctttttgagtagtttagagtaccttttactctagaaccaatttagctccattcctaaagcatggtctttttgagttcccttctaaattccatgcagatttagggaggtctctttattctggctggagggaagttgaatgattccataacctgtgtgaactctgggaattgtttatttactgctcccggctgataatagttctttccttagatcgtt

SEQ ID NO: 243394 - DNA, 547 bp, Homo sapiens
atcattttgtggttcacttaaatttgttggctttattaatagtcattacagcacagtaaaaataactatttctgatctatttccattatttttaaatcagccgttagataactagatactcagaccaagctttttgaagttagtttggttacaagattacacgttattcatccataagttcagtgagggccccaattaactctgtctcagattcaaatatggaagatacagcaaaacaaaccagaaaagctatgcagaaaatgacttaatacatacaacctagatcaaaacatcataattcatttataggattataataaacatcagttaaaaaccacatggaaaagaaaaccacattctaaaatttatcggttttgcatcattcattattccataatgccaaactatttcaagaaatcatttaattctggaagactagatatcagtctgcttcaatactggtgaattggttatcaattttttttcacatagtcctttggtgtggattttataaatgatctcagaaagagatctaagagatcaccta

SEQ ID NO: 243395 - DNA, 169 bp, Homo sapiens
caccttttaaggttagcaatacctgccaactaaaccatcctatagtatgccttaatattgtagggatctggtcactgatcaaaataatggtcactgtagagtaagaggtaggtgtgatctcataaatcattagaggatttggacagatgcaaccaggccgtggctaaca

SEQ ID NO: 243396 - DNA, 508 bp, Homo sapiens
ggcacgtgcaaccatgcccagctaattttttgtatttttagtagagacgaggttccaccatgttggccaggttggtctcaaactcctgacctcaactgatcctcccatcttgacctcccaaagtgctgggattaaaggcgtgagccaccatgcccaaaagttcttattgcctgcctagaacttccagaaccatggtgaataaaagcagtgataatagatgtgtttgtcttagtcttgattttaaagcaaatatacttaacgtttctccgttaagtataaaagttttctatgggcttttcatggatactttttctcagcctaaggatatttttttctcttcctagttggctttgagtttttatcctgaaagaaagttgaatgttatcaaatacattttctgtatctgttaagatgatcatttttttcttttaactgttaagatagtgaattttactgctccatctagtattaactcatttttttttcctgcagtaaactcaacttggtc

SEQ ID NO: 243397 - DNA, 388 bp, Homo sapiens
agctcaggtgactctgtttggaggccttcttatgaggagatgggggagttggctgaggcacttcccaggtacctccactgaggcttccttttggaggctttgactaaggtatttctgtcttatctgactcagtacttttctgcttctagcccttcctcctcttcctccccgtgggcccctgggttcatgaagatgcagagaggcagcagccttcttcagggcttctcagcagtgagacagtgtgccccaccccgacaacccagcagtgcatatttatctcaccctttcctagggaagtaatgaaacactggagaactagcacctctcattttgccccttgcttatactgtggcaagaagtgaataaaaacttgatggttacttttaat

SEQ ID NO: 243398 - DNA, 312 bp, Homo sapiens
cagctacagttacatgaaatatacatacacggacatacatgtttttactcaataatttatgaccagcccgactttgaggaaactgaggcctaaagaattcaagtggcttgtcataggtcacaccatcaggaagtggtagagccatgactccaaatcagacctatcagactcaaagtccacctcagccaccatcaccttgtcaacaacaacaaaggcctcgatgtgttgagcactttctgttgaccagacatcttctatgtaatatttcatttaccataacaagcccacaataaagatgtcattaacatcaaa

SEQ ID NO: 243399 - DNA, 302 bp, Homo sapiens
ggctaattttttatatttttagtagagatggggtttcaccatgttggtcaggctgatcttgaactcctgacctcaagtgatccacccaccttggcctcccaaagtgcaggaattacagatgtgagccaccatgcccagcctaaatcatactttttaatgttgaacttaaatgtagttaaatcgatgcactttgaatttgttacccataacgtatgttttaggataataggagaatttcccggttttcagcattagttcctggtatttacaatagttcctgtaataaaaagctgaattatgta

SEQ ID NO: 243400 - DNA, 404 bp, Homo sapiens
ctgtttaccagtgtttaaattacaagtgagaaatgtctgagagccagttctgtataagggtatgggcttaaaggtatggattttgtcatctttattttggctgcaaagcagggattcgagaggttgccttatagtcaacacatgatgaatggtgtgcttttcctgcttttttggtgcttgctatgtaagtagattagggtaaagtagggtaaatgagagttataaaagaacatttcgaatttaatagatttaaaaggaaatattactgctaattcttcaattctagctgctcctacccccatcccaaccttacaactatcttctctggtgagccataaactcttaatcctcattttaacctttcttttaatctggcattttgctgtcacatgtggtctccctat

SEQ ID NO: 243401 - DNA, 383 bp, Homo sapiens
  misc_feature (1)..(1): n is a, c, g, or t
  misc_feature (20)..(20): n is a, c, g, or t
  misc_feature (22)..(22): n is a, c, g, or t
ncccctggggtgcatggaantntggcacgagggctaacacggtgaaaccccatctctactaaaaatacaaaaaattagccgggcatggtggtggaagatgcctgtagctgaggcaggagaatggcgtgaacccgggaggcagagcttgcagtgagccgagatcgcaccactgcactccagcctgggcgacagagcgagactgtgtctcaataaaaacaaaacaaaaacaaaaacaaaaccaaaacagaacctcaatagaaagaaatccaattcccataatgttctccatgttttcagggtgggagagacagtgagcactggagcacctatttagccatgcaacaggggagctctttaactgtaaaggtcactttgctatggat

SEQ ID NO: 243402 - DNA, 1173 bp, Homo sapiens
taatgtagagatgaggtcttaccacatctctacataaaaggtggttatggagacccaaggtggtctcaatctcctggccacaggcgatcctctaaccccagcctcccaaagtgctgggattacaaacatgagccactgggtcccagccctggcttctttttcgtagatattattttaggagtcattttattgtaatatcagaagtattcatcatctctgtactataccgttctattgcatgactctccaccatatacttatccatcctgcttgctcagggacactggattgttttccattttaacttgctatgaacagtcctgcagtgaatactcttatacagaggagcaggcatggggtatgtactaatgaatgggactgctggctcagcggcccgcctggctttccactctattaaattgttttccaaagttatactggtttatgcgctcgctcaccgctcaccagcagggtagaagaattcctgatgtttgcaccctgcccaaagctggtgggtgtagcgtggtatcctaaggtagttttagtttggatttctccagacttctctaacttgaggaccttttcatattcactggccgctgtgattgtgcttttgtaatgtacctgctcaagtctttcactcttttctcattgcaaacgtacatcctaggtttccagcaggagaaacaggcctgtccatttctgacacaagatgggtgaatcggtaacttttctggtctgttttcccactgcttgttatccttctgttttctttaatggctttctgcctagatcaggagggacagactttcttttgaaacccaataacacaactgttatttcagtacagagctaagacagaaatagcagacatagttcaatggtccctgcacctagagagtgccgtggaaacagggcccagtcaccctccaactgcacagtcccatgaagccaaaaagacaatccaggttggagaatgtcacctttcatttaaggccaagttttgcagagtctgttttatttgtttttaagtctgctgcctaacttcttttgggtttttgtgaacttagaggacacataatctcactcttctagcagtttctctaggaggtgataacaatgcggacaaataattagccataaaacatcttggccaggcgcagtggcccacgt

SEQ ID NO: 243403 - DNA, 249 bp, Homo sapiens
gtaatatttatttcttataaataaatacatatatacacatagcagtcatgtgctgcataacgatgattcagttagtgacagaccccatataggacagggtcccatatgattataatggagtatatttgagccaggcatgatggctcattcctataatcccagttacttggcaggcagaggtgggaggattgttcaagaccagcctgggcaacattgtgagaccctgtctctaaacaaaaaaaaaaccca

SEQ ID NO: 243404 - DNA, 358 bp, Homo sapiens
aataccagcatatagtatctgacggagactcctgagccttccctgaaatttctacttcattaaaagtggacacttgctcaccctgggtaacatctacttgggtctcatgaactctaagagaataaagtgggtgagaaaactggaggaaaaaaaatgtttggggaagcaaggctgctttagaatcagctacactgagaggcctctaaacctttcagagtgcccagcttctctactcatcctttattggtgactggtgggggaggatgttaggggacaaaagcaactgattacgggaatgggttttttattttattttgttttgagatggagtcttgctctgtcgcccaggctggagtgc

SEQ ID NO: 243405 - DNA, 448 bp, Homo sapiens
gagtctcattctgtcacccaggctggagtgcagtggtgtgatcttggctcctgcaacctctgcctcctgggttgaagcagttcttgtggctcagcctcccaagaagctgggattacaggtgtgtgccaccatgcctggctaatgtttttgtatttttagtagagacagggtttcgccatgttggccaggctggtctcaaactcctggcttccagtaatccacccgccttggcctcccaaagtgctgggattacagacgtgagccaccacatctgggcctcccatcaatatttattctcagaaagaaatagtcacacttgtcaggtcatgtttacctggtcacccccagacactcatattttaatttttacccactggataattttcatattgcttccccaatttgtactgcctgtttctgtcccctccaaattcacacattgaagctc

SEQ ID NO: 243406 - DNA, 484 bp, Homo sapiens
gacacattatatattcatgcactgcatcatgatgcattagtcaatgatgagctgcctatatgacagtgctcccataagattataaaaaagttgaaaaattcgtatcacctagtgacatcacagtcattgtaactgcctagggcaacacattgctgatgtgtttgtggtaatgctggtgtaaacaaacctgctgctctgccagtcatttaaaaagccaaaaaaaaatttaaaaccataggaaaagcttataaaagaggaattaaacaaaatatttttggacagctgtacaatgtgtgttttaagctaaatgttattacaaaatagtcaaaaagttaaaaaattaaaagcatataaagaaaactattccagtatgctaaagtttatttattattacagaaataatattaattttataaatttagtgtagcctaagtttaagcgtttataaaatctgaagtagtgtacagtaatatcataggccttc

SEQ ID NO: 243407 - DNA, 950 bp, Homo sapiens
ggtttttttggtagattccttgaacatttctacatgaataattatgttgtctgtgaataggaaaaattgtattttttccattttgtatacattttattggtcttgctttgttgtatttgccagaattcatgatgttgaatagaagtataaaaagtaaacatgcttgcttgctcctcaacttaagggaagagcattaagttcgatgtcatctatatgaatttttgagtctccttttatcagattaaggcaattttctcttatttgtagtctgctgggggtttttattatataaatatattagtctttttcaaacgtatttatacatctgttgagatacttatgtggtttttcttttcaatctgttaatatagtgagttacattgattgcttttcttgggaaattgaccctttatcattatgtaatgtctcttgttttccttagcagtttttctacttcttaagtctactttttttggtattaatataactacccttgttttatttgatttagtgttttaattgcatctctttttgttctgtttttacaatatatctatatcataatacttaaagaaggcctctgataggatttcttgaatatagtggatggttttctttgtttgttttggtttaaattcaatatagttgatgtgtttaaactctttatttacattaagtataattattagcattgttaaattttgttctaatattttattattttgtttgatttctttgtttttctttcatctatttttctttccattatgtcatttgtatttcttgaatattatgcactattccatttaaatttatctattggctatttgtatctttttgtgcaatatttttagtgattgattacaatttgcaacttaacttttcaaagtttgcctagaagtaatatttactgcttcaagtgcaatgcagaaccttgaaaacatatgggt

SEQ ID NO: 243408 - DNA, 152 bp, Homo sapiens
gcctggagcctgcatattttgggtattgtgacatattgctgagctgaacacccaagggatgagagacttttcctgggccctgtctacagtagcccttgtgacatatgtctgcatccatcaccttggggatgtgatttccctctttttcatgc

SEQ ID NO: 243409 - DNA, 440 bp, Homo sapiens
cattgccttctctcatggtcatgttaagtaattattctcatgtgaggttactctgctaaccctcggcatttggctcacagcacagttattcccgcgtcagtgatgggggatggaaaccgtccatcactgcaagactgttcccatggctgaggagggagagatggtttcagtcctgttcttgttagtaacgtgttgagatgtaaatagattcatggctgatgatgttcccccatcaaagagttcatttagctcataggaagagtttgctatattctaaatttaacataaaataatgatgcaggaaagttttaggtttaagaaaataattttcacatgatacattgtgtatgcgtgtgtgtgcttgtgtgtgtgtgtaaatgttgctctggttccagcattctgatcaataaaagcagaagttcaggccattttatcctgaa

SEQ ID NO: 243410 - DNA, 650 bp, Homo sapiens
tagctcgtgagcgctggaagcatagtttggtgtctgacttggccaattccaaagcttgtgtgatttgcaccagcactcagatgcattcttccctctccctccctacccaagaaaaatgctatccctcccttttcctctaattagaaaattattttgtatagtaggagattattaggaaataatcatttctctccaaaagtaacacactgaggaggcagtatctgagggttttgcccaaatatggcctttcaacctctgaattcatgcctacagaaattccaagatgtttgtcatagcatttttattctaaccctccttaatgagtgatacagtttgcctgtgtccccacccaaatctcatcttgaattgtagctcccataatccccatgtgtcatgggagggaccccatgggtggtagtttattcatgggggcagttaccctcatgctgttttgctaatagtgagtgagttctcatgagatctgatggttttataaggggcttttcccccttttgctgggcacttctccttgctgccgccacgtgaagaaggatgtgtttgcttccccttctgccatgattgtaagtttcctgtggcctccccatccctgaggaactgtgagtcaattaaagctcttttctttataaatt

SEQ ID NO: 243411 - DNA, 478 bp, Homo sapiens
cgtgaaagaggacatcaagtgaagggaaaaatcatggtaggaaagaaagatgaagccagcagtccccactcactgagctagaagacctggaacactagacagaggtggttctgagcttcctagtggctgaggagaggagtgaaagcggaccccagcccctgatccagcatgggaggatgaaagcacagccattgttctggagacactttctggttgtcattatacaggctccctggaggatgtgcctcctcccccttcaggatttagctcctctacttcccctgggctggtgtgggcacattgtctgtgctttgacagtccctagatcccatgtgttctagaaccttctctcccaaagcagaacttttttttttttcctgttttctgttttttaaatctatctcagcctcctgacaagcaataagatttggaatatttgttgaggggataaataaatgaactccttagtcagtgcaga

SEQ ID NO: 243412 - DNA, 428 bp, Homo sapiens
acagcccgagggtacccaggccaggagggccctgtttatccccatttgaaatgggaaaaagcctctgattaaaccgcttgcccaagtctcctggcagtaagtggtggagcaggatttcgtcccagcctcatgctgtttccacatccccacagtggccccgggctgtgctccttccctggacctgagcttcactattggaccagatgagcctctcggatccatcccagcctggcacgtctagatcctgcctcccaacgcaggctgctgagatgttcacttgaatctctcaccatggacattacccaaacattacctaatgttttccagagagaagaatcctatttctttctgtgttttagattccaaaccaaaaagggacataattgtgtggtgaaaataacaagggacttcaaatcagaaaacccaaa

SEQ ID NO: 243413 - DNA, 451 bp, Homo sapiens
catgtaataaactttttatgaatgaaagtcaaatgatcaaatatttttctatatgccttgttaaaattataaacaataggcaatcataaaaccataaaaggttttggcagaagatataatctgattactatttgaaaaatatcattctggcagctggacaggctggaaaatatcattctggcagctggacattctggtaggggacaggctggaagttggggagactatgtaggaggatggtataatacatagtcaaagtagaggtgatgacagctttgattagtctgctgagaagggggttctgaaatcatatttcctttttaacttgtttatctcctttcgaatgtacgttccatgagagtaaggactttttgttatttacagatatatccctggtacctaaaaatgtacgtggcatatagtagactctcaataaatatttgttaatgaa

SEQ ID NO: 243414 - DNA, 319 bp, Homo sapiens
gcaggagaattgcttgaacccgggagccggaggttgcagtgagccgagatcacaccattgtactccagcctgggcgacaagagtgagactttgcctaaaaaaacaaaacaaaacaaaaaagtatgtagaatggaactggcatgtagaaagttctcaataaatgatggtttcattaaaagtttatgtaaatctgtctctaattttcttttgagagagtaccagtgaaagggtagggtactcattcacttacatagcacaaaaccgcttgtattgggacttttttggttgcaaatgacagaaacccagtttaagccatctt

SEQ ID NO: 243415 - DNA, 335 bp, Homo sapiens
cattgatcttttctaaataactccaatctgcctccctttggattttaaaaaatatatatatatataaatatacatatatatagcatattgttttacacactgacgaagtatgtttctcctaaagtgtaagtaattctaaatatgaaaaacaaccacagactacaaaaggaaaagatattaatgcagaagtttacttctcaactccttagtattcctaacaaaagccttatatcatacacagatatgtgtctggtacttgcttagtcaaattcctaccatctctcatacagcctaagggaaaagttaaagaaattcatttgccatttaaatgtttt

SEQ ID NO: 243416 - DNA, 386 bp, Homo sapiens
ccaaaaaaaaaaaaaaaaaaagagaaaaagaaaagaaaagaaaaaagagtaagcactcattgatagatgttattaatacatgtggagaatatataaaaactggaggtatcattgaaaactatactccttgggataaaaattagtataagtcacagagttaacaatcttaggaaactagctacagataaaaatttttgtgtattttaattatttaaaaaagcataccattaatgattctatttcccatttggcaaaaattatttatcttaaatatattgtgggttactttcctattgcacatgaattactgaaattgatttctaaaatattttttctatttttctattaccatgagttgggtctttttgtttccagtatatatttca

SEQ ID NO: 243417 - DNA, 477 bp, Homo sapiens
ccctcacaccgtaactttgagcaaagcatttagccctgcctgtgtctctttaactataaaggagaaacaataatacctaccaaagacattttcagaagaatgcagtatccttggatgaatggcactgcactgaatgatattacaatgctatgttttcagcatctttaaatcatctttaaaatcatgtgctcttggccgggcgcagtggctcatgcctgtaatcccagcactttgggaggctgaggagggtgaatcacgaggtcaggagttcgagaccagcctggacaacacagtgaaacccagtctctactaaaaatataaaaatattagctgggcttggtggcgggcacctgtaatcccagctacctgggaggctaaggcaggagagtcgcttgaacctgggaggcagaggttgcagtgagctgagatcgtggcactgcactccagcctggacgacagtgtgagactccatctcaa

SEQ ID NO: 243418 - DNA, 315 bp, Homo sapiens
cagacaacactcaattccttgtagtcgcaggatttgtggacttgcttcttcaaagccagccacagagaaagaacagcagggaagattgagaaagtcagtctcgtgaaggacatgtttactttcctttctgccatgattgaaagtttcctgaagccttcccagccctgtagaactggtttggacagtgccttgcatagaggagatagtgtatctctgtcttttcaggatcctgtattatggcttggcaaactacatctcacagaccaagctggcccaccatttatttttgttaataaagctttattggaacacagc

SEQ ID NO: 243419 - DNA, 559 bp, Homo sapiens
agggctttggttgatggaccttgcactcaagtgaggagacagaccatgcctttcaagtgcatgcagctcactgatttcaacctcaagtttccacacagagcccaccagaagtatgtcagacaagcctggcagaaggcaaacatcaatacaaaatgggcagccacacgatgggccaagaagattgaagccagagaaaggaaagccaagatgacagattttgatcattttaaagttatgaaggcaatgaggaacagaataatcaagaatgaagttaagaagcttcaaaaggcagctctccaaaagcttctcccaaaaaagcacctgctgcgaagcgtgctactgctgctgcagctgctgctaaagttctagcaaaaagatgaccgctgcaggcaagaaggctccagcttagaagcttcctgcccagaaagccacaggccagaaggcagcgcctcctccaaaagctcagaagggtcaaaaagctccagcccagaaagcacctgctccaaaagcgtttggcaagaaagaggtgattagaaaagtaataaaagttctatttggg

SEQ ID NO: 243420 - DNA, 577 bp, Homo sapiens
acattttctatgaaagccgaatctatacataacttatgactcagcaataccatttctaggtacatacttagtgttcagtagcattattcatactagctacagagtaaaaacaaccaaatgtgcatcatagtaaaactgattaaatatatttaggcatctggaatatgatgcaatcatacggatgactgatttatggctacacataaaaacacagatgattcttacagtgttgagccaaagaagtcaaatactaaagaatgaatattgtgtaattgcattcatataaattttttaaggcagaaaaaggatagtttttagagatggatgcttatgcagtaaaacttatgagaagtaaagaagtgttaccatatatggacggcagttacctttcttggggttggagggtgtcctgattggaaggggacactaatgggatttctagggtcttgctactattctgtctctttgcctgagtggtgaatgggtgtatttcatttatgagaattcattatctgtacatttgttttctgtacttcactgtattttatacttcggaataaaaaggattcaaaataaa

SEQ ID NO: 243421 - DNA, 459 bp, Homo sapiens
aaatgcttctcccttccctgttgcttttttatagcatcctgttcttgtttcttgggtgcaatcatttctcttgtctctgatttgagtgtcacccggcaagatctgactgagccattctgctgggactctctcaggctaatgagattactcaaagaatattttaatctcatgcctaaagatgtgaactcctggcaccctggagacagggagttcctaaatccttcactgaacccatttgttttcaatacaggacacctgcctcaactgtgtcagtgaacttccagttcagagacgctatcctttcttggccaggtgtagtggctcaacacctgtaattccagcactttagggggccaaggcaagagcattgcttgaggccaggaggttgagaccagcctgggcaacatgatgagaccacatatctacaaaaactttaaaatacacatacacacactaatt

SEQ ID NO: 243422 - DNA, 1060 bp, Homo sapiens
tcagcctcccaaagtgctgagattacaggcatgagccaccatgcccagccatgaatttttttttaagacccaacagtatgctgcctacaagagtcacctcacttttaaggacacccatagactgaaagtgaaaagttggaaaaagatactccatgcaaatagaaaccaaaagaaagcagggatagctaaacttatatcagacaaaatagactttaagtcaaaaactgtaaaaagagacattatataatgataagagcatcaattcatcaagaggatataacagttatatatgcacccaacattgaaacacctaaatacataaaatattgaaggatctgaagggagggataaattgcaatacaataatagtaggagactttaatactctacagataatccagacagaaaattaataaacattgggcttgaacaatactgtagaccaaatggacctaactgacgtttcatccaacagcaactgtatacacatccttctcaagcatacatggaacattctccaggatagatcaaatgttaaggcacaacacaagcctcagcaaattttagaagcctgaaattatatcaagtatcttttcagaccacagtgttaagaaactagaaatcaatgccagaaggaattttggaaaattcacgaatacatggaaataaaaaacatacttctgaacaacaaatgggtcagtgaagaaattaaatggaaattaaaaaatattttgaggcaaatggaaacacaacttattaaaatgtatgggatacggccaggcacagtggctcacacctgtaatcccagcactttgggaggctgaggtgagcagatcatgaggtcaagagatggagaccatcctggctaatagggtaaaaccccttctctactaaaaatacaaaaaattagctgggtgtggtgacgggtgcctgtagtcccaggtactcgggaggctgaggcaggagaatggtgtgaacccaggaggcggagcttgcagtgagccaagatcatgccactgcagtctagcctgggtgacagagtgagactccttctaaaaaa

SEQ ID NO: 243423 - DNA, 831 bp, Homo sapiens
atttcttttctgtgtgtaaatagttgttttgttctttgggacagggtcttgctttgtcacccaggcttgactatagtgccataatcatgactcactgtagccttgacctcacaggctcaaactaccctcctacttcagcttcccgagtagctgggattatgagtgtgcaccaccacacccagctaatttttttctttttttggatagagacagggtgttgcccaggctggtctctacctcctggcctcaagcaatcctcctgcattggcttcttaaattactggcatgagccaccatgccttactttggctagtcctatattctctagaattctctttactttgtgctagccaatctctcatgctgttcccctgttataatgaataattatctatattaaattttagcactttgggcttttgagtggtttatgtctcctgattggaccctgactaatacagagttgatgctgggaagggtcccaggagacagacccacacagatgggatttggggatcagtttggttatcttaggggccgtgctgagctccttgcaatgggaaatgggatgctgttgatttccaggaagtgacctcacaatgactcaagctaccacttagtgttgattgtgatgaaatgccagctgtggcatatgccttgggagctaagtggctgctgcacttgaccactatgaagactggtgtggaagggtccttctggatgtacttgggcagggtccccaacgccggagccatggaactgtaaggagccacacagccggaggtgaatggtgttgaatgagggaagcttcatctgtgtttacagccactc

SEQ ID NO: 243424 - DNA, 443 bp, Homo sapiens
gagacagtcttcctgtgttgcccaggctggagcacagtggtttgatcttggctcactgcagtctcaacctctcaggctcaagctatccttctgcctcagactctggggtagctgggacaacaggtacgagccatcatgcccaactaatttttgtgttttgtagagatgtgtttcatcacattgctctggctggtctcaaactcctgggctcaagccatccacccaccttggacttctaaagttttgagattacaggcaggagccaccatgcccggccctattctcttttacactggtttattgtgagggcctccaattgtcttcctattaggcttgctcacttcggcctgttcactgaagccagaggaattctcctaaaaggcaaatttggatcaaaatagttcttgattaaaacctgctggtgactgcccattgcctttaag

SEQ ID NO: 243425 - DNA, 400 bp, Homo sapiens
aagcccgccagttgaactcttaaaggagccccccggcccgggttacgaaagctttccctttcaaaattttttatcctggttataacgggcacacaagggtttcttttttttttttttttttttttcctgagacagggtcttgctctgttgtccaggctggagtgcggtagtgctatcacagctgactgcatcctcaacctctcaggctcaagcagtcctcccacctcagcctcccaggtggctgagactgtacgtgcttgccacaatgcccaactaataatttggacttttcctatacatgggttccaaagggctgactgcgaaacgtgagtatgcatggattttggtatatgcagagatggggggctggaacgaatcctttctgtatactgacggacga

SEQ ID NO: 243426 - DNA, 360 bp, Homo sapiens
ggctagcctgtagtttcatggccttttttccatttgtggtttttgccaggtggaatttaaatgaccttttatcaagatggataaacgcaagtttcccagtgctggaatacagaaaatggatggacaagtaagtcccactcagcacccatagcccagacatggggacctcaacacacctgggccccagacatcacctttcattgtgagtagctcagagatgacacttcgttgttaagtgcccactggcaatagtttctataacagcaagtgaaggaataaatagtcaccaaaacattttctgttcccaattccaacattaattggatgagataattattttatgaaaattttcatatagca

SEQ ID NO: 243427 - DNA, 746 bp, Homo sapiens
gagacagtcttcctgtgttgcccaggctggagcacagtggtttgatcttggctcactgcagtctcaacctctcaggctcaagctatccttctgcctcagactctggggtagctgggacaacagcctcagccaagatgtctcaccctactctctatgatgcaacaagaagcccctggggaatgtttcagtcccagtctgtactattgtcatgtgctcatcacagtctggtggaatttaaatgaccttttatcaagatggataaacgcaagtttcccagtgctggaatacagaaaatggatggacaaacagggtcttgctctgttgtccaggctggagtgcggtagtgctatcacagctgactgcatcctcaacctctcaggctcaagcagtcctcccacctcagcctcccaggtggctgagactgtacgtgcttgccacaatgcccaactaataatttggacttttcctatacatgggttccaaagggctgactgcgaaacgaagtgacctcacaatgactcaagctaccacttagtgttgattgtgatgaaatgccagctgtggcatatgccttgggagctaagtggctgctgcacttgaccactatgaagactggtgtggaagggtccttctggatgtacttgggcagggtccccaacgccggagccatggaactgtaaggagccacacagccggaggtgaatggtgttgaatgagggaagcttcatctgtgtttacagccactc

SEQ ID NO: 243428 - DNA, 360 bp, Homo sapiens
aaaaaaagaaagtaaatggacttgccacagtgtacaggcaagaggaggggaggattatcctaatcaattactgagccaattgatttttttttttgcgttaacgtaggtattttgaccaagatttgtaatgtctagtgtgtgttctttatggcagtgtttcatcttttggcatccttgaaatgtcagttttgtgtaattgtctcatgaacaatgaattatgcacaccctttaataaatgtaaactaacaattggttttgggattgtcttcttacaaaattatttatcctcttaaagtttaaaaaggctttagagactgagaggaaaatgcatttgattaaacagatagtactgatgaactc

SEQ ID NO: 243429 - DNA, 996 bp, Homo sapiens
aaagtagtgcatttttgagatgaagctggctttcagtacaaacatattctaaattatgctggtggctatgcagtttttctctgtgctggtcatcaacaattagatttagatgtgtttgagcacttgaagaagtactatgaaactgaacttaaataaaagtatttagcaattgtgatgccaaaaagctttagcttgtgaagctttatcaatttccaattcttaaaagcaaaggttgtaaagaggaggacattgaaactgatccttgtagaaatggagccaattaaataataaaggcacaaactatgtaaaacatttaatttttaaattatattattggactccagaatatttaaacttgtgagatgtagtctgataaatctcctatttttaattggataaacttgcaatatataccaaaaaggataaaatttacaaaaaaaaaatttgcatgatctccatagtcataaattgagacatctgcaatgacttttgtctgataaaaaaatctaccaaagacaagtactctgaatggaagcaaaaacaagagctcttttaagatatttgaactaaattggacccttatcttgcactatggataaaaatcatctaaaaatggacaaaatacctaagtgtaagacctgaagccatagaactcatggaacataggggaaaaactccacaacattggtcttggcaataatttttttgggatgccataccaaaagctcaggctacaaaagaaaaaataaatcacatcacacactgggccctgtcatggggttgggggaggggtagggatagcattaggagatatacctaatgtaaatgacgagttaatgggtgcagcacaccaacatggcacatgtatacatatgtaacaaacctgcacattgtgcacatgtaccctagaacttaaagtataataaaaaaaagaaaaaataaaccaatgggaatacatcacactaaaaaccttctacacagcaaagaaaacaattt

SEQ ID NO: 243430 - DNA, 431 bp, Homo sapiens
ccaaatccaacagatgcctgagaggcaaatgtgcatttggattggaaaccactctctctgagaaagaaacaaaaggtgatccttgaatctgaaaacaattccttgttttaagagcaactatcattctttatattgattgtgccttatttttaaaaaatgctcatgttattagaacctttgtaaaaatgcttatcttactattttaagtgaaagggaaaatttaaattgcagatacagtatgacaacaattatggaaaattatgcccagaaaaaaaaaattggcagaaaacacacaaaatgtcaaaaactttaacgggaaagatctttaaggttatggtgagctttttcttttactttcacgtacttttcttctatatcaagttttacatttataattggggaaaaataaactgtttgtttctttggacatg

SEQ ID NO: 243431 - DNA, 475 bp, Homo sapiens
gggcctgggaatttttaatttctgacagttcctcgaatacgctgctgctgctggagtccgttttgagatagggtgcctttgagaattcccaggtggcccagatgggagaatcgctgctgggcttcagaggatgtcccagcagttagaatgttgtaaggacacgtcgcagaaagccttgaaagcaaagtggccaggttgtgactctggtaggcaaaacaggcaggttcatcctcctggtatgcagctactgagatgcaaggtgctttttaaacattgtgcagctcttagattggtgccccagggaaggacaggccccatcaaggctagccaagagcagattgattacatctgtggccaaagtgtaggcgataaaatgtcatccatcagattctctaatcaccggtgaacatgaaataaggcaaatcagctgaagagtctttcagtaagtaaaaataataaaatgcctaaactgctt

SEQ ID NO: 243432 - DNA, 558 bp, Homo sapiens
cctccagaagttctccatcctaaaaatcctttcctctggttatttctactggtaggacagaaggaaacttaattttaaagaagctcagccctggtgcagtggtctgtgcctgtaatcccagcattttgggaggccgaggcagacagattgcttgagcttaggagtttgggaccagcctgggcaacatggtgaaacctcatctctacaaaaaatacaaaaaattagctaggcgttgtggtgcacaacacctagggtagttagtcctggctaccctggaggctgaggtgggaggattgcttgagcccaggaggtcacagctgtagggagctgtgatagcgccactgtactccagtctgggtggtagagtaagaccatgtctcaagaaaaaaataaaataaaaagtatcctcagttgcttaactcagttgcaacttgtaactccggtagcttttcactgtttatacctaacactttgtctcctcatacttgttcttttattttttgtttaacagctttattgagatataatccacataccatataattcacccagtttact

SEQ ID NO: 243433 - DNA, 720 bp, Homo sapiens
gagggggctatgttgggcaccagtggagtgagagtgtatggaaatgaattgggcagaaagaaggcaactgacaattgttgaggatttattgtatatcaataagctgccctaaggcttcacgtatgttatttaatcctaacaggagggctgaaatgcatacatttcccccattttatacatgaagaatctgaggcacaaaatggttatattacttacctatgattacacagcccttaaatagtagctctgggattggaaccaagatctgtctgaatcccagagccagttctttcttctgatgtggagttgagaggagttgaagcagtgagggtggacttccacatggtggactgcccgtgttttcttagtcctcctccctggacaaaatgtggcattgtatgtgagcgtatgttctctggagtcagctgggctgggttgataaaaatcctgggtctgccacttttacctgtgttgccttgggcatattacctaacctctgtgagctttagtatcttcatctgtgatgtggagtaacaataccaagttctcagagttgtttggaagtttaaatgaaataatatctaaagctttaaaacatattactttctttctcttcttactttgagactcatcttgttacttctggattgtaacatttagtgttatatagatccctttagagtaggattggtctggattcaggactagatccacagataa

SEQ ID NO: 243434 - DNA, 490 bp, Homo sapiens
caatgctttcttctggaatatctccctaaggaaccagcctgaggatcttttacacttaactttatttttattttttaagtagaaggaatacctaaaataactataaaagtatagtagagtaaatacataaaccagtaacatggtagtttataatcattattaagtattacatactatacataattatatgtgctatacatttatgaaggtaggttcatttacaccagcatcaccacaaacatgtaagtaatgtgtcgtcctatgaagttgtgatggctacagcatcactagagggcagaaattttacagctccattacaatcttatggaaccaccatcctatatgcagtggattattgactgaaacttcattacgtgctatgtgactgtaatgtacattaactgtcttaaataaaaatctaaaagtttttaaccttttatttcttgccttactgctgttctttttaaaattattcgttttaaataactag

SEQ ID NO: 243435 - DNA, 1252 bp, Homo sapiens
aacctcaaatgttttaatggtgggatcttattcactgtgtacaggattctctaaagagaccacctggctgggtgctcaaaccacacgggctgacccaaaagacaccaaaaccaagagttgctcgggaggcactaaatgttgacggtcttggccagcttcacatcctcaatttcagcagacagccagcagtaagtgtgatgaagccgcagcacctcaatggccttgagttccagtggtgttgcctgaataccaaggtcttctaagctgggcaggtgagacaaggtcatgtctgtgatgtgaatacgctccactttatcccttgttgtccaggactcaaatgggcttatttcaaagtctcttgctacccactgataggcaaaaggtggcaaggggtacgggaggaagtacccctttgctgtgagccacagcaaagatgtacttcaccaggtcaaagaggagatatcgatttggcccaacgaaagcaaaggttttcccattggcatcaggatccttaactgcattaacaattcctttggatacatctacgacgtatactggttgtttaactgccttccagcccaaggaaacaaggggtatagcaccaaaccaacacatatttgcaaaataattaaggaatctatcctctcttccaaagatgtccaacagctttacgataatggcttctggaaatgtgtctctcactgctttctctccaacagccttctttctcaaatatctagaagagcttttaatattcacattcagatgtgcaacatgaatgaattttccaacttcagcttccttggacacctgagcaattgcttggggaatcttcacaaaaacatcctcaaaatcaaagtttttggtttcccagtctcgtccaacaagatttatgaccacattgctgtgttccactactcgtcagatagaatctttatctctcgcgtcccattccagaaacagaagctagcccaggtctcccatgggacgaaggtgcatgatgtcacatgtatcacaccgatagggtatgatcacctgtgaccccacgcgtccaaggtggttgacaacacatcggcccaggaatcctgttgctccaaacccagtggccacaatcccactgacttgaggaacattcacctttcccatgaggtatgagggcatgatgaagctggcaatggagtgggctgtgacacacggatgtggctattgcagtaatggcagaatgtgacattggcagggcccagacaacccg

SEQ ID NO: 243436 - DNA, 365 bp, Homo sapiens
aacttttgatgttatttatatctgaatatacagaattaacactataaagagcctgctaagactagacttccaggctgagcacggtgactcatgcctgtagtcccagcattttgggaggctgaggcaggtggatagcctgagctcaggagtttgagaccagcctgggcaacatagtgaaaccccatctctatcaaaaatacaaaaaattagctgggtgtggtggcacatgcctgtggtccccactacttgggaggctggggtgggaggatcacttgaacctgggcggtggaggtttcagtaagccgagattgcaccactgtactccaacctggatgacggagtgagacctcatctccccacccccc

SEQ ID NO: 243437 - DNA, 421 bp, Homo sapiens
caaggtttgttcatgctcccatactgagctggttataagtgggtcacccctcatggtagcactttaagaggatctccggctttccaagatgaatctagagctatctgaattttagaattcaagaaaatgatcttcatttccccaggattacttcctagagaagtactcaggcagctactaagtgttgcatgaatgcttgaggagctccaggtacccccaagtcctgtgcctctttgggattccgtgatctaagccagttgcctctgttttctccctgaatggcttatgattcagctttcttaggtctgctaagatatttatcactgctgacaaaatatattcttcagaaatagaagacagattcaaccttttataaaaataatagagatttataaaacaaagaatgtgctgcaaatataaa

SEQ ID NO: 243438 - DNA, 254 bp, Homo sapiens
gaagctagccatgttatgaaaacactcaagcagccctatggagagatccacgtgacagagaactgagacattctgctaacagccaatgcaagtgagtcatcttggaagagggtcttctaatctcatttaagcctccagatgactgcaacctcatgagacccccctgaaccaaaacaacctatctaagctgctcctgaattcctggccaatacaaattgagtgacataataaaggcttatgttacaagatgctaa

SEQ ID NO: 243439 - DNA, 529 bp, Homo sapiens
gacacaatacaaattgcagagagttctgtagataagacaaagcactttcctggaggaaatggtgagatgttgtgatttatggacccatcaatgttactgttcataatgagaaaaactgttgcattcagaccatcatcctgaataaaggatgactccgtggaagtgtaaggatggccatcacatgaattcgcctgccatcagagatcacattcttccttaggacatttttccttttctggccttatgtaagaaacaatttgtatgtatgatattaatttttaaaaatgcaaagcaaatcataattctttaaaatatttcatttccttcagcgatgcctcatgtggtcagatttctgcattcaattaacatgaataatgaaataattgttaagagtgtaacagtaattttttctcaaatccctaatccctttggattttgtgataggaatcctttgcaaaatagatgtgctctgtttaagaagatgttctctaatgcagaaatgttatttttcaaataaagatataatttt

SEQ ID NO: 243440 - DNA, 448 bp, Homo sapiens
gtgcctggcagatatataacaggctaggagatgtgaaaggaaagaggaagagggggaattggcataaactggagaccttgcatctcatataaagggggcactgcttctcaggtccagccagctgttgtcagaatgagccataggcccagtgcgtcagagctttgattttttttttaagagacatatgaaattctgatttttatatgcaatctcccaatttttatgtgttggcgagtcgatcaaaccctcaaacattctgcaggctaaattcagccagcaggtgtccagtttgcaaactgtgctctaaggatttataaggccattatggaaatctctaaatggagtcatcaggagagtggcctcaaagaaaaggaaaaacttgagattggccttaatagtacgtagagaggagagaggcaaggtaaatttctttaatcttccagaaggg

SEQ ID NO: 243441 - DNA, 107 bp, Homo sapiens
agatccccattgctatagaaaagagaaaaaagcatgcggaatagaacgctgtttcttggagatttctcctgaaaaagtcacgttatttcttctcacctccattggca

SEQ ID NO: 243442 - DNA, 407 bp, Homo sapiens
atcatggtaggctttcttttagtagctgtatagttttagcttttacatctataattcattttgtattaatttttgtgattggtgtgagggaggagtcagagttttttttgcttttgttttttttcctatatgtatatgcaattgttctagcaccatttgttgagaatgctttacttgttttggggccgttgttgaaaactattcaaccttattattgtgggtttatttctggactctctactgttctatagatctgtttgtctattcttgtgccaataacaagctttcttggttactgtagctttacagtaggtcttgagaggtcaggtttcttgtatttccttatgaattttagaatcagtttgttaatttctgcaaaaaaaataaagcctgctaagattttcatt

SEQ ID NO: 243443 - DNA, 340 bp, Homo sapiens
cattaactgagataggggaaactcaaggagtagcaaatttgagaggtagaggggattgaagagttggatttgaacatgttaactttgatatgctctttagacatataattggtgttattgaataagcagttcagtataggagtctgagttcaagggagtctggaggtacaaatttgggagctgtcagcatcttgattgtatttaaagacataaggctggtagaaatcacttagtatatgagcatagatagagaagaaaagaaaagcgagcattagaccttccagcatgtagaagtggccaagatgagtaggactcagtagaagagactttgaaggagtgc

SEQ ID NO: 243444 - DNA, 333 bp, Homo sapiens
atgtagcaataaaagagaatgaagcagatctgtatatgctaatatagaaacatttgcaagatatattggtaagagaaaaaagccaagtgcagcagacttttaaaaaagatgtctgtacatacatttgtttatgcataaaaaaattctgaaaggctatccaaggaattgttaacattctcttctgaggaattagacttggatccaaggtaggatggaaaataactttctcccatttaatcttttctatcatttatttttttaactatgtgtgtatattacttttataattttttgagagttaattaaagtaactaaattctcattatacccact

SEQ ID NO: 243445 - DNA, 571 bp, Homo sapiens
  misc_feature (504)..(504): n is a, c, g, or t
  misc_feature (508)..(508): n is a, c, g, or t
taatttttgtatttttagtggagatggggttttactatgtgagccaggctggtctcaaactcctggcctcaagcaatccacctgccttggcctcccaattttgccattttatattaaacctgtgtgtgtcccttggaaagttgatcacttagatttgtttagcagtcacttacatcagtggtagatctgaaatttcctagataccaaatgtctctttcttccttgagtttctagtaagccatttgaaagttcatgtttcccgtaaagtttatttttgaatacaagaatttatgggaatgcaggctttttaatttttaagcattctaacactgtcatcaggttgtcgtcacaaaaatcctttgaaatgcctgaatgacatctccaggaaaatcactaattgtccagtgatgattaatgtttttgtattacactaatactgtaatacttagtccttttctaggagattgtgagaatttactctaataaatgaacagagcagtgccntcanacctaccaggtgctttcagagtcacagaatcctctagaggaagtgtttactcgtgccgaattc

SEQ ID NO: 243446 - DNA, 542 bp, Homo sapiens
  misc_feature (475)..(475): n is a, c, g, or t
  misc_feature (479)..(479): n is a, c, g, or t
tacctaatgctcgacaggtagtaaagagtagattattcggcgggcacagggctcacaccgtactcccaattttgccattttatattaaacctgtgtgtgtcccttggaaagttgatcacttagatttgtttagcagtcacttacatcagtggtagatctgaaatttcctagataccaaatgtctctttcttccttgagtttctagtaagccatttgaaagttcatgtttcccgtaaagtttatttttgaatacaagaatttatgggaatgcaggctttttaatttttaagcattctaacactgtcatcaggttgtcgtcacaaaaatcctttgaaatgcctgaatgacatctccaggaaaatcactaattgtccagtgatgattaatgtttttgtattacactaatactgtaatacttagtccttttctaggagattgtgagaatttactctaataaatgaacagagcagtgccntcanacctaccaggtgctttcagagtcacagaatcctctagaggaagtgtttactcgtgccgaattc

SEQ ID NO: 243447 - DNA, 180 bp, Homo sapiens
agctgcctggggcacaggcaggtgagcaggaacgaagctgctgtgagccaggcaggagtccaggtcacctgtgaagttgtgggacctgcagcaaagcactgcctttccccagactcaggtcatccatctgtggaacaaggtctccaatttccctttcaagccagaggcctacactggctg

SEQ ID NO: 243448 - DNA, 381 bp, Homo sapiens
tagtagaaatataaaaacatgtgtaagaatgaaaattctgggcaggcaaggtggctcatgccagtaatctcaggactttgggaggccaagataaagacatagtggtagtagtacagcaactgagaaccaagagaactctttcacaccaaatcactgccaggtggagcacattcctaaatgtaagagacatactgtactattttccttctgtaaaaacagtaaaacacaatttataacagaatttttataatacgacagcaggaaaggatttcttacacaaaagactgaaagcattaactatttaaaaagattaataaattggactacattaaaatcaagagcttttactcatcacaaagtacaataaaaaacgtttaaagt

SEQ ID NO: 243449 - DNA, 437 bp, Homo sapiens
aggcttaggttgaagaccatccagaagcaggtggtgtgctagatttggcccatagtccaactgtactttctgtgatgatggaaatgttcaatatttcctcaattgtctaatatggtaaccactagccacatgtggctactgatcatttgaaaggtggttacatggactgagaaactgttttttttttttttttttgagatggagttttagtttgggaagaagaagtagttctggaaaagggtagtgatggttgcacaatcatgtgaatgtacttaatgctactgaactttacaaataaaatgatcaaaatggtcaggtgtggtggctcatgcctgtaatcctagcactttgggaggtaagattggacgattgcttgaggccaggagtttaagactggcctaggaaacatagccagtccccatctctaccaaaaaaaa

SEQ ID NO: 243450 - DNA, 279 bp, Homo sapiens
aattctaatttttatgatttaattttaactctcttcttagtaacagaataattttgtatgtgttgttttataatgaccatcaaattattatatgatctttgtatatttatatttctcttgcaaaggtaaaatgtggacacaacagcactgattccaaaagagatatgcttttcaaattcaaaattgctgcttttgagaccaaaattatcaccctttgatttgaatgatagattatctatgtggaatggatttgacctaaggcaattaaagatacttttg

SEQ ID NO: 243451 - DNA, 345 bp, Homo sapiens
atggccactgcaggaccccatcctccactcgaccacacttctccaggggccagaccacacccaaaggcctggagatcccctaagggagcacaagcatcaggggaggactatgcagcttcagaggcatttccaagagggctcaatgtgagggtgggaaaagagcctgggggaagggttgagggagttggaaagtccctggccctcatcagatgaagactcttgacccatcttcctgcaacggctggcccccccatgcacacaagacagtcactagggctctggccaagaactaggggcttgtgatactgatcctaccacatgctctggaatgaatttggaatagaa

SEQ ID NO: 243452 - DNA, 567 bp, Homo sapiens
actgccagttgccaccttgaatagagctgacggcttctgcctcgctttcttggagccctaagctgccacgtagaaattccaacgacttcactggagggaccactcagagaagtgttgaagctgcatgagagaaggctcaactgagcccagacttccagccacccccgactgcatggtgtagacacatgagtgaagccttcttagagcctccacaccagaccaccctccacctgtatgccactgagcaaccccacggggagcagaagaaacactcaacctgccgcaattcctgagttctgtggattatgagcataacaacatgactgttgatttaatctacatttggggtggtttgttatggggtaatagatatctgggacacattcacacatatacatcctagctgtgtgacctcgaacatgttacttaaggtctctgacatcagtatttttatcaacaaaattgtaataatagtgtctacctactatgggtgttaaatatatgtaagaatatatgtaaaataatatatataaaagtaaaagcagctagcatatgtttggatcttaa

SEQ ID NO: 243453 - DNA, 592 bp, Homo sapiens
gatctactaacactattgtgtttaaccaagggagaaatgctgaaagcctgaagaagtggtaggagtagaaaagaggggccgatgtgaggaatgtcatagattcaacagctgattgcttccttggctgacagcatacaggagatgaaggagagaaaggagttgacagtcgtctcagggtctctggccggttgtctgagagaatgaggtatactgaaggagaagctgacaggaagggagaagaggggagatgatgagctcgattttatagtttagagcaaaggaatcattggataacccggaggtagctgaatgtagagatctggggattgtttgcttggatggtggctctgggtatggggatgaataagatgccttggtagggtgggaccagcaatacagctatgggcagaatcctaggaaacgggcagagttgagggataagctgaggaacaagagggtgtgaagagccgagaggaagcagtatgtgataaaggaggacctgtggagagttgtgtgaagtggggagagaactttcctggccctgccatttatttacctgccttgccatcggcaagtagactaagctcttggg

SEQ ID NO: 243454 - DNA, 398 bp, Homo sapiens
cacgcctggctaattctttttctttttttgtattttttagtaaagacggggtttcaacatgttagccaggatggtctcgatctcctgaccttgtgatccgccttcctcagcctcctgaagtgctgggattacaggtgtgagccactgcgcccggcctctgcttgtttatttatggataataatcaatacaatctggttttgtagatgacgattaacataaaagataaacattgatggatcatgtgctattatatctgcatttctttgcaatactatcagtcattcactcaatatacaattctcagctgtactttaaaaaggatatttaagttactgaagaaagagatggtacctcagattcatcagggcactgtgctaagcccaaacacaccaaaaaa

SEQ ID NO: 243455 - DNA, 422 bp, Homo sapiens
tgagacagagtctcgctctgttgcccaggctggagtgcagtggcgcgatctcggctcactgtaacctccgcctcctgggttcaagtgattctccctgcctcagcctccccaagtcgttaatacttttataacttagttgcagaagagaaatataaatttatttagttttcagaattattcatagatttataatctggcaaaatataaggaaattataagtatattgataaatcatgacataactggcaagaattggtatgaagacaagatggttataacttgaaatagggttgttatttattctatgcctatcatttttccatgagataaaccaaatatttaattgtttagactgattccacaaatgacatgggaaggcagagtgtttataaagagttttggaagtgatataggacactata

SEQ ID NO: 243456 - DNA, 309 bp, Homo sapiens
ttaagggtttttgtgactctgataggtagtaaatccattcaccatggaaagctgaaatcaaaatcattgtcaaggtgcaggtcaaattcatactaggccacagacacttgatggtggctttcttatctctttgttgccacttctaggcttagcagggtaaagctagacaggctgttgcatggcccagtggccaaattatgatgtaaagttacttcgcccccttaacatactgatctatatgtggaggaatagacaatcaagcaattttttttttctgtctaacctaacaaactgggatactaacaaggg

SEQ ID NO: 243457 - DNA, 305 bp, Homo sapiens
tacacaatgcacctaagactccataaaaaatagtcactaatgtcagttctaggggcatcaatgcttacaggggatttgttccccttttgacaagaagggaacattatcagattgaaataaatccgaggcacatggagtgtggaaatgatatttacatttactcagtaaattaattgaggtaagaaaggtataattaaatgaggaaaattgtcatgcaaaaatcagcccaactcataagctcaataaaggtgtttgaattttggttcatcactcacataacaaataatgatctgcattctcgtttc

SEQ ID NO: 243458 - DNA, 437 bp, Homo sapiens
tctgtagcctcatcttgagtcctcctagaagagagggtagagacagacctgtgaccccagcaccaagcaacagtgaagaatcccctcattatcgttgaggttgatcagcatcagggccctgggggaataaaacaagaggtatcccaagattaattttgctggatagagcaagtacaaataaggacacatatgaacacacacaggcacacccaggtcacttgtactaaacatttttttgttgttgttcctttatcattttagtcagggtgagtaatggcattgttttgttttgtaacttttaagttcagggatacatgtgcaggtttgttaaatagataaacgtgtatcatgagggtttgttgtacagattatttcatcacccaggtattaagcctagtacccattagttatttttcctgatcttctccctccccgca

SEQ ID NO: 243459 - DNA, 424 bp, Homo sapiens
atggatatcccaattaccctgatcattacacattgtatgcacatatcaaaatatcacatgtatgccataaatatgtacaactattatatatcaataagaaagtaagccacagataccattaaggcacaagataataatttcaatgtataaacccagatgaagttatccataagatatatttttcttacttgtgggtgtttcagccttgagttattttgtggttttctcttagagttattttcagtgtctctgtgcagttttaaaagaaactatggagtttgagattgagttactatattcaatgctgtttttttgcattataattttatttctacagtcttaaatttttaaaaggcagagagatacttgagacatgccactggactccagcctgggtgacagagtgaggttctgtctcaaaaaa

SEQ ID NO: 243460 - DNA, 665 bp, Homo sapiens
ttcctggacctactgcgtgcaggcacctgggtagacagcccacagagggctttgtccccgcacaggctccgccttcggcgtgtgtgctaggagggaggaggggaccccacctggctgggcgtgagggtgggcagggggctgtctggagtgggccatgcctgcatggaggtggaagggggagcgaattaggcagaagcggcgggagtatggacacatgtgcggtgaaatggggagttcagcctgaaacctgggccctgtgtgctgtgcagtaagggattgagctgctgggcgcctggcttgttccagcccttggactcccgggactgatagtgaggaggggccaccccctctcagcactgctaacccctcagactggagttttgtattttacagccccttttcctgctcatcaaaaatcgaagctgcttaacacgttttttcatctaagcttcagaaagcaatttttaaaatctaaaagagccatatttaggagggacccatggccggcgcttctgtggttaacaactcagcaagagcgcctccttcgggagccttgacagacaggactgcagagtccgctgctgtgcctttctctctctctccactcagacggcttccatctggggaacatcccggcggccgagggctggtaactggagcatgac

SEQ ID NO: 243461 - DNA, 506 bp, Homo sapiens
ccgatggctgctgcaccaggttcccaggcacgtgaggctgggtgtccccctcgtcccagaggctctgtggtgccggcttgcttacccaaggtcacaaggtgagtcagtggggcccccctggcattggccctggtctcaagccagtgagactagcaggaagaggcctgcagacttctcacttgcagagatgtttttaaaatatcttacttacggctgggcacggtggctcacgcctgtaatcccaacactttgggaggccgaggcaggcggatcacgaggtcaggagatcgagaccatcctggctaacatggtgaaaccccgtctctactaaaaatacaaaaaattagccaggcgtggtggcgggcgcctgtagtcccagctactcgggaggctgaggcaggagaatggcgtgaacccgggaggtggagcttgcagtgagctgagatagtgccactgcagtccagcctgggcgaaagagcgagactctgtctcaaaaacaaaaccaa

SEQ ID NO: 243462 - DNA, 586 bp, Homo sapiens
cctgcctgaggcttttaactggatccatttcagttaattatcagatctgatttgctcctggacccagtcctacttgacccagtctaagaattgttcaaataaacttggagaacacaaaacacaaattcctgaagcttggaatctgagatagaactcacccatgacctccagttgctacaagagaacaattggcacagtgtgccctgtcaggtacccttacttggtcactaaatgctcctgagggtcactggagttctacttccgatcccacttctgacaccaatctgttaaaagaaaagctttaggccgggcacggtggctcacgcctgttatcccagcactttgggaggccgaggtgggtggatcacctgaggtcaggagttcaagaccagcctggcctacatggtgaaaccccatctctactaaaaatacaaaaattagtcaggcatggtggtgggcgcctgtagtccaagctactcaggaggctaaggcaggagaattgcttgaagctgggaggtggtggttgcagtgaaccgagatcacgccattacactccagcgtgggggccaagagcgagactgtctca

SEQ ID NO: 243463 - DNA, 424 bp, Homo sapiens
gactcatacactggaaataaagcaggcagcaaaaactgcctgtgagagtgatcagatgtcagatttaaccaaaaattaaagtacccattataaataaatatattcacagaactaaacaaaagattaaagaagtaaacattatgacagtgtctcatcaaataaagaatatctcctaagcaaactaacaggaacagaaaaccaaataccgcatgttctcacttataagggggtgttcaacattgagcacacatggacataaacatgggaacaatagacactgtggactgctggggtgaggaggtgggagtgggttgaaaaactacctattgggtactgtgctcgctacctgggtgcaatatacccatgtaacaaacccacacatgtgtaccccgtatatctaaaataaaagttgaaattatgtgtg

SEQ ID NO: 243464 - DNA, 405 bp, Homo sapiens
aaaaaaattgcagggttttaaagtagcttcgtagaaactaaaagtagaaatataatttattagctggaactgccacatggagatctcctgtcagattttaggcaatgcaaatagtctcagattattgacagtaatcatttaagggtcttagaaatttcttcggctatgagtaacacactttggggggttcattacaatccaaaccagatgatttactggaattatacagatgctctggagccaataccactgtctgactcgaagcccacttttcttttttgaggcagggtctccctctgtcacccaggctgaagtgtagtcgtgcgattatgcctcactgcagcctcaactttcaaggctcaagcaatcctcccaagtaacaggaaccacaggcgtgcactacca

SEQ ID NO: 243465 - DNA, 482 bp, Homo sapiens
atgttcaggtgcagggatcaagtgtcttttacataatccttccaccagaagacatcaagtttaactgaaattcaaatctgaacaataggacaaccatctggaaaataacgctgcaaaactactacacagcaagtaagtcaatctgcaaagctgcaatgaagtaaaaccgactgaagagtatgttatgtactgtaggctataccaatctgtgcatgtgaataactgtcaatatcccaacctaaaataattttaatgatgggaataaacattaaatatttaccagctggtgcaccactagatcaatgggctcatctccctcccctgagtacacacaataataaatgaatagacttgggcttccaacagcaagaaaaagattgcctcaaaattggaaatcaatgataccactatggttacatcaataggtgaagcgataaatggaggctgctgtcatttaaaaaaatatattgtaataacagaga

SEQ ID NO: 243466 - DNA, 480 bp, Homo sapiens
gcacgagcctacagacaatttagtatagtattcacaatagttactggccttcattcgcattcttctgctccccttaaatttaggagtagatctggaatgaaaataagtattctgagtatttcaggtatttgcaaggttcattagggccgaaacaccatatcctgtaattgcctgatgtttaagttgtggaactttatagtaaacagtgattaaggtgactaaatttcagacaagactgtgtagtataggaagagcgtggatggtatcagcctccttctgcactctcaagtgaggtttccagggatgaacatacattctggcagagcatagataagctcctgagtgggtagtgctgggtggggttacaggcatgagccaccgagcttatatgcgttaaagtgtttgtgccacactctcttagactttgcttatcaaaatgtatttcattttgaaattattaaaaaccaacatagataacaa

SEQ ID NO: 243467 - DNA, 91 bp, Homo sapiens
ttaatcatgaaaattaagttgaaaatgaaatattcttatttgatcttttcaaaaagtgaaatatgtaaaaataaagtgtttttgtttttca

SEQ ID NO: 243468 - DNA, 498 bp, Homo sapiens
agatggaatattcccaaactcattttacaaggccagcattaccctgataccaaagccagtcaaggaaactactagaaaagaaaatggctggctaacatccctgatgaacatagacacagatatcctcaacatagtactgaaagtctcctatataagagaccgacatctcttccctcaataagaacaatactgccagtttttgtcctccagtgtttctatggttgagaaccaaatgaaacagttggtttggataaggatcgccttgtacaaaagtttgtctcttcaagcaccagatatagatgcacacactactggaggcatacggaaactaagatggccttcagagatagcagattcatgtctcctatcacatgaaatggtggatagaatcgccaattctttatatttacttttttccctctcttgtttgcccttttgttttttgctaatgttttgttaatatatgtaaaataaatacgcaaatgacatgctttcagt

SEQ ID NO: 243469 - DNA, 452 bp, Homo sapiens
cattgactctaaatcattgacttagatatctagaagatatttcatctctagaagatatttcatgcatattcttttgccctctgaattggtagaataataaatactggaaataagtattggcagttggcagttcctcttctattcttttttattgtaaattggttcaagaacaagactcacacagatagccgtatctctgggaagaagtctaggactagtgtaaatgttaaaggattaggagatatgtttctgtctgggagatgacctacttttttctaggacatagaaagctggaaagagccttgatctcatcctaacaacaacaaaaaaagagttgcttggaatctaaggaaagacagacacttgtgaggggaggtaggatacaagaattggctcacatgtggtaggaaaaagggagatagagattctaggtgacgtaacagcaggtaaga

SEQ ID NO: 243470 - DNA, 373 bp, Homo sapiens
agctggggctttgctcttcaaatccttgcctctgggacagatgtgcacatgcgtgtttctgtttcacacaaaagctacagtatcagctagcagcacatagcattgaaatgtagtgaaagtatgcaggcccttttatctctcttagcctgtttcctcacctgctaaatgaatttgtggtattgcaaattcttaacccaaattctcaaatgcatgtattacagttgctggaatatttgacattatgttattatatgtgtcatttagtgatgatctttttgttgttatttacactttagaagaatcttgtatcctattgtttcctatgttatttctacctcttttgatgtatattctctaaaaaattattttttaa

SEQ ID NO: 243471 - DNA, 432 bp, Homo sapiens
ccaaatactccatgttctcacttataagtgggagctgaacaatgagaacacatggatgcattggggagttaatccaccattaactatcagtatgggctttagtctctctgagactcggcacttcccctattaaatctctctgcttaaaatgcttatttgggagatacaagtccagctggtcccactaatcacatgattgctccagcggatgatcactcgagcatccaagctcacctaagacccaggcctgttaccttgtaaatgatccaccaagccacagggaagtgggaattgcttgaaggaatcgttaagccctttggagcatttgtttattcaatctgttaaaatcaagcttagaatttgtaccatgtgtaatgctaaacatggatcacttgtttggaacttaacaccgcacataaaagtgcttctgag

SEQ ID NO: 243472 - DNA, 530 bp, Homo sapiens
atttttaatctgagcacatacaaagtaacttattcgtcagttaactggaagtgtggctatgcaggtattttagtctcagaccagatgtttgaataccttttcttgaatggggtagggacctccacagccagaattctgaaaagtacctcagcagtaggcactggaattatgctgtccacctgctgcaggactggggcaggaagagagctgctacagctatggtttctcctgggtaacaagactggtaaccagagccagttgacaagctggaactggcctttgtgtgtcactgctgggtgcctcagcctgcaactctgagattgtggtgcagggaaccctttctgcctcaatccaggtcagaactccaggcattcagagcattcgctttcatggaccagcagcctgagccaccccacccttcttgtgcatagatcatggtgcagtggggccctcttcatgtcatgcccaggatagatccaggcattcagagcacctgcttgcttggtttggcagcctgagttgtcccatcc

SEQ ID NO: 243473 - DNA, 455 bp, Homo sapiens
tatacaattagaaattattatgataaagaataagacatttatttactggttcaaagaacatactgtgtgctttgtattctgacatatgtgtgttaaattgaatttatgatcaatttgttatgattgagagagtaataggagttatagttgttttaataatcaaaccttcggctcattaaaattatataaaggtgaaaagcctgaggttgttatggattgcatgacttctttttttttcttttttttttttttgagatggaatctcactctgttgcccaggctggagtgcaatggcatgttctcggctcactgcaacctccatctcccgggttcaagtgattctcttgcctcagcctctagagtagctgggactacaggcatgcgccaccaaacaggctaatttttgtatttttagtaaagacagggcttcaccatgttggccaggttggtctcga

SEQ ID NO: 243474 - DNA, 467 bp, Homo sapiens
aaaaataaacaacatcaatgtggtaaaatacctaagaagataatgtctgtaaatctttgagaactgatgagagaaagactctaaagtttcaggaaaaatatatcaggaagcctgatatatcctgcaggaacaaggaaaaataaaaagaaacctatgcttactacatcatagcagaactgcaaaatggcaaaggcaaagagaagatcttaaaagtgctcagagcaaaaaagacagatcatcagaaaggaaagaagaaaattgattgacagttgaataacagcagcagtggacaccagaagatagttcaaatactttcaaagtgcttagaaaaaacaaaagccagtccaaaattgtgtatccagcaaaagtatctttcaagaataaggatgaggaccaagatgaggttaacagggatccacctgaaaaaactaaagactaaaaataaataaaaataaaggataatgaaa

SEQ ID NO: 243475 - DNA, 161 bp, Homo sapiens
taagatctaagatctccataagggtaagtgataattgggttttgataaatcataaggaatcttctactagaaatatgtctgtttatttattgtacatcaggaaaagattagtttactttatgccagaagataatgtttgggcctaaatcttaatttttcta

SEQ ID NO: 243476 - DNA, 485 bp, Homo sapiens
aactttaacaattcaataagaagaattttttaaatgggcaaaacatttcaacagatgctttgtcaatatcttccacagatgattagatatattaggatgtcttcagttttaaaactaacataccaagtgctggtgaggatgtggagccattggaagtctcatatcctgcttccaggaatgtaaaggagtgcaaccagtttggaaactagtttgacagtgtcttaagaaattaaacacacttacataaaacccagccatcactttcctatgtatttacccaaaagaaataaaaacataaacatatatcacaaaaagacttgtatacaaatgttgaatgcacctttgtttataatggcaaaaagcctgaaacaacctaaatgtctgtcaacaggtgaatgaatgaaaaaaattgcagtaaacccatgcaatgggctactagtcatcaataagagcaaactactgaagcacacaatggataaatctta

SEQ ID NO: 243477 - DNA, 452 bp, Homo sapiens
cacagagacaatcttgctctattccttatttatgtatacccctacctcctggaaaggaatcaggacagctcacactgggaaagattcagagcatacatacaaaagccttgagactggaaagattatttggaagttgggcagaagagcaggtcacaaatagaatcactgaatttttctgcagcaaattgaagaccaaatgggaatttctgcctcaatcagcatccattgggaatcaacttgatgtgaggcgttatgctaaataaggcaagttaaagagatatatacagatgacatgagccctgcttccaggttgctgagaaggagcacctcacagagatcaaacagaacatttacgtacgaaaaagagttcaataatggcatgaggaggcaatgtgaataatttcaggctggagagtaggaaagtcattaaaatatattgattgcaagcccta

SEQ ID NO: 243478 - DNA, 310 bp, Homo sapiens
taaaaaatgcaaagctctacaaatcattctgatattggccccaaaaccacctcttggcacctcctttgcttctctgcagttttaggatccccttgtctgatttcttattcaactctgtaagatcatatcaccagtctagcaacatcctgtcccatgccattttataatttcctgtttaattgcctgttttgtacccctagactgtgaattacctgatggcagcaactgtgtttcatttgccatagtgttccaagtgttttgtcaagggcttaaaacatagtcattgttcattaaatgcttttgtggatta

SEQ ID NO: 243479 - DNA, 609 bp, Homo sapiens
ttagctgggaaaaatctgtacattggttttcaagccataatcttacgttcagattttgtatgctggtccgttgtgtaaatatgaatttttaagcaatttagcatttcatcaaagtaacacggcacttgattttcattcatccatatgaaaacaattaggaaaaaatgccacttatcttaaatagtatttgtcagattttcttcatcaaacttggtaaatacagatctcttgacattttgatgaattttcatcactctgtggtaaacctaagtgactaggctgtggcccgtgaacagcttttgtttctatgcgacattaaaatgtattttttaaaaaacatgattataatgaatattcaaaattagattcattctctagcatgtgcacaataggtcacaagtcatggctggagaagaacacttactagtcaatctcaaggttttattatttcttatgaatcacaatttttttcagagatataactatcaaagaggaaagccagctaaacatacaccattttgagtttgcctagacaactctgaaaattcatttcatatgtagttaacttaaaagttactgtatttccctagctgtgtattgtcttgactc

SEQ ID NO: 243480 - DNA, 423 bp, Homo sapiens
ctaggattccatattcagtgaaattaaccttcaaatatgaaagagaaagattttcttagacaatgtgaagtggtatagtgttatctgaaggttaaaatgcatattggaaactctaggacaatcactgaatttcaaaaggaagtatatatgtaaagagaggagataaaatggaacaaaataaaatgctcagctgaaaccagagaagacagaaaagagggatttaaaagaaataatgagtgcaacataaagcagctagaaacatggtagatgttaattcatgtatattaatttagtaggtgattggggctggacatggtggtgcacatcagtagtcccagctttttgggaggctgaggcaggaggattgcttgatcatgctcacatcactgcactccagcctgcgcaagagtgagaccctgtctc

SEQ ID NO: 243481 - DNA, 297 bp, Homo sapiens
ggctcacaagaatcctgggtttaaaacaaaccttaacagtcatctagccagtgcctgtgtctctctgctccccgcccccacccagtgtttcagtctggaagccctggcatttctattcatgtccacagcatggacatgaggaactcaggagtcaccagagcaagcttggatgctgcccagaggccacttctaagcaaccttccattgattgctgttcttgtgttccctggctggggaccagcctggcttgacccagcacgataatggacatgcacaagtgaagctgggtactgaagg

SEQ ID NO: 243482 - DNA, 514 bp, Homo sapiens
ccgctcgtggcaagtgttgactgcgtgtaggagactcccgtcctatctcccagtaccaagtctcggggaaaaggagtgcgacgagggtggagaagaccaagtttcgcttctcggccccaggctgttgcgcagtttccctggaatctttttgatcgactgctacgttgaccatgtccttcccagtgtccttagcaggagtgatggccagagagagaacttttgcacatgccatgttttcgtggcaaaaattttagtttcaagtaccttatgagggcggttacctagttttgaattttgtcacttgttgagggtgtacaaaatcctatctagagtcatactcgttggatgtattttcttttccgaaatgtacccataggacacataaccttattcctggtctttaatatttctcggttttataccaagcagcagtgttcggaagaccatgttagtgctacattgtgcacagtgagaaatgaacaagttttttaattaaagacagcactgtaatttt

SEQ ID NO: 243483 - DNA, 339 bp, Homo sapiens
ttcaactgtactgagaaatggaaaaagtcagttggccaagcaaaagtgctaagagcagagaggagtcaagaatcctcatgggcttccagtgcctggttcaaggtgtcaggatctatacagcctggcttctctactgcctgaagggaaatgagacaagcaggactaagtggaaacccagataagagacccgatgctctgaaatgtgtctgaagcccccaatctggcattctgaccccaaagcatataccttttcaccatctaagcatttgttatggctgccaagcactgtccaccaaactcagactctgggctgaccaataaaactgctaaccccaaggg

SEQ ID NO: 243484 - DNA, 372 bp, Homo sapiens
gggtccttaaaagtccatgtagataataattgggagtccattaattgacattaagatttcaaaatgcttcttaaaaattgtagctttcggccaggcacagtggcctgtaatcctagcactttgggaggccgaggcgggcagatcacctgaggtcgggagcccgagaccagcctgaccaacatggtgaaactccgtctctactaaaaatacaaaaaaaaattagagggacatggtggcacatgcctgtaatcccagctattcgggaagctgaggcaggtgaatcgcttgaacctgggaggcgctggctgcggtgagccgagatcacaccattgccctccagcctgggcaacaacagggaaactctgtctcaaa

SEQ ID NO: 243485 - DNA, 374 bp, Homo sapiens
cactggggttctcagtttccagcttttcgtcagagggcaggccccattccatgtcctgggccgcggctaaaattcagatagatcctatactgtgtaactgcgttggagaaccaaaggacacagcagctgcaaaaggagggtgttatctcagaaaggagtgagcagtagaggagagctccaggccctgtgcatgaactctgcccaaacctctggccgacttctgtagggaaggctctgagcagcccattacaggctgaaaaaactgggcagcgagttctgctgctgcccaccacagtaaagaagacagagtttgcagtctgaatcaagccaaaataactacttgcttaaaaataaaacttttcagaggcaaaaaa

SEQ ID NO: 243486 - DNA, 206 bp, Homo sapiens
aatcagcctgtttcatagaagcctttgttgtttgttctgatgagatttttacctgctgtacttgagacatcagtaaaaagtgaagtagaggttcctcttcagagactttccttcccatctaattaggaataaatagtaacttctcttagaagcaaaatttattcaaagacctgtgctaacattcttaaatatctgctatccataat

SEQ ID NO: 243487 - DNA, 818 bp, Homo sapiens
gaaggcatcgctgctggaggtgtgatggccattaatgccactttatggaggtgctggagacctcctcctccacaacctagcacgtggaattcgcaaaactgccaaaggtggagccaagcaccaagctcaccttcctgtgcttgcacccaaatgcaacgagccactcatgccagctgggggaggccctttgtgtagaacactaagtctacctctttagggttgatgacaacaagaaacccaggaacggacaggcctctcagactgacaatcagagaacgcccgtcaggcggggctgcagctgtgtggtagttaaggactatggcaaagaatctcagggcaaggatgtcatcaaagagaacttcaaatgcaagaaatgagcaaataaaaacttagctctcaaatataaggctcccgcagaagtcaaagcagttggagtaaagaggctggacaggcacgggcggcccaagagtgaggaggcaggcgctggggccaaaggcccaccaggcctgggctagaagggtgacagcagagggatggggccagatggggtaaaaaggaatggcacaggccaggtgtggtggctcacccctgtaatcccggcactttgggaggccgaggtgggtggatcacctgaggtcaggagttcgagaccagcctgaccaacacggcaaaaccctgtctctactaaatatacaaaaattagccgggcgtggtagcgtgcacctgtaatcccagctacttggggaggctgaagcaggagaatcacttgaacctggaggcagaggttgcagtgagccgagatcgtgccactgcacacc

SEQ ID NO: 243488 - DNA, 604 bp, Homo sapiens
gagacagagtctcactctgtcacccaggctagagtgcagtgacacaatctcggctcactgcaacctccgcctcctgggttcaagcgattctcccacctcagtagtccctgagtacctgggactacaggcatgcaccaacatgcctggctatttttgtctttttagtagagacagtgagaacacagagtttgtgagggagttcaatttcttaagtgagtggcaggactagtatgagagccccatcttggtgaaggcagagaacgacaataacactatttcagctccttccacccatttctctaatgaggaaactgaggctgggaggtggcccaaggtcacatgggtggagtgtctgcattgggcaagaacaccatgtcctgacctcagtcaggggccggggtgagggtggcacctgaggagaacatggtgacattgacaaagattgagcctccaatgaagtcctctcctgggccttggaatgcggccatgagcgtgtccttctggagggagacgtggcccaggccttcagagatctgttcttagggtaagatagaggaagaggatatggttttttggggagcgttagagctcgtgccgaatcctg

SEQ ID NO: 243489 - DNA, 251 bp, Homo sapiens
gatctatgatggtcagagtcggaaaaattatttactccttcattttattcattcattcaatgtttacattgagtgagcatctcctacgtgcaagaccctgagctaaactaccagcattccaacataaaagggattcttggggatagaagagcctctctctgtaaagtcttagtccccaagtcctaagtccttagtcttacttaggagtaagttttcacgaattcaaataaaaaatttcaatgagtacaatt

SEQ ID NO: 243490 - DNA, 420 bp, Homo sapiens
cagtaaaattctattttcccactctcagatgcctgtatgtttttaaaaatgtttcatatctgcatatgttataaacttaacactggaatgttattttttattcaaatagtagtttgccttttaaagaaatttaaaaaggccaggcgcggtggctcacgcctgtaatcccagcactttgggaggccgaggtgggcagatcacaaggtcgagatttcgagaccagcctggccaatatggtgaaaccccatctctactaaaaatacaaaaattagccaggcatggagatgggtgcctgtagtcccagctattcaggaggctgaggcaagagaattgcttgaacctgggaggtggaggttgcagtgagcccagattgcgccactgcactccatcctgggcgacagagcgagactccatctcaaa

SEQ ID NO: 243491 - DNA, 230 bp, Homo sapiens
aagattcttttgggtatactgggatcccattggtggttctgtagatcaatttagggaatattgccattttaacagtgttacatcttctaatccattctcatccatgaacataggatgtctttccttttttttttttttttttttgagacacagttttgctctgtcatccaggctggagtgaagtacagtagtgcaatcacagctcactgcagccttaagtaggttcaagt

SEQ ID NO: 243492 - DNA, 470 bp, Homo sapiens
catatgacatttctggtgctttcttttatcatgctgaagagaaattatctgcaattccttctcagtggttatgatgtcttttaaaaaagttactaaggaaaggtgttgaaaatctggtcaaggatatggcaggagtagtactaaattatgggcaattggatatggattcttagttataatgcttggaacctcaacagattagtaaaatttaacattgcaaggtcctttgactcttctattttcctaggtttagctttaggaggttattaaagtatgtccatttctttaatgtaaagttttgttaaaagcacagacttctgagcaccaccaaacctagcgtgtgtgcaccatgacacacgcggatgtgacactgcaccagcccactcctaccatgtctcctcttgctcttcttatgaactgaatttgtgccatcaatttaggcttaaaaaagataaatgcaaaacagaaaa

SEQ ID NO: 243493 - DNA, 259 bp, Homo sapiens
ccttattaaaattccacttcctccgtaattaaaaaaaactaattacttctagtagttggaccagaaatgacattttcagttcattaatattcagcaaattgttgttgaagatgttcttggcaccctgcactgtcaggctatatcatttctgtttgtttcttatttaaaagtcatctggaaataatagtttgcattttaacaagatgtgtatccatgaattgattttataaataaagtttttaattgctaaaaaatgtgt

SEQ ID NO: 243494 - DNA, 311 bp, Homo sapiens
attccagtcaatatctccccttctccgcctgtgacaaccactgatcgccttgctgtcacagtcaatccgtgaaaggacctgctcctgaacatgcaatcgagccgtgcaggaggtcatcttctgtgcctggtttggagatttctgcaacatggttgcatccctccatgaggctttcttgctgctgagtgggattccaatgtcccagtgtccacatagactccagctggttgacccattcactacgatggacactgggttatttccatggtggggtaactattgataaagccactgcagatgtgtttacacaa

SEQ ID NO: 243495 - DNA, 348 bp, Homo sapiens
gtgtgctatatttagccttcaaaatgtctagcatgcgtggggtgtgtcattttacagaagcttttaaaactgttttcagaaatgttttaaatttcagaaatctaatttagtcaggtacttttatttgaaattaaagatatctattctggattttattccctctctcagtagaggaaataggtttagagttgcaagctcatgatctttgtcttctttctcaactttaaagaggggttctgtgaccataacccactctttgtagggtctcagtttattaacctgtaaaacagtagcaacgattgcataaaaataatgaaagtttttgctgtgggggaggttttatgcttc

SEQ ID NO: 243496 - DNA, 543 bp, Homo sapiens
gatactataaggcatatttttattttccataattttttctaaaaaaaattagtgttggttttccatataacttttaactttataagtaaatatttgtctctttcagctccagtttcatgtgaaatagagtttccagatttatgtagcatggaaagttttaatacgtcagttactgatttttgccagtcattttctcaattatttacttcttttatctttagttgattttttttgtagtgacaagttttgtttctattctcatttccttttgtgtatattctatgtagatttcgtttttggttactatgaaaattacatataacatcctggagttataacattctgatttgaatttatttcaacttaacttcaatcacataccaaaattctactgctatataggtctactctttttaggttattgatgtaacaaattgtatctttattcattgtacaccacctaacagatttataattacattttatgcatttgtcttttaaatcctgtagaaaataaaaagcggagttacaaaccaaaattac

SEQ ID NO: 243497 - DNA, 588 bp, Homo sapiens
tagagatggggtttcaccatgttggtcaggctggtcttgaactcctgacctcaggtgatccacctgcctcggccttccaaagtgctgggattacatgtgtgagctaccatgcccggcctgtgtctgttttttaaaaaacatgttagtgagaatcgtgaacactgctgaatatagttgtagttcattcatcttcattgctgtggactattccattgtatgaatacactatcatttatccatttcactattgatggatattttggttgtttcctatttggactattaaaaaataatactgctgtgaacactcttgttcatacttttggtatacaaatacagtcatgtaccatgtaatgacttctcagtcaacaagattgcaatatacaaaggtggcccccataaaattataacactgtatttttgctgtacctttcctgtgtttagatagatacatgaatacatattattgggtttcaactgcctacagtaattgcaggaattctagtgggcacggggaatgcagcaactgtattcactacagtataacatgcagtacaggtttgtagcctaggagccatagtctagacc

SEQ ID NO: 243498 - DNA, 337 bp, Homo sapiens
ctgaagtcacaattgtcaaacattttaaacgtcagtaccatttatacgtatgcattagcaaacacatataaacaatgtttttatttaaaaaatgaatcgagtggagcagattgtgccttctctgaacataaataaactatccactcaagaaggaattgttattaatcattctgccacaaagaaacatgcactattcacaacagcaatgacatagagtcaacttaaatgtccatcaccgatagactggataaagaaaacgtggcgcatatacacgatggaatactatgcagacataaaaagaatgaaactatgtcctttgcggcaaaatggatggagc

SEQ ID NO: 243499 - DNA, 411 bp, Homo sapiens
ctgcttcaggtccccaagtcaggcacactcatgagccacactccgtggggttcaggcagcaattctgcttactgggggcttcctgcagttgcagtaatgaacaatgtctcagagccttttgcaaggccctgggatggcggtggggtggcctctggtcctttgtgtgaagttctgtgtggatctttggaatacagttctgtcttactaccaagaaggttcagtgcccgattttcttactcagctcctcaccaacgtaagcattcatttttctaagaaacaacacagttcagtctcataggaggagggacatttcctccatttagcatggctttgactttgcagtttttagaataggtccaattgttatggccctttcctgctctcctgagccaggcttgttttagaaagaaa

SEQ ID NO: 243500 - DNA, 473 bp, Homo sapiens
atgagggaatttggggttatttaaaacttgcatacatactattatatatacagttaaattacatgcatataatagcattttatgtcattagcttgacacaagtttaaagtatttccttatttcttccaaacattttctggtttactctcttttaattcagtagtttctatcctagctcttaaccacaggatccctgtctttttatgtcacttcattatctaaatctaggatgagctccctaggtttctgaataaaccagattctttctgtttattctgtttaccacatcatctccttccgttcaaaattgtactcataaaagttaccagaactctggtggactggaatcccccaaacaactcctggaaattcttcttgctttcctctattcagcctttgagctcagtctctgagctttaaaaaattacagtgtattaactgcataagtaatattaatacacctttgttgtaga

SEQ ID NO: 243501 - DNA, 468 bp, Homo sapiens
atgaatatttaaatacaatgtaaataaaacactttatcaattatatttttgtattctaaattagtgacttcacttagcatgtctgccttgcacagcaccacactatttttcaattaaaggtccagatgtttcaaaggctccagtaggcaacggcagttatgagaaatgctttatctgcattgtaatcatcaccaccacatcagctccaggctgcattaacatactcatgttttattccagctccccttctaccagagcaggtaattatacaacacagcagagaaacacaatcctaagagctgcacaatttccttacaagcattcacctgagcaacacattttcatacatgatttcaaattcttctagaaaacatttcattacatagttaaacttgctttagcaggaacactgataatttcaataatatgttgttaataaagaatgaataacagcacagatgtaccaaa

SEQ ID NO: 243502 - DNA, 322 bp, Homo sapiens
ggtcagtaggcactagcaccgtcattgtacaggtcgttaagatacttgcctcttccttggttatctagccgctgaagggataattatgtttggcacaaagaggatggtgctgcagcagagcctagctctggcattttttctgattgatcggcatctattctatacctgctgttaaatattttgactctcactccagatcatcaaattgttttgagagtaaatgagttgaagcatgcatactgcctagctagaccagtgtctgagataaatataatacagagtttgctattataatttagaatttttattgagtatactctgc

SEQ ID NO: 243503 - DNA, 696 bp, Homo sapiens
gagacagggtttcattcccagagcccaggcaggctagaatgcaatggcgcaatctcggctcacagcaacctctgcctcccaagctcaagtgattctccagcgtcagcctcccgagtagctgggactacaggcgcacaccaccacacccagctaatttttgtagaggtggggttttgccatgttgcccaggctggtccagaactcctgagctgaagcgatccacccacctcagcctcccaaagtgctgggattacaagcaggagccactgcacttggccttgcctgtgttaattggggttcctctaacttaggtccttaccaatgctaggaaggcataatccccataagtttggatcaacataccacatacccagaacacacagtttaatatatgtgagagagacaaaagaatcgggaggtagatgcaggcaagggaaaactgaataggagcaaatggattgctagggaaaaaacaaaaaacaaaaacaaaaccagaaacaacaaatgtagaagttaaaatcgatatataatatgggaatggtctttctgttgtttataaaatgtctacacaatttattaatttctagaaaattattttttagaaaagttctgtgaacttcagtggactcttaaaaattggagtttagcattagctagaaactggcatatttgttttagtagcacattcttattctg

SEQ ID NO: 243504 - DNA, 360 bp, Homo sapiens
aaaagatagaactccaggaaatccaacccaaagaagctaagcacattgcagaagaggcagataggaagtatgaagaggtggcttgtaagtgggtgatcactgaaggagacttggaacgcacagagaatgagctgagctggcagagccccattgccgagagatggatgagcagatcagactgatggaccagaacctgaagtgtctgagtgctgctgaagaaaactactctcaagacctgtgctgagtttgctgagagatcggtagccaagctggaaatgacttggaagataaactgaaatgcaccaaagaggagtattctgtacacagaggttgctggaccagactctgctgacctgaatg

SEQ ID NO: 243505 - DNA, 655 bp, Homo sapiens
tcccacggctgcagcctccaggggtacctctccccacaggccctacctccggtccaggctgtccctccctctcaccatagtgcaaaaatgcactaggctccccagtcttttaaaaaaattagactttttaaagaacaatttaaggtttacagcaaaattgagaggaaggtacagggagttcccgtcccccttggaacccccctgccaccaacaccctgcatgggggcacattagtcaccacccaggaacctgcactgacatcacctccaccgagtccagagcggatgtcaggtcgccctggtggcacagccacaggtggacaaacagcagcatcgccgcccaggagccctgtgcccgcccactcctactaccctcctcaagcccctgcagcctccggatggttctgccttttccagtgcgccatgctgcagagctggagtcgcacggcctacagccttttcagaggggcttctctacttagtaacagggacttgatgtttctcccatgtgcctgctcttggcccgactgctcatttcttttcagtactggataatagtccagtatggatgcaccacggtttatttttccacttatctactgaagggcatcttggtcgcttccaggttttggtaattatgaagaaagatgctatca

SEQ ID NO: 243506 - DNA, 239 bp, Homo sapiens
tgcctgttctggacattcatacaaatgacatcatacggtatgtggtctttggggctggcttctttcactgagcttgttttgaagattcattcgtactgcaacatgtacaagtacttaattttttttttttttttttttgagacggagtttctcttttgtcgcccaggctggaggttgtagtgagccgagatggtgccactgcactctagccagggtgacggagtgagactctttctcaa

SEQ ID NO: 243507 - DNA, 394 bp, Homo sapiens
gggatttcaggtgcacaccaccatgcccgactaatttttgtatttttagtagaaacaggttttcaccacgttggccaggctggtcttgaactcctgacattgtgatccgcccgcctcggcctctcaaagtgctgggtttacaggcgtgagccaccgtgcccggtcttcatcatattattaactaaatgcatttgacaaagcttatatctttttggaagaaactgaaaaatgtgggttgagtgatagattaggtggataatttatgtattatcctcagtgttaaccttttaatactttattatcttggcttcataacactttatatagcacttaaatttacattgtaagtgactagattgtccttgagtgtagaaaggctggattcatctttgtt

SEQ ID NO: 243508 - DNA, 303 bp, Homo sapiens
atgaagaagttgcattttgaaagataccagggaaaaacatgggtgtcactttcccgaccgtagtgtagagcatttggtagttaagtctaacgtttaagattccatttatctccctccagaattgcacagtatacctctcactgactttggcagcagtgccctctgatgtgaagaatgtgggctgtggaatcagcttgatttgaatgccactctgccacttacgtaactttaggcaagtcacataatccctcttaactgtttacttatctgtaaaatggagacatattgaggatcagtaagatt

SEQ ID NO: 243509 - DNA, 362 bp, Homo sapiens
tgcgtttcgcacctgggcgcaagctggttactgggcacgcgctgacaacccacatctggaaaacccggtcctaactggagaataaaacttaaatgcacgtgaactcaccggcagctgaacatttccgtgagaaaacccctaaaagccggcaccggctccggtggggccacagagtctctggagcgaggctctctccaatgcctgggccctgggaccgagcaactgtcccagtagaatccctttcgggctttgttgcagggataggggattctttttaacgtgttccttggcttgcacaggcatttactggtcctctggagatcacatataacaggaagtctctaaattcagtatttctttta

SEQ ID NO: 243510 - DNA, 435 bp, Homo sapiens
acttatcactatagcacccacccttaagcacaaggttatccaatgttttcaaggagtccagcatttcataacagaaccccctgattagtttgctaactgatgaaagcagagttaaattcctgttatgcaggtttagagtacaggagattctatgtccccatatcctctgccccccaatctatcccttggcaaacacaagtacctctactagaataaccatactccctcttcccaacccacttctcttgtttaagggcactggcagtgtttgtgtatgtcaacaacatcggagtatctggggtccctggagagttagattttctgtattaattacagactgggagattactctggctccagtaaaagcaataccaggattgaagtcccctctctgattatggtggctgggatttgctggaagaggcataggtccag

SEQ ID NO: 243511 - DNA, 416 bp, Homo sapiens
agtggttcgagactggcagcatatcccaataccattcagaataaaattaaaatattttctgtagataaaaatatagtcaatcaaagtcattcaggattcccatatggtatgctgctaggtatgaattcacaatgtaaagtcaccaaatatgggaggaaaagacatcattgtaattgaaaagtaccagcagaaagcaaagctgagatttacctccacctccccaaactaatttagttcagtaaacttcaaaatatcaaagatgaagagaacatttaaaagaagccagagaggaaagacagatcatctacaagaaagtatcacttaaaaacagattttcttatgtccataatgacattggcaatgtaatattattttcagcgtgctgagaggaagttacctttctagactgacgaact

SEQ ID NO: 243512 - DNA, 573 bp, Homo sapiens
aagaggagctgccgctcgttgccatcaggcacctcaggagctggacatggtattcattataatttctgatgaggaactagagaggtctcatagcatatagaccttgatcaaattgggtcatggtggagtcaggcaaaactctgcaatgactcacaggtacctaagtataaaacaaagtctcaactcagagcatccatcagagcttcaggctcagtagtcattcctttatgctgttgctgtgtttgtactgtgataactggtgcttgaagggaggacatatagttacatgttgcgggaaaacacatgtcattagaaaacttggcatgatttagggaccattgccttttccatggtagatgtgggactctctgtcatcttcaccttgttgttccaagtgcagaagagaaagcttcttcctgctttcagctgcgtgactgacaagggaagctggaattcagagaatcagtggcagcctctgtctctccaggccccaaccctgcaggtttaaggaatggacttaggtctctggcactttgttctcaacacacattttccttcactcattcagaaaaa

SEQ ID NO: 243513 - DNA, 396 bp, Homo sapiens
cagttcaggtttgagcccagtccaacaattttttgctttatttttaagtgacctcttaccattttcaggcttcctcccctctcaccttgacctctaactccaaatttatgtctccttgtcattgtggggaacttcttggagaaaaggttaaagctaagttggagctctgtctcgggcctttcatagcaacactgactcttattattagcggtgcactccaggctgctagagttcatattttggcagtagaccatcaaacaccctatttttaagagcctttaacttcgttgtaaacatgtgctgtgactgggagcttattttctttactcatatttaccaaaagcaatttagctgttgaaaagttgctataaggaaaaaaacaacaacaacaacaac

SEQ ID NO: 243514 - DNA, 550 bp, Homo sapiens
aggtaaaaaagaaagaggaatcaaagaaaacaaaggaagggcagaaaataaaagaaagaaaagtgagaacaaggaaaagagagagcaagattcagaggcagggaagacctgagtctgggaagagggcaggaatgtaccctgtggggctgaggcgtgtcccttcatgtcacatcctggtgctggtggtgacctgattttgactcatccaaaaaatgatcaaaagagagggaaacaaagactaggacatctagcacaatgttgaaaagtatggcccagaccctatcagaataatcccagcccatcatagcaaaattggtgaaaacaaaaaaaagggaaaaatgacaaaacagccagaggaaaaagacatctattttcaaaagattaataataaggcaaatggctgacttttcaacagaagcaatagaaaccaaagacaatagagtgacatattgaaattgctgaaagaaaattactgccaatctagggttctgtatctagagaaaatatctttcaaaaatgaaaacaaaataaatatgtttttggatgaaca

SEQ ID NO: 243515 - DNA, 371 bp, Homo sapiens
cagacatgaaaagatatccaaaagataaagaaaagtgcaagttataaaataatacagagtattataaaaattttagctcaaacacacatatacactcacattgaccctcaacttcctcataaaaacaaatctgaggctgggtacagtggctgaagcctgtaatcccagcactttgggaggtcgaggtaggcagatcacctgaggtcaggagtttgagaccaccctggccaacatggtgagacccttgtctctactaaaaatacaaaaatcagctgggcatggtggcgcatgcctgtagtcctagctaaggaggctgcagtgaaccgagaccacaccactgcactccagcctgtgtgacagggcaagaccct

SEQ ID NO: 243516 - DNA, 421 bp, Homo sapiens
cgcctactgtgttctggctgtgctggcagcagattggatggtgcccacccacattgagggtaggtcttcctttctcagtccactgactcaactgtcaatctcctctggcaacaccttcacagacacacccagaaacaatactttatcagctatctaagcatccttcaatccaataaagttgacacctttattaaccatcacacctaccctataagtgagcatatttgctcctgggtattttttctcaagaaatatgaaaacaaatgttgacacaaagacttgtataaaatgtttttatgccaggcatggtggctcttgcctgtaatcccagcactttgggaggccaaggaggaaggatcacttgagtccaggaattcaagaccagcctgagcaagacagtaagaccttgtctctacaaaaa

SEQ ID NO: 243517 - DNA, 497 bp, Homo sapiens
atttccaaacctgagaaaactgagaaatacccacataagtacttcctaccaccaaactgccgggatgccagcaaaaggctccatatcgtccccatcggggtccacagcctgcgcgtcagccgtgagattggaagaagctggggttgataagcagccctgtgggaaccagctataaacgcacacatggagacagaggagcacacaggaaaatggaagaacttcacggccagtttatttgtaaccagagccaaagccttgagccagccacgccggtcaccggtcagctgcagtcggcctcactgcccggcaggagctgtggccaccacgtcatggaggagtgggagggcaagggatgaagagggggaagatgagaatcagagccaaatccccgtggctcccccaggctgtgaggacgcatccctgtgggtcagttccaggcccgagcattcccatgtgtgggaatcacatgtttattaaaacgtcaagtcacccagaaa

SEQ ID NO: 243518 - DNA, 541 bp, Homo sapiens
cagaaagagcgatcctccagaattcctccctttctgctacagcacagaaaacgatttcacgaagtcattgttgcctttccaggagaaaaggtttcacatttgacattgacagtccattaactgtgttaacagcagtaattgctttagagcagtttaatggaagatgtttatgtgtggctaataaggtttgttttcccccccccaacaccaatgtagaaatgaaagcagagaggaattggaaaggtgtggagaagctctgaagaatcagaaggttaatggaatcacggaaccctaaatgaatagaactccccgtctgtttcccctcccttttccattactacgtcatttactttcctagccttgctaggacggatgccagaaagtgagcttccagcttagaatagttattaaaaagggatgtgctaaggttataatcttattttttatttagttttattttttcttatacatattattactgttacagtgaactttttttggtaataagccaaaatcaataaaaatattttatgaaaagaaa

SEQ ID NO: 243519 - DNA, 124 bp, Homo sapiens
tattagaatggtgcttcttcccaatttattggggacttttcctttgactaaacttggttgtacctccctatatccagattcttagccaaatttttctaataaatagcttgtttcatatgtctct

SEQ ID NO: 243520 - DNA, 732 bp, Homo sapiens
actccttatcactggtgcccacggcttcatctgtgccctgaagatactaatgctgcggtgactggtcagattaatggtgatgctttcatggggcgccgtaagacatgtccgcgaggtatttcacccatacaatgggaggcagtgttccagtctgttggagacaggaaagggaggctcagtccctgcgaaggaactttcccgagttcacacagcatttcagcaccgggtggcctggcttcagagtttcagagggaggggtggcccttcctgtcggtcctgggggtctcctggagtcaggacccttgggaaacccaaatccaccaggacgcttgcatcaggagaacctgaccacatgagaagctgcccttttctggttctcctgcttaccctcgacttggggtgtcggcaaatttcagagcttgccaaatctgcatcttcctggcctgtttaaaatgaatgtgtcagccccattctggacagcagctgacacctcttcccccgtgccagccaggacagtgtggttgggcgtaactcagccccggttaaaaatggaaaaaagtacaaagacatgtgttcaaggcctggtgacagaatttgaaaatgtgacaccagcctgttagtaatttgttttcacagaaacctgattcaacactgagcagacaggtggggccagggccttgggatcatctctgtgcttgcccagggacatctgtatgtctggcccaaagcggg

SEQ ID NO: 243521 - DNA, 325 bp, Homo sapiens
catgctgtttttgtgatagtgaataagtctcacaagatctgatgattttataaagggcagttcccctgcacatgctctcttgcctgctgccatgtaggatgtgactttgctcctcctttgccttccaccaggattgtgaggcctccccagccacatcaaactgtgagtccattaaatctctttttctttaaaaattacccagtctcgggtatgtcttttattggcagcggagaatggactaatacagatgccaatatcctaacatcgactgtagtgatggctgcataaagtggagggtatcttaataaaggtgttaccaaaaaca

SEQ ID NO: 243522 - DNA, 893 bp, Homo sapiens
cgcagtttctggagccattcacccacaggctcgcatcacggtggcttcaagttggtggtgcgtcccttgggccctcacccgccggactcctactttcaaatcttaagccccacattgtgggaacctgttcaggtcacttcagtctaggccctggtgtttaggctgggggaagcgggagagctcatgggtgatgaagccgtttctgaaagccagtgtgagtaatgtgacctttgaggaagtggccatgcacttctcctggagggaatggagtctccttgatgatgttccgaaactcctatactgcagtgtgatgctgagaacttttcactgatggcctcaatggggtatcttcttccaaaattggaactgagctacctgatggaaaatgagcaagattattgtgtggtgaagagaggcctctcataaagttcctgtccagatatcccaaatgacccagcaaaagggacatttcgtttgccccctcacagccattgtatgtgagtgtcttgtgatgatgatgatgatgatgatgatgatgatgatgatgatgatgatgataaaaatagccgtaatgcatttcatgagtactgactttgtgccaggtcctgtgcaaagctctattacttcccatgaggaatctccatctcaaggctcagagagatgaactgctggcgcagggatacacagggaggaaagtcaaggcgtgagttgcctggtagagacatttgagagtgggtcattgcctcagataatttccacggaactctgtgtgcctctcctttaagaagaggtgaagccaatccctttcttgggagccttgagaagccgcctcaccgagaacagaaagtgcgctccaggtaccacccggattccgtcaaactacattacccaga

SEQ ID NO: 243523 - DNA, 698 bp, Homo sapiens
atggtgagaagggtacccaaacacttgaatggtactgtaccctctacttgccatctgaatcctcacttgtggaacccaggcactctggctgtattcgcgagtaagcataggtgtgggactgtgtcctgccattgcaccatctttaatctggacttgtggacctcaggctctctgactattcatggacagaagtttctgcaggcacaggtggggtgctgtttcctcccattgtacacctgaattcaggacttgtggaccccaggtgttctggctgtgttcatgaacagaagtgtcccccccaaacaaacccatatatggtgccatctcctcccattacagtcacagatatggcaccagcccctccaacagaaacagatgtgctcaagctgagtggtccaaaggcgtttgacagaagtcatgaacagaagtatcttggggcacatgtttcttctctgttgtgcaggcttctccagcagtaacaggtttgcccaggccatatgggccccaagcgctctgaccagacacaagaagagaagacttgcagtcacagggtatcttcttccaaaattggaactgagctacctgatggaaaatgagcaagattattgtgtggtgaagagaggcctctcataaagttcctgtccagatgtgccttctctctggatccacatttcttctctcatcacagatctttcacc

SEQ ID NO: 243524 - DNA, 335 bp, Homo sapiens
ctgatgtcatctgaaaattactgataggggaaattttaatattatcatattaaataattatcttcattttccttaggaatctccatctcaaggctcagagagatgaactgctggcgcagggatacacagggaggaaagtcaaggcgtgagttgcctggtagagacatttgagagtgggtcattgcctcagataatttccacggaactctgtgtgcctctcctttaagaagaggtgaagccaatccctttcttgggagccttgagaagccgcctcaccgagaacagaaagtgcgctccaggtaccacccggattccgtcaaactacattacccaga

SEQ ID NO: 243525 - DNA, 1164 bp, Homo sapiens
ttattttcttgttttgcttttattattcgtggtttagcattttgttttatgtttattgactgtttgcattttttctgtgaattatctgtttatatgctttgatctctttttactgtatcattaatttttttaattatagaagctttttatatattataggtgacaattctatatatgtcaaaaatatttctccccgtcttctttgtttagaatgtcttttgcactgcagttttaaagttgtatgtagtcaaatctgttttctttcctctttgtagtttgtagcctaagtgaaatgtagagaaaagctctcctcctttagactataaaactattctaattttaaaagattcttttatggttttattttttgcatttgaatctttaatatgtttaaataagtgaaagtaaaaacttagctttgcttttttttcccaaatataatcaaataaatgatcaaacagacccatttattgaataacatatgctttccccactgacttaaaatgccaattttaccataaatgaaattcccatatatacccgggcctgttctgaaactctacattcatatccatgagtgcagatttgtgatatatgttggtatctagtaggataaacagaaacatttcacacaactttattccctgcgagtggcactgttatcaatccgatctagattaggtaaattaacaggacacaagttcagttatccctttgataaattatcaaaaaatttaaatattggcataccaggtattctttcatagtgtgtatatagccatttaatatggagaattgaaatttcaatcatgacattttgtttagttgttacagaacaaaaagttatgtgtaatagtgattctatattgcctataaacatgtacattttaataattgttttctttataaaaactacaaattcaacgtatttaatagatacagaggatgtccagttagctctaacatataaagagcttggaagccatcactcccatccttacaagaaaaagctaagcaaatggaaaaatcaacaattcttttgaacccatcagagaactgaggtctcagggtaaaccaccactccaaaatctggagagagaggtgaatccagagtcacagctgagatttgcttacctggagtgcaagctgctggagccataaact

SEQ ID NO: 243526 - DNA, 1302 bp, Homo sapiens
tcagctttggtggcggctaccggcggagacgggggcggcggccacgccaccgctgctgtcacagaaaggctctggtgggtggggtgggaggcggggaagtgccgggggcgcagccgacatgggcccgccgccacggctgctgtgagcagcctctttccctgtgtggccgccggcgtgggcggggacggcgcgaccctcgcgcggccgggctgcgggcttccaggccagcgcgcgggggccggacggacagccccacaccgacatgtaaccatggactgcaggaccaaggcaaatccagacagaacctttgacttggtgttgaaagtgaaatgtcatgcctctgaaaatgaagaggacagtccagcttatctgccgaggattccccctggaaaagtacgccgattcgcattttgcattaagaaactggaaaactttcctgtcggtcctggcgtagcgcctcccgtgtccggggtagaccttgtaccggctgaaaccgcatagctcgaccttcatggcggcagctccacgggaggagaaaagatggccccaacctgtattttcgagtaataccctttagaattcataaaagtctaagaacactttgtaaatggaatgtttcatagttcacactaaagtaaacataaactgttaagcaaaactttagatcacttcttctaacaaaggaaatgtacccgagaacccatgagaagtagcttcagagtatttttttttaacagtgaattctctgaggtcttggacttttaaattttatttagtttaattgccaaaagccaaggtggagctgtgtagcattctgaggaaataaaaccacttgaagcagaggtatagtagaataaagccattctgcctccagtatttgggtggatgtatttggtactgtaatcattttacagattgctaattcattgatgtaaaagatactcaatggtaggcatgttggacccattcaatattgttttttgtacctttctgttaacttttgtattattcatatataatatagatttaaccaaatctattttcttaaaattgcatattattgttttatgaaatgttcttttaaattttgttaaaattttgtccgctttttctacagaagtaggaatgaaatatttaacattttctgccagttcttacttatccactgtgttccagagtctttaatttaaatatttttgtttgccaggcttagattttcatgtgtctattaaaagagtaggaacatactcctccatgccagacatctgctatgtataagcattgattattttcccccttatg

SEQ ID NO: 243527 - DNA, 691 bp, Homo sapiens
  misc_feature (691)..(691): n is a, c, g, or t
tcagctttggtggcggctaccggcggagacgggggcggcggccacgccaccgctgctgtcacagaaaggctctggtgggtggggtgggaggcggggaagtgccgggggcgcagccgacatgggcccgccgccacggctgctgtgagcagcctctttccctgtgtggccgccggcgtgggcggggacggcgcgaccctcgcgcggccgggctgcgggcttccaggccagcgcgcgggggccggacggacagccccacaccgacatgtaaccatggactgcaggaccaaggcaaatccagacagaacctttgacttggtgttgaaagtgaaatgtcatgcctctgaaaatgaagatcctgtggtattgtggaaattcccagaggactttggagaccaggaaatactacagagtgtgccaaagttctgttttccctttgacgttgaaagggtgtctcagaatcaagttggacagcactttacctttgtactgacagacattgaaagtaaacagagatttggattctgcagactgacgtcaggaggcacaatttgtttatgcatccttaggtatgatttgaatgaaactctcagatcactgtataaccacccagtaccaaaggcaaatactcctgtcagtctgctttagtaccggattcctactttattgcccctgaggtaactggacttccacn

SEQ ID NO: 243528 - DNA, 972 bp, Homo sapiens
  misc_feature (972)..(972): n is a, c, g, or t
tcagctttggtggcggctaccggcggagacgggggcggcggccacgccaccgctgctgtcacagaaaggctctggtgggtggggtgggaggcggggaagtgccgggggcgcagccgacatgggcccgccgccacggctgctgtgagcagcctctttccctgtgtggccgccggcgtgggcggggacggcgcgaccctcgcgcggccgggctgcgggcttccaggccagcgcgcgggggccggacggacagccccacaccgacatgtaaccatggactgcaggaccaaggcaaatccagacagaacctttgacttggtgttgaaagtgaaatgtcatgcctctgaaaatgaagaggacagtccagcttatctgccgaggattccccctggaaaagtacgccgattcgcattttgcattaagaaactggaaaactttcctgtcggtcctggcgtagcgcctcccgtgtccggggtagaccttgtaccggctgaaaccgcatagctcgaccttcatggcggcagctccacgggaggagaaaagatggccccaacctgtattttcgaatcctgtggtattgtggaaattcccagaggactttggagaccaggaaatactacagagtgtgccaaagttctgttttccctttgacgttgaaagggtgtctcagaatcaagttggacagcactttacctttgtactgacagacattgaaagtaaacagagatttggattctgcagactgacgtcaggaggcacaatttgtttatgcatccttaggtttaccttccctggtttgaagtgtattacaagcttctaaatactcttgcagattacttggctaaggaactgatgatttgaatgaaactctcagatcactgtataaccacccagtaccaaaggcaaatactcctgtcagtctgctttagtaccggattcctactttattgcccctgaggtaactggacttccacn

SEQ ID NO: 243529 - DNA, 463 bp, Homo sapiens
tgtgatctgtggcccccaggtgccctctgctgcccaagggacacccctgctgccaggaccagaggaggggcctatgctctgctcctctgcagtgtttttgaccccatatgaacttggggcccggaagttctccgcaaggtctggccctgttctcccctcccggaaagctcctttgccttagccctaccaccagaagacacggtctactcagtcaactctttcccagagggacagggtgaatggccagtggggggcaggcaggagattctagaactcataaaaatgggttgcttcccagctttgcccaacactggctttgtaactttgggcaagccctcagacttcttggagccttatttcctaacccataacctgggatgataatttttgccatcaagcagaatgtaaggattgagataaaaggaataaattgcccagcactgggactagcatgcagtaggtg

SEQ ID NO: 243530 - DNA, 217 bp, Homo sapiens
cttacaggtctagaagttgctctgggtgagtcagtggtaagtgcatgtgaaggcctaggacattgctttacaccactgtagactttataaacactgtacacttaggctaccctaaatttatttaaatttttttcttcaataataaattaaccttagcctcctgtaattgagtactttaaacttttcagttttttaaaactttctgattcttgtataa

SEQ ID NO: 243531 - DNA, 414 bp, Homo sapiens
tgaggggtggctttcaaagcagtgtttggagctccaaggactcccctgactccctcttctgatccatcagaggcaaagattcatagactagaggcagcttctacatcagactgcctggggcacatccctgctctacttcccagccgggtgaccctgtgccagttcctgctgcctttcagctggctttcttacctgtaacatggagatagtgatacctgcctcatcagctgctgtgaggaccaaggcagcgtgtgcaagctccttggcccaacgcctggtacgtcgcaaatgttacccggtattattacacccactcactcacccacagcacagctgccccatccgcccatgcctgctggtcttctctggcaccctggagaaaggccacaagtaaatctggatttctcaacttga

SEQ ID NO: 243532 - DNA, 464 bp, Homo sapiens
tacaaaatcacatccattagtattgtcctttcaagaatttcatataaatggactcatagtatatactttttttgagagagagagagggtttctgtcatccaggctggagtgcagtggtgccatcttggctcactgcagcctggacctcctgggctcaagtgatcctcctgcctcagccccccaagtaactgggactacaggcacacacaaccacacccagctaatttttgtattttttgtagagatgaggtcttgccatgttgcccaagctgttctccaacacctcagctcatacgatccgcctgcctcggcctcccaaggtgctgggattacaggcttgagccaccaagcccagctcccctttttttttttttaagagacggaccaaggccagagtatagctttaggccagaagttcttgaccagcctgggcaacatggtgatactcctgactcaaaaaaaaa

SEQ ID NO: 243533 - DNA, 386 bp, Homo sapiens
cgcaattaccaaataatatattcttctcactatggtgatttgacagatcaaaagctttctgagggcagagactgcgttatccgtttacgtatctccaatgctttgtatcatgtctggcccattgttagtactcaaaaagtgtttgcggaattaatgaatggttgagtaagttgcttcctataatcaagacttttagttagaatggtggtaaatttagacttagaggattttgtactttgtatcagtggggctgccctaactggtggatttattttttaatgcaatttttttctttttatttaaaatttctttggaagcacagatgatattataaacataataatgtaaataaagtaagaagaaataaattactgattactccacct

SEQ ID NO: 243534 - DNA, 304 bp, Homo sapiens
ggctactggtctccatatctagaggttttctgtggccacagtgtgagtgctcagcctaaaccctccccctgccctttgacacaagctaggtaatgggcactgctaggggacatcagggtagagcagttgggtctcagtcttctcttctgtgaaatgggtagggtgtgagttgaaaagggcaggactgactgggcacggtggcgcacgcctgtaatctcagcactttgggaggctgaggcaggtggatcacgaggtcgggagatcgagatcatcctcgtcaacatggtgaaagcccgtgtttact

SEQ ID NO: 243535 - DNA, 658 bp, Homo sapiens
attcagtcatcgatagtacaagaggggcctttttgtaaacctcctttttaatgtcaaagcaccaatttataaaacactgcagatgcatatagagattgtatataacagatctgtccagcttgtgcatgaaatggatttgataaagtttttgctatgttatttactacatttggggattaatacgtgatttatatgtatgtttttctgtaaatctactttttttgtacgagatgttctacaagatatgaagctaagggaggaaaacaccaaagatatctctagttatgttgaacatagccaatatggtttcaatggatcaataagaaaaaaccatttcagtaaggaatgaaatacgtacttatttgagaaaatgtttcttaacagtaaaaaagtatatatttttctctttggtaaaacgaaaagagaggaaaaatatgtatagtgtaaccccgcaagatgaggctttgcagaaaaacaatgcaatagaacatggcggggcaggcccattataaggccttaggtgagtcatttcccctgttctgagaccttagatgggaaagaaggagaagtggtttccacgtagttactttccaatttacactgttgattattataataattgatattggatgaactgagtaaatataagtccttgtac

SEQ ID NO: 243536 - DNA, 422 bp, Homo sapiens
ctgtcattgttgcttctcatgctgtgtggctgtttcttctttctcagcagaaggctttctcagcccttcagtccacaaatgcgtggaaagtggccacattagaaaccatatcacaaattctagtcactcagtgggactatcaattgcttccaattctagtttctcctagaagacactctggggcaaatgttcactcctggtctgatcagtggtggccagaggaatcaaactgtacaaatatggctgctagaggggctctgtgttttgggggcagttacagaagacggggaataaggataggcacaccagcactttgcagttacagaggcagtctacctggttgtctgtatggggaactgagatcctaactgctagagaagttctagccctgaatttaaattgtgacagcatctcttatttgt

SEQ ID NO: 243537 - DNA, 460 bp, Homo sapiens
gtgggtaaagctgctccagcgttccagtgcctaatttgaaataaaaatgttcagcgaccctctctgttcctactctgtgtactgtacatccttgcccctttgacttttctcatttggagcccagatgacttatatatacacatagtcactggcccctgggaaggacagtgagagtttgaaggattaaagccagcatggtggctcatgcctgtaatcccagcaatttgtgagaccgaggttggcagatcacttgaagtcgggagttcaagaccagcatggccaacatggtgaaacctcatctctactgaaaatataaaaattagccgagtattgcagaatttgcctgtaatcccagctacttgggaggctgagggagaatcacatgaaccgggaggtggaggttgctgagccaagattacaccactgcactacagcctgtgtgacagaacaagactgcctc

SEQ ID NO: 243538 - DNA, 303 bp, Homo sapiens
ggtattcttccagtggactactacatggccatgagaaagagtgaaccactgccacaccagtaacacaggtgaatgttgcagaccgaatgacaaaggataaacgcctgactcaaatacacatcatatgatttcattttcgtaacgctcaagagcaggtaaaacgaatccatggtgatagaagttaggacagtggttctcttttggcatgtggttgagtaatgactggggaaatgaacaagggagccttctggaatactgaaaatattttctatattgatctaggtaatggttatgagggtgtat

SEQ ID NO: 243539 - DNA, 404 bp, Homo sapiens
tacacttcatgtgggcaagggccttgttcacgagtgtagcactagtgcctttaactgctagcaaagtagccactcggatgattataccaaacactttactaaagctggggatctgtctagtggggaagacaaacaataaatatataatatgtcaggtggtattaaatgctatgaaaagaaaggagtagatggactgtaaaggaggatgctatttttttgtggccatcccgcactgagacaggatgcattccacactcaaaatttggttcacatgtccagactgatagccaagttcagtggctcacgcctgtaatcctagtacttagggagaccaaggcaggaggatcacttgaggccaggagttcaaggccagcctgggcaacagagagagacccccatctctg

SEQ ID NO: 243540 - DNA, 694 bp, Homo sapiens
cggtataagcgccaggccccgccgccggcatgctgtccacagccgtggcctccactgcccacatcgccctgacctgtttgcgccctgagagcttatagcttcattccaccacgtgtggcatttggccctgtttggcagtgatgaccgcctttctgttcagtgtctgagtgctatgtagattgcacacaggggtccagatgcattctgttttgagaatgtcagtggatacaccaatagctgctttggatttcaccagaaccgctgtttggaatgcagccaattcaagtgaagaaatatccatatttgtggctctgttacagtggtgaaatctacaaccataagaaggtcttgtacattgaagcacttcaagactccctttttaaaagtggagccctttcttcctggacactatgaagttttgatttaaagccaaatgaccaagttgcatccgtggtaatggttcaatatcatcacctgtcgggatgaacccccaagcgtgctctattacaacgtggaagaaaactcttttccagaggggctgtggactccagctgtgttgctgctaccccttgtttgaagcagctcaaaagaggcccaagtaccagtatcctctccagaccttttgtaacttgggcatggaaggacaggctgattactgggttgttagaaaggggacggtacttttcttttaaca

SEQ ID NO: 243541 - DNA, 370 bp, Homo sapiens
ttagactttcttcaatcacacctgaataaatcacttagagagagcttatagcttcattccaccacgtgtggcatttggccctgtttggcagtgatgaccgcctttctgttcagtgtctgagtgctatgtagattgcacacaggggtccagatgcattctgttttgagaatgtcagtggatacaccaatagctgctttggatttcaccagaaccgctgtttggaatgcagccaattcaagtgaagaaatatccatatttgtggctctgttacagtggtgaaatctacaaccataagaaggtgaggaaagagacaccagatgtctagatgtgattaaacttaagatcttgttggtaatgatgatattatata

SEQ ID NO: 243542 - DNA, 409 bp, Homo sapiens
tctcttaagataaccctttagtgagtatgaaatgctacttccttgtggttttgatttgcatttttctattgtatatgcttttgagcatagtttcatgtgcttattggtcatttgtatgtcttttttggagaaatagtcattcaaatcctttgacaacaatccatttggaaattgaattgttatctttacatcattgagtttatgaattatttatatattctttatatattatgggtataaatcctttatcagacttatgattagcaaatatttttatcactctgtagataatatttttattatcttgatagtgttgaaaagttaaaagattttaattttgataaagttcaatttataattttattgccatgattttgatgacttacctaataaatcattgtctatccca

SEQ ID NO: 243543 - DNA, 489 bp, Homo sapiens
ttagcttttgttttgtcacaccctcctatctcaatctttcaaaaccacatcaaacagatggtgagaggcatcatgaacagaaaaaggaaggcattacttaagaagaaaagattgtagaagagtaccaatgaaactcagttgtgctcaaacctactctccaaatatctagcatactggatttgccaaacaatccagaagcttttgtttacttaaataaagtctattggccattgagtgataagctattaagctcttcctcaattaatatctaacctaactgagaagaataaaaggtatgattcagaaaaataagtcagaatatgaattatacctactttttcagcattatgtaacaaaaaaattttgcccatatactatagccaaacaattacacttatttgctgaagaataaccacattttgatggaaagtaactacatccacaaccgcatggttcacattgataacctaatttctctcgaggggaagg

SEQ ID NO: 243544 - DNA, 578 bp, Homo sapiens
aagtgaatgtaatgtcagtagactcttgaaaatgtcccttaccctctggatctgttaaaaatgttattttatattcaaagttcaggttgttttttggtttcatcctctcttgcttttttaaagttgtatatgtgattatgtcattactggaagagtcttattcctttcccttaatctctcactcttgccccctgcccctgtgtaggactgaatacttcattctgttgtagagggtctttgtacacagtacattattacattatttaatttattcactccccacctgtgaccttcctttctctgatgtctccttactaattccttcactttcacttttcctttcagctgtcatccactctttcctttttacttatctgctgaattaacttgctcacactgattaaccctcttttgtttgttattagtgctgcttagagtctttcttctattttctccatccagctttccttttactctctcattctgactttgcatccccagtcatgctcctagcctttaaagagttatccttagctacaagaaaaactggtaaataaaaatataaaatgaaacaaaac

SEQ ID NO: 243545 - DNA, 278 bp, Homo sapiens
ccgcagcctatcccccagttcgttcccaaacccccaggtagacaggcctgcccctactgagaacttatcctcttttttttttcctttggcctccaaaagatttaaacacgtgctgttgcctcacctaagcttggaacattcctcagtaaaccacacccccactgcccggtttcgctaactccttcctgacctcccttgtctctgcttgaagggatagattaatgttgaaaaaaagatttcccaatcaagaattacaaaggaattagatgcctgcttta

SEQ ID NO: 243546 - DNA, 252 bp, Homo sapiens
agtgtggtattctgtaactccaaactagttcagtactcaaaaggacttgcctgattatatgttgtaagattgatgaatgagtacacattatatgttagaaaaattttaagggaggtttgtatttctcttgatgaaaaatgttatatatatgaaagaaaagagtggtattatcactcaaataagcaataaaagaaaaaaatagatgaattggatttcagaattaaaaacttttatgcttcaaaagacactatc

SEQ ID NO: 243547 - DNA, 325 bp, Homo sapiens
tggccacttccggaattggaaaactttcttaaatcaggcctgggcgcgtggctcaaagctggtaatttcagcactttgggagccgagcaagcggatcactaggtcaagagatcgagaccatcctggccaacatggtgaaaccccgtctctactaaaggtatgaaaattagctgggcatggcggcgcacgtctgtagtcccggctactcgggaggctgaggcaggaaaatcgcttgaacccgggaggcggagtttgcagtgagtggagatcgcgccactgcactccagcctgggcgacaaactgaggctccgtctcaaaaacaaaa

SEQ ID NO: 243548 - DNA, 309 bp, Homo sapiens
agtaaaaagcaaaaatacaagaggatctccagggagaaggaagtctgtcaccctcctagaaggccacctctgttaccaatttcttgtatctttccccagagtctgcacagataggagcacacaagtatttgtatccttcaggtagatttgggctgttaaagcttaagggatgattgtgaaaggatttgaaaaacgctcattgtgttgtggggaaggcactcactatgtaaaagatgaaaaaaaaaaataacaaaaccaacaaaagtatatgaagtatgatcccaaatgaaaaaaaaaactgtccttagg

SEQ ID NO: 243549 - DNA, 741 bp, Homo sapiens
atatactcttttgtttcctagcatcttaggttgtagatgtatgatcattattgccctgtacataacttttttttctttatggaatttttcacttttcctcttcagctttaaatcaattctcgatttttactagccttatttttagcagcaatgtctgtaaaataatggaattgatataataattgtatgtattacacccagacaaatatgtaatggttaaaatgaatactcatccatgtactaagtaaaatcatcatgcaggagcagtggaagcacatagttcagtcatctgtgtctccagttgtccactcagggatgcttctgaacatcttggctttactgctctttctaaaatttcctcgtctttctgcagactgcattgtgctacagctcatagacttgaaataataagaatccctcttgaggggtgccagtgtgataacgaggtattgggactccctttcattcactttttatgaattgtcctgtgcattgtgctacagctcatagacttgaaataataaggatccctcttgaggggtgccagtgtgataacgaggtattgggactccctttcattcactttttatgaattgtcctgtgcagcctctctaagattattccaccaggctctgcaggtgaatatgtgtattagtttgctgccataacaaattaccacagagtgggtggcttaaacaacagaaatttattttctgacagttctgcaagttggaagtccaa

SEQ ID NO: 243550 - DNA, 545 bp, Homo sapiens
ttttaaagaaaaagagctaacttgactttaaagagatgaaatgtacatgtaaaataaaattttgttttctgtgaaattttacttcagaaaatatcctgactaaaataaacaaattaaaaaatgagtactcctaaaaaaaaaaaaagaaaagaaaagaaagaaagaaagtaagaaagccaagagcacagaatcaggatatactggaggaaaacaacttttctaggccttcaagatagaacatttcagtgtcaggccgttaaagcagagttagagctggagaaaaaaagttacagaagatgaaaaagttaaaagagaattatcacctcaccaaacaaaaagatatactgtctcaaggagagaaagtggaagaccaaaaggcagaaatgtctgacctgcaaatcacatgaaacaagatacagcaaaagtttaactactgagatgtgaatctgagaagcttccacaggaaaactctacctcaaaatatgaaattaccattctaaatgaagaagattcattttaaaactgatattagagaaaggaagact

SEQ ID NO: 243551 - DNA, 219 bp, Homo sapiens
gaaaaaaaatcagtttaaagtaaggtgggagaaaatgagggtgatggagtaggggtgagggggatgtctgcaatgtcagcactgattgcagcaccaaactcaaagacaataccactcatgccactgccaacatacccctggcttcctcaacaactttagaattattatattgccctaagtgcatctagaatatgacctttggtccctccctagaaaccc

SEQ ID NO: 243552 - DNA, 1044 bp, Homo sapiens
aaagacgcactgaaaatatgatggaagcacgtccatagtacctgggctacagcttgaaggagctctcagtgaactaatctgggacgagttgagcaatgagataaatagtgatagtaaagtgttacccatatgataaatctacactgatctactatagatctacactgatacaactaaatgattaaataagtaaataaaataaatagaggagaaagggcagttcttgctcacattagaactctaataaatgtagaaggaatgaaaatagaaaattacttttagtcaaacatcacagtaagttataagcaagaattatcaacagatgctaaaaatagtgactgaaaaaattatggaagtatgatgaatctttatttgcatagtcttcaaactgtctcttcaaatggtactttttagtgacaaaatggtacataacactttgtggtagagaaacctggcagagaacaccttaaccaagtgatcaaagttaaggtcacagcaccagaaaaagtcatgtcaacatcatgaatcccttaatacaagacactgaaaatggcagaacatcactttggtgacatttgcaaaaaaaaatgtataacttcaatctaataataaggaaacatcaaaaaacccaaattgagggatattctacaaaatcatagccagtcaacttctaaaatgtcaaagacatgaaagacaaggaaagaataaggaactatcaaagatgcaaggaaaatacagaaacataatgactaaatgcaatgaggaatcctggattgggtcatggagcagaaggacattagtgggaaactggtgaaatgtgaataaggagtgtaaattagttatcactctaccaatgttaaaatccttgttctatggttatggaaaattttaactttaggggaaatgatatatgggaactttccatacccattgtacatcttttctgtaagtgtatttcaaaataaagttatttttaaagaaagccagtgacccaatttgtaagacagccttaaagagaaaccaggctttaaaaaacgtatatga

SEQ ID NO: 243553 - DNA, 385 bp, Homo sapiens
aaaaagagtgcatggggtgtgccagacacggtctcagtccttggtcctggtgcctgtgattgtctgtcacttcgaatgccctccccatagtcttggaagggggcaagtgtcctctccattttagcccagagggctggtgagtggctgattgggaccttctgattcagaagctttactttgctcctccaagccaggtacttgtgcttgatgagaagaaagatgtgtgtggcatcccctgagatggtttccttctcgtttctacaaagtaggtaggccttggtagaaactgctgtttctcagtagttggaccattttatagccagattcttcccactctggaatttggctactgaataagaaatgaaagctgtggccgaacatggtg

SEQ ID NO: 243554 - DNA, 434 bp, Homo sapiens
tgagctgttgagccaatacatctggtttgcctttgaaatataaacccattttctccctgtaaagtctgatatactgggaagtaaattaatgacttaagtttgactacacggaatacttctaggttggtagtatattctgtatactttgtaattaagaacagcaattctgaccatttccagtaaaatgaatcattctaaatgaccagagacttgtgttctagggatgctgtagcttctggatgtgaaattctaaaataccagaacacaaactagggcaacctattctggagcaaacctggagtagttcagcagttgggggaagtaaattcctaccttcagccaatcactaatgggttgagaactcatgaaaagtcatgtgacttctataaagatgttggactagcataatcaataaaagtctgccaactctaaaa

SEQ ID NO: 243555 - DNA, 397 bp, Homo sapiens
tattgtaataaggattaaatagtgactctttatagtacttactataatagcaaaaaattagaaacataatatcctttaacaggggagtagctaagtgagttgtgggatgagggagccagagctagagctacctgcatggataaatctcaagtgagaaaaagactagatgcctgaagtggcccaaacgacagtctctattatttacaccacatataaaaacatgcagagagatgctgatatcattgatggatatatgtgtgtgcagtaaaagaaaaaatgcatgggagtgaaaaaaccagactgaggccagaggtttccttttgggatgggaggggagtggatttgtagcatggtatgcagaagcttcacatttatctgaaatgttttacttcttaaa

SEQ ID NO: 243556 - DNA, 406 bp, Homo sapiens
tggggaattttgaatgactgataatttgctgaattagtagctgttgtgatcagtgaaagagttttagtacacatttttacctaaacattaaaaaaagaaatacaaaatccatggctgggagcagtggctcacgcctgtaatcccagcagtttaggaggccgaggtaggggggggtcacaaggtcaggagttcaagaccagcctggcccacatggtgaaatcccatctctactaaaaatacaaaagttagccagacgtggtggtgggcgcctataatcccagctactcgggaggctgagccaggagaatcgcttgaacccaggaggcggaggttgcagtgagccgagatcatgccacagcactccagcctgggtgacagagcaagactcccatctaggaaaagaaaa

SEQ ID NO: 243557 - DNA, 444 bp, Homo sapiens
gggcagccctggagatggaggccatcctgcaggaatcgggtcgtgatcatggtagaagtgcttcaggccgggaaggaacatctgcctctggggaggtaatcgaatgagaagaaattgcttcctcattaatgagacaattccacatgatcaacccagcaaaggggccatcgatgagactgaacattggccttttgtggcagtagctccaccctctccctgagcaattctcctaaagcccatgcagaccctgcatccctgccctgtggtcactttgaagttggcccagtgggtaagaatcagggtagtgagggaaagacacgggctgatggcccaggaccattgtcttctcccctggtattagagcgtgcctggtgaagggggtctcccaagcacatgggacctgaagatcgctgcactctgcacccatcccaacaattcccagat

SEQ ID NO: 243558 - DNA, 207 bp, Homo sapiens
tgtcccggaaagcctggtgcgcgccaaggtccctgcttcttgcttctgcgtccccagggaagccctagtcccgcccccagcccggtggaaacctcccttcttttacattattaagtttgtttttatttcaattttttaggacattgataaaatcactttcagatttttgagattaaaaattaaataattttcaagtttaccctttta

SEQ ID NO: 243559 - DNA, 217 bp, Homo sapiens
ccatcagaccccgggtctcaggaccccaaagaggccgggggcttggtgaggcaagtgaggccctggcctagggcacaaaatttatgggggtgcctcaattcttagtagttgagataaatgatattttaatgcagtactttaaaaaatgaaaattaatgcaaaaaacccatgaggaacaaaatgtcagagttttaaataaagacaggctcagtattta

SEQ ID NO: 243560 - DNA, 427 bp, Homo sapiens
acaccgcagcaggcagtgcccacagaaatgggcttgaggatggaccacaagaactgctcaaagcacctggactagtaacaagagatgacaagctgaggcctacgatgatttaggctgaggataccatctgcctgagagaaccctcctcttggagtcttgctcctcaaaatgtgacttcagagccagcagcattggcatccctggaagcgtggtaccaatgcattcttggacctcaactcagacctattcaatccaactctccagtttagcaagatccccaggtgatttttatgtacattaaagtttgaaagcaatactctaaagaaccagaaatgccagaccagggtccaacagggaaactgaatgcctaagacattcattcattcatttacccattcaataaatacttaataagcaaatactgggt

SEQ ID NO: 243561 - DNA, 382 bp, Homo sapiens
gggcagtgggtttgtgtgtgtgttaatcctctcacaacccactgaattgaatttcatggcccatggttaagatccacagtgtgaaaacgctgttttaaattatatgagttcgtcatttgtttgctctgtgcagctgagttgtgtccagacttaccagatggtatgttttgccattgaggggccttctacacaatgagtgcatgatatggtccttgatagacttgacttgtagatgttttcagcctacaatgtgatcagctatctgaggaactccagtaagtagataccacttcatttcagtttatatacaagacaatgtagttcaaacattttaataccttgtaaattatgatattcatataaatattagctctatagtctt

SEQ ID NO: 243562 - DNA, 472 bp, Homo sapiens
acagtgccaagcgtaatgccccttgataatttacatatatgtgaacgtggctgtgatagctgctgatgttcacacataggccatcttacatgtaatgatccatgtttggacttaaacagcttcacacatttattgtacagttaggtgtcacatgcttttactttttattttataatctgtatttctgtgaggtagacattattggctccatgttatatacattgatagcccggagctagagattgaacccaggccatcctccccactgcctttcatcatcaacacaaccaccaccaacagtattttaaaagtgttaaatattggcagacgtgtcattgttctgagcactaggactagggcttatgcggctgtctgaggaattccctgtacaaggaaacatcatataccaaaaagttactcatggaaggagtttggagatgatgagctaaaagtattacacatggactattgt

SEQ ID NO: 243563 - DNA, 292 bp, Homo sapiens
aagtttgaggattagttcatgtccttcagttataggagcaactcaattaaaggccaatagcaagctcttcattgtctctcatttggaaattttcaggttcaaattctgacagtattcagaagctacaatacaaaatgtcaatagtttctatttacattaaaattatttttatttctcttattaagtcaaacttctttttttacagaaatgtttcattggaatttttgcagattttgagtcagctgccttggactataactgttaagaatatacagtataaatctcagatttc

SEQ ID NO: 243564 - DNA, 162 bp, Homo sapiens
aggctcaatttttatttcagattcagggagtacaggtgcaggtttgctacatgagtatattgtgtgaagctgaggtttggggtacgatcgaactcgtcactcaggtaatgagcataatatctaataggtagttttctaaccttcgacctgccccctcccttc

SEQ ID NO: 243565 - DNA, 522 bp, Homo sapiens
acttagtttattttcgcaactgtttcagaaccttaaatatttgggcccataataatttagattgttcagaccatcagtttctctcataaaatcaggaagtgccacatatcccaagtgattaccagtctaaatcatagacacagttctctgcattttctgagatcaaacaggtcttcagcagtcagaacttaatttgcttgagaatttgtttgatttttctaggaattcaccattcaagtttctctctgactcatatattacatttctcggtagcataatttataaaatataaaactcatttggttgtgcattgcctaaagttgtaaattttttacctttttaagttccagtcccatcttttctcattactaacagatctaacaagaacaccagtcaaataaaaattgtcataggaagtttccagcatgcatatccccacccccatcaggatgtataggttgcctaggagtagtggctgagaaaatagaggaatcttctctgtacagctctggcttttaccta

SEQ ID NO: 243566 - DNA, 993 bp, Homo sapiens
tggctttaggcatgcgggggcagggcactgcggtgagcagcaaccatgggggatgcgcacacagaactgcaggggctgcccagccagcctggcctaggaggtcctgccagggagggtttaggcaggcagctgtcttcgtgtctggaacaggaagggatcagtgagctgcccattgttgctctgggctgaggaactggggatagagattgccgggggagcctggctttccggtggtctcagcacccactccctgggctccacatcccttcctaccctccacctggccacctcagcagggcgctcctttaagagcttggctgggccgtgcatagagtgggctgcagtggtgggtcaggtggatttcagaagcacaggcagcccacagacagcagaaccagccatgcccaaaatggtggctttcaaactctgacttcagcctacagtaaaatatacattgtacgtcttgacccatctgacaggcatacatttatgtagagggaaaacagaatggaagctttcatgaatgagtacttcctacttagagggcgttcagatctttttttttttttttgagacagagtctcactctgttgctcaggctggagtgcagtggtgctccgcctccagggttcaagtgattctcctgccttagcctcccaagtggagtagctgggattacaggtgcacaccaccacccccggccaatttttgtatttttggtagagacagggtttcaccatgttggccaggttggtcttgaacacctgacctcaggtgatgtgcccgccttggcctcccaaagtgctaagattacaggtgtgagccaccgcacccggccacattcagatcttttctaaagatgctggttgcaggcccctatacaccctcacataatacagcccctttgaggactgtattcccaacactttgggagactgaggtgggaggattgcttgagcccaggagtttgagactagcctgggcaacatagca

SEQ ID NO: 243567 - DNA, 267 bp, Homo sapiens
aatcagagacggggtctcactatgttggtcttgaacacctgacctcaggtgatgtgcccgccttggcctcccaaagtgctaagattacaggtgtgagccaccgcacccggccacattcagatcttttctaaagatgctggttgcaggcccctatacaccctcacataatacagcccctttgaggactgtattcccaacactttgggagactgaggtgggaggattgcttgagcccaggagtttgagactagcctgggcaacatagca

SEQ ID NO: 243568 - DNA, 467 bp, Homo sapiens
agaaggtgaagtgtcaatagatagcagactgcatggacatgaaatgtgatcttcataggaaaaggacgattttcatacccacattgatatgggttaccatcagttccttaatgaggagaaactgaagacaaatatcagaatgctgaatattacatagtttatatagaagtaaaaaatgtacatagttattattatagaatatggatttcatcattatgaataaatcctttagtcagtctcataaatttcctacttaaaagcacatgtaaatattgtatatggcgcttgcattggacagagcatgctctatagacaaaattctggtccttaaattaaccaaaactaagtaagtgaccttttcagaatatgtattttctgcatattgtatgttattctctgagtatttattttaaaacttgacttgttttaaaataaaaattttgatgttttttgcattgtcttaaaat

SEQ ID NO: 243569 - DNA, 598 bp, Homo sapiens
gcctgcactgcccttcttggtgcctcagtttctcgtctgccaaatgagggccgacccccactggcactggatgactctgatgctcctggccacaccctaacacctatttagtacctggatgtggatggaggcccatggcctttggagaattctagaatctcaacaggaaagacctcaaagagcaccaggtccaagacccatgtgtgatgcccactcccagtggtgcctcgggccacttctccacaaccagctgcatgcattccatcaacagttggctctcaggtgacagtctatgctgggcaccagaaaggtcacgtgggccccaccatgcaggtcgttacgggccatttgtttccagctcaagaggcaaaatgaagagcccagactggagccgtcctgggttcaaatcccagctctacctctttgctcaaaatcctcctaggtgagctgggcgtggtggcgggcgtctgtaatcccagctactcaggaggcggaggcaggagaatcgttggaatccgggaggtggaggttgtggtgacccgagaatgcaccattgcactctagcctggacaacggagagaccctgtctcaaaaaaaa

SEQ ID NO: 243570 - DNA, 183 bp, Homo sapiens
tttcagctgctggccatatgttcttactttagaaacatttaccaagtcctcccactacatgcaaggttctgtaataagtacacaccatatgaaaacacctccaatattaaactctaccatatctaatgaaatacttcagttatgagtccctcattctaaaccacccagcctgctacacttccc

SEQ ID NO: 243571 - DNA, 661 bp, Homo sapiens
cagggcatggaaagaggaggtgggactaacagagcagtgaatcactccacacaaaacagcaaaacaggagggaactgagttatttgttggcagctcaagatactggagaagatgacgggccaggaagttgaaagaaggtgagaggttgaggagagaagaggggagctggggagaagctctggccacgtgaaaaccggtagagcctccagaagactgcagccaaggaggaattccttgtggcaaggaatgtctgatgttgaatgttagatggttttctgcgctgtgctgggatgatacaacttgactcaactcttcagttgattgttccctactaacagcaccctggggttagtgttgctttggttgaaaggaagcatgaaaaagttcttctatgatttcattttttttaatccaactctttaatccatttagaatttattttgatataaagaatgaggtggaacattagcttaatttttctcctgaagtttagccaatgatctgaccatcttttaaatgattttaaatgccaccttgatattatgttaaattatactaaatgctcaagtatactttggtctatgcttgtctggaagagacattccaatgttccctctctcttttagctttagtaataaactttcaaattcatctggactca

SEQ ID NO: 243572 - DNA, 402 bp, Homo sapiens
tctactttatccagtctgttgatttaaatgctaatttcatctaaaaacctcctcacagaaacacctgggataatgtttgacccaatatctagaatcccgtggctcagtcaagttgacacatgaaattaagcatcacagaggctaacaaacaaagagccagagagggaagtggaaaagagtaacaagccgtgacaaaaaattagttggaggcaaggctaggccatgaatcttaggtttttatctcttagtcctaggcaatttgtattaccccatgatgcatttttttgagtttgctgttgcccagtctaagataaagtggagatgaaaaagaatttaaaagttggatatggcaaatatataataagaaatttaacatgcttctgtaggtttttattagtaaaa

SEQ ID NO: 243573 - DNA, 233 bp, Homo sapiens
ctcatgtatctttattgcttgcttgtaggggcctttgaagacactggtttctgtcacccatgacatatagtgctgaaagaaatggtggtataatttggaatgacagtttgtgtctgctgagatcaaaggtaaatgttaaagcagtgaagagactgcaggaccacagaaagaaaacaggtgcagtgagtgattactgagtattaacaaagaagatgaataatttcctttaacta

SEQ ID NO: 243574 - DNA, 458 bp, Homo sapiens
ttagtacaccatcacccaccctactctaacacacacagaaatgggttctttgaaatggagtgatgctgtatcagacaggccttagttctacagaatccagctgctgtgaggtccctggtgaagctggtggaagagaaccttctgtatgtacctggggagtgggcttaaaagaatcctgtcaacaacccgcacatcaacatgttttggatgatgctacctgctcagcaggcatagtgaagtggagtgcctttaagatcacttttcactgggggatggttttgttgatgacacaacattactaatcaagcaaatgggaaccaaggtacaatattattttgttagctaattcccatagtccagtcagatttttttagcccctttcttattccatttgtcaatttccttttgtgatgcatagttttgaaagtaaataaaaattacttatgttaaaagtggga

SEQ ID NO: 243575 - DNA, 305 bp, Homo sapiens
caaagctaatctgattgacatcagcatagtgctatgtaggggtatactgactggttaggagcatgagggatacttctgggatgctggaaatatcctacatattgatctaggtggtggttacagggttttatatatatgctatgtgtatataattacagagctgtaaacataagtttgtatactgaatgtaaattggacttcaacaataaatcatatctacctgccttaagaaaacaaaataacagaacctttcaaaataaaaatgtgaaagatgaataaaagatgtttttgaaaagatggatggt

SEQ ID NO: 243576 - DNA, 632 bp, Homo sapiens
acccagggatgtggagtgcaggtcttaggagtagaggagactttggaaccaccacattgggccattttccttacctgagccctggtggatggtagtcaacagcctgtgctttggagactgactagcaatgtttgaatcctggcttattagctctgtgtgactctgtataaacttactgtgcttcaattacctgtttcatagggtagaggtaatatagtgcctggagttgttgataggactaatgagataatatatttcagatatgcacagctcagtggctggcacaatttgaccactagataaaccctgggtcttatttgttgcaatatatctgccagagattctagaggtctggtcctagcctaccactaactagccagttgagtttttacacatcagttaatctttcagagagttggattgtattagatggtctctcaggtccttctagacttagaaatttgttgatgagacagtcctgtctagcctagtgcctaagaacttgaactactggagccagacatgcctacatatgaattccagctatgtcttttgctagcattgtgagttgaggtatattatttaatgcttctatgcctcagttttgtcatttgcaaaatgggactcataag

SEQ ID NO: 243577 - DNA, 293 bp, Homo sapiens
aatattaataaaatgtccctactagtcaaagctaaatacaaattaaattcactgtctatcaaaataccaatgatatttttcacagaaattaaaaagttatcctaaaattcatatggaatgacaaagtaccccaaatagctaaataaatcttgagcaaaaagaagaaagctagaggcatcacactacctgacttcaagttatgctacaaagctatagtagccaaagcagcatggtactggcataaaggcaagtaaattgatacatagaccaaaggaacagaatacagaggccag

SEQ ID NO: 243578 - DNA, 379 bp, Homo sapiens
tgattatattacacattcttcaagtaaaatgttactttttcctttctctttttgctgggttcccagaactcttttttctcctttttcttccccctctcagtgatccatgttgacaaatgatatcttttaaattttttcctctattttcatacaattatatacagacctatatatgcatgtacaaaaataaagcaggatttttataagcaggatttcatggaaatagttctgaattaattgatacgtaatagttcctatttattccttttaatggcttcttaatgtttcatgttgtaaatgggtcataatttaatcactttgcttccattttttgttctatgaataatgctttaataaatatcacaatacctatgtccac

SEQ ID NO: 243579 - DNA, 431 bp, Homo sapiens
gcaatcctcccacctcagcctccaaagtaactgggacgacaggtgtgcactaccgtgcctggctaattttttaaattttttttgtagaggttggggtcttgctacattgcccaagctggtctccaatgcctgggctcaggcgatcctcctgcctccacctcccaaattgcgatgattacaggtgtgagccgccatgcccagcttattttgaaataatttcaaatttatagaaaagttgaaagaactttatacatttttccagattcaacaatcaatacgattttaccacaactattttagcattctgtaagatatgtatgtatatgaatatacacgtattttccttgtcacctttgtttgatctaataatctaagatgttctcacatgtgtacttacaatgtcaacagtaactggtatccctgtgtgcatg

SEQ ID NO: 243580 - DNA, 456 bp, Homo sapiens
agagttgggtgttatttaacataattatggtaattgggaaacatttataaacactattgggatggtgataaaatacaaaagggcctatagatgttagaaatgggtcaggttactgaaatgggattcaatttgaaaaaaatttttttaaatagaactcactgaactagattctcctctgagaaccagagaagaccatttcatagttggattcctggagacatgcgctatccaccacgtagccactttccacatgtggccatcaaccacttaagatggggttagtttaaatcaagatgtgctgttataattggtataagcataaaatcacactagattctggagatttaatatgaataataagaatactatttcagtagttttggtatattgtgtgtcaaaaatgataatattttggatgtattgggtgaaataaaatattaacattaaaaaaaaaaa

SEQ ID NO: 243581 - DNA, 779 bp, Homo sapiens
acacagtcaaattctcagaaaggttttgtctacataagcaaaatggaagggagagttgaagcagatatctcaatattgggccattctccaccccaacctcaacttctattgttcccatgaaacaccatttggaggaagagactaattaatgaaattggccatctttgctcatcagacctgccagaaaattgctctattagcaacaggctaaatgttgttactagagaaagtaaaaaggctaatgatcatgctcatcttgggataactacaaaaatattgttaatgccacctctgagctacaattttaactgcagaagtcagaccatctgaattactgtttccacagcaactacaattcagtcggctctgcaaggcttgtcatagatgaggacgttacctctatattatcgttgctggggaaaagtgcacttattttatttatagccaagctgtgcaaagttgtattttgtagtcttttatttggaaatgtggtcattagagaccgacaaaagtccttctgaatcactgaaatatatgttttgatacaaggaaaaatactgcatagctcagagcttcccattcataatgtcataatggcctccagggcagtgagatttgaaagccctctattcttccctaatgaatattcaaaatttgagatcttgagcagtatatcccagcaatcaggctaccaggataaagagaaagaagatggtgtactccaaaatggctttgagaaaaacatacactaatttaaacagtcaagagacttatatctg

SEQ ID NO: 243582 - DNA, 551 bp, Homo sapiens
gattcttattagaccttgttattcacgcagtgacaaattcccttttcaagtagtggttctttttatttcttagaccatggactattttgagaatcgaaagaaaactacacactctcttctctgcaaaatctacttgcaaatgaatctatataagttaggatattaattatttttatatttattgactacttaatttgtgccaggcactaagctgggctgtgggtcattctgggatgttaaaaagccttggggcttcatctgtaaatcaagaaatttaaaaagcctcttagagttttatttggaacaggaggcatttattattgttgttgatgttgttgttaagtatagcaacaattgaaaaacagctaacttttcagaaaagtcaatattattggtaaggctctgtgctaagaactttgtctgggtcatttctgttaattcttacgacaaactgcatgaggaaagcattttataaaatgaagtaatacatgtcaagcacttagaatagtacctgagacacagtgaatcctcaataaatgttagttgctatt

SEQ ID NO: 243583 - DNA, 601 bp, Homo sapiens
ttatattatgttttcactgtaccttttctatgtttagatacacaaatacttacaattgtgttacagttgcctacagtattcagtaccgtatcatgctgtgcaggtttgtagccaattataggctgtaagatacagcctaggtgtgtagtaggctataccacctaggtttgtgtaagtgcactctatgacgttcacacaatgacaaaattacctaatgacacatttctcagaatgtatcctcgtcattaagcaatgtatgactgtttccatatgaccaagaaatttcacacctagttatatagtgaaaagaattgaccagatgcagtagctcatgcctgtaatcccagcatactgggaggccaaggcgggagggttgcttgagcccaggagtttgagactagcctgggtaacatggcaagacctcatctctacaaaaattaaaatgaaaacattttctgggcatggtggtatgtacctgtggccccagctactcaggaggctaaggtgggaggatcacatgagcccaagagtttgaggctacagtgagctgttttcacaccattgcagtccagcctgggtgacagagtgtgaccctgtctca

SEQ ID NO: 243584 - DNA, 1136 bp, Homo sapiens
agctggcataaggaggagagaactggtattgtttcttacatggtattttagtatttttagagtttttaaaaaccatgtgtattgctttgataaaaattaatagtaaaatatgaaactggatttagagagaatctcgctggtatgtatcaaatgaaattgaaggcacagggaaaacaacagtcttagatctcaggtgatgaacaactgtaatgactggaagggggaaccaaagtactggcttggaaagacattttaaaggaatataatgtggaattttaagacctattctgattggacaatgggagtgaaatattaggttaagatgcaaacaaacctgttttgaggcactcataacaataggggagaaggtatttatgcccatttcaagtggagttggaatggtaggttgtgctttggatatgttatagcttgcaatgaatgtaatataaacatttgtgatatatcctgtaaacagtttgaagtgtgagcctgaacatgtttgatctaaggtctggaggaagatgtgaagcaaatctgacctaaaaaaaattataggaaaaaagcaaattgttctggatttgtttcaccaaggaacaagtaagcagagaaccagacactggagaaaaaaaggagtcaggaagtagacaaggaaatgttaaaagaaataataggataactgaaagaatgtagcttccagattgctagctatcagcagatagatagaaacttttatacagcctttaaatcttccctagaaacctttttaaaagtagcttcttgattagatttaaatgggttttatttatgcttgtcattttacagatattgtaaatatacatatggtatattttctttttgccttttgtggacagttggaggtggggaacaggcatccatagtcagtatatttaaaggaagaaaaaacaacttccataatcttgttatattgactgtttctgttgatacattttccctttctttcttgtttcttagtatgatttgagggtcattttaaatttctgaataaatattttgtaagccaggtggttcactgactgaacgtttgggacagaggtaatgggagatgaggccttctctctctctctccatagacaaaggccttaatatgactaata

SEQ ID NO: 243585 - DNA, 742 bp, Homo sapiens
atacatacattaaaaaagaaattagctgcatgccggatccaagagaaaaaccatgaaaaagaaagaaattctgttttcaaaatattttgtgttgttgttggttgttacagggtctcactttgtcccccaggctggagtgcagtggcgtgatctcacctcactgcagcatcaccctccaaggatcgagggattctcacaccttgggacccccaccccccagcagctgggactacaggcatgtgccacaggcacacgcctgagtaatttttttgtatttattgttgagacagggtttcaccatgttacccaggttgggctcgaagtcctgggctgaagcaattcccctgccttggtctcccaaattgctgggattacaagcgtgcaccactgcacccagcccagaatattttgcatacattttgcctgtcatttgtctatttataaattctacaacagatattcgtacatagatatgttgtacaaaacacaatattttttcatttcttctgtattcagtgaaaatgataaatttagaaactcatgatgtgattagaaatataaacaaagaaaatgcttaaatgattatcgaacttttttagtttcatatttgagactgtatgaattatagtctaccatgtttgcctgtgattcacaaaattctgtttttcaggatatatatatatatatatatcaaccactgaatttagtgtaaggtactgaaaataaagaagaaatacttaaa

SEQ ID NO: 243586 - DNA, 746 bp, Homo sapiens
tgaggatcccccgctatcatcggcacatcgtgccactgcactccagcctggtgacagagccagagcgagactcctctgtgtaaaacaaaacaaaaacaaaacaaaacaaaaaagaaggagttatgtccaagagtcaggaagacactgaatgtcgcaggattcccagtggaatcctctgagggaaaaaagagaggtgagggtccgcggtcctgcttccccagaggtgaggcagcttttggccatgttgttggtagcaaagactcactttcagctctggaagctttggctggcagctgggaaaacaatgtaatctggaagttcagggagaccgaggcagtgacacacaatgggcagacgtgcaccaaagggaggaggccgaagctctatagggtgcctactgccaagggagcctgtgggtgtgattctactgctcacacagttgaaaacaattctctacatgctgcagcttccaattctctacacagctgatgtcctggcttctcttcctagtttctcttttttttttttttttttttttttcagacagggtctaattctctcacccaggtgcaaatgaccagtggtgtgatcatagctcatagctcactgcagcctcaaactcctgggctcaagtgatcctcctgcctcagcctcctgagtacctgggactacaggtgcatgccattatgccaggctaatttttttattttttatagagacgatgtattagtctgttctcacactgc

SEQ ID NO: 243587 - DNA, 692 bp, Homo sapiens
tgaggatcccccgctatcatcggcacatcgtgccactgcactccagcctggtgacagagccagagcgagactcctctgtgtaaaacaaaacaaaaacaaaacaaaacaaaaaagaaggagttatgtccaagagtcaggaagacactgaatgtcgcaggattcccagtggaatcctctgagggaggccatgttgttggtagcaaagactcactttcagctctggaagctttggctggcagctgggaaaacaatgtaatctggaagttcagggagaccgaggcagtgacacacaatgggcagacgtgcaccaaagggaggaggccgaagctctatagggtgcctactgccaagggagcctgtgggtgtgattctactgctcacacagttgaaaacaattctctacatgctgcagcttccaattctctacacagctgatgtcctggcttctcttcctagtttctcttttttttttttttttttttttttcagacagggtctaattctctcacccaggtgcaaatgaccagtggtgtgatcatagctcatagctcactgcagcctcaaactcctgggctcaagtgatcctcctgcctcagcctcctgagtacctgggactacaggtgcatgccattatgccaggctaatttttttattttttatagagacgatgtattagtctgttctcacactgc

SEQ ID NO: 243588 - DNA, 444 bp, Homo sapiens
gagagaactggtgagcatggctgtttttacttttcctaaagtttcccctagagctgttggaatgggtgagaaatggacaaatgcctttgagctctctctggaaaagagcagaaaaagggaaggcaaaggaaaagtcaaggaagaggttggagaagggaaaggcacaggctgcaatgaatgtcaccagctaactcagtagcactattcctactagagcttgcacagtgctgcactgaggtgtacaggtgtacgagaaagcattatcctttgtttcattgctttgacacagctcacaatgcaaggtttcttaatcctcttttagcgtaggtttgtcaatatcactttctctctgaatggataacgatgatgatgatttgccatgactcttcacaattccacccagcacttcacttttcctattttcgagagcactttccctttctg

SEQ ID NO: 243589 - DNA, 600 bp, Homo sapiens
tttttaaataagcaactgtgtgttagctacaattatcttcatagcctaagtggaagaggaagtcaagatttaatacaaataacaaaaactgtttcctagttcctcaatatttgagttcctgatttctttaaatcctctaattcttgctgacatgtcataagcagttctcttatgacctaaataaatgtggaaacaaaacaaagtattattctctaaagaagtcaactcatatacagcagaacctcagaagaacataacttgctataaagcaagggctagctgcctgttttgtaaataaagctttcctggaacacagccatacccattcatctacatattatcgatggctgctttcagggtacactggcagagttggatgtttgccacagagaccaaaccataaagcctaaaatatttaccatctggccctttacaacatttgccaatgcccagtataaagggtaaatagggtaaagctgaagaaaactttaaggaatctgccactgcacggacccgaagaagagcatcagaagggaactctggtgttatgtctaaactgaaatatgattctttccaaacaaacaatgaaatgacaagaaa

SEQ ID NO: 243590 - DNA, 414 bp, Homo sapiens
acccttcttttccaattagaggcaaagaagtaaaatattgaagccaatactcagaactcaagtaattctgatagctacaacattgagctataattccaggctcagtggatcctttccaggcctggctctatttatctaagaaactaagagagacaaacaggcctcctcctcagcacagctatgatgaatatttaattagctaataatacaaagtaaatgtatcatcaatagcaaatgagatgcttataattaacttgggacaaagaagtagaaatcaagaaatagcctgaatctgggcagggtggctcgtgcctataatcccagtgcttttggaggccaaggcaggaggattgcttgaagccaggagtttgagaccagcctgggcaacatggcgagaatctgtctctacaaaaa

SEQ ID NO: 243591 - DNA, 366 bp, Homo sapiens
tccaagtccccggagaagggaatcccccatccgaaacgcctatgtggtaatatggactcctgcactgagtgtcgtccttacctttctcttgagtcttcaagcaaaaatattacataaacaatgatttcctgattgaaatatccccaattattacagaagtattactggagagtgaacaaaggtggagataaaatcttcaaggaactgacaagaaattactgcttgaggatcagtagagaactgaaaagaggaaaatgtttagtataacctgatgatgtgaggctaaaactgatagtatgccgatgtaattttaatttacatttcctgtattgtaaatgaaatagaacatcttttcatattttcaaa

SEQ ID NO: 243592 - DNA, 188 bp, Homo sapiens
ggagaggcaacttcactttataacaatccattctttcaagaattattccattcctaaaataatcaacccaatctcaaaagacatgaatccatcttaatgacctattttccttttaaaggcagtacctcccaacagtgccacattggggaacatggttcaacatgagttttggtagaaataaaccacat

SEQ ID NO: 243593 - DNA, 618 bp, Homo sapiens
attgcaggcgtgagccactgtgcctggccataacttttttttaaaataaaatatttttttgcaagggtagttgcaggacctgaatgaggtaatgtatatcaagcacttgtcacatagtcctcattcagctaatgtcgactcccctgcctcctgttacagcccccaccactcactcagaatcatcaatccttgggtggcgctactttgagtttacatgcatggcagagtggttaagggtgtccattctggagctggactgcctgggtttaaaatcctggcccagattcatgctagatgtatgaccttgagcaagttcttttaacctctttgagcctcagtttcttcatctagaatatgaagatagaaatggaaggattgttgtaggattaaaatgaatacgtgtgtgtttgtgcatgtacatgtatatttgctattgatattgactagaaactttttgagggcaggatcaatttcaggaaggtgtcacctgggttctcactgccttagtgaagatatgtatggctgagtgatccagatgatggtataataacaaggataacaagtatatatgttggaaatacttgcttattataataagagattttgaaaaatataatg

SEQ ID NO: 243594 - DNA, 1032 bp, Homo sapiens
agaaaaaatcattagtatagtccacacaccttcagatttggccggatttacgtgcactgtatgagatgtacatctgtgcatttttatcatatgtgtagctttgtgtgacgccagcatttttaagcaattgaatagtatcagagtgcattacatctgttaagggtaagtgttgatgtggaaacgtattttagttacatatgcacatcatgactggattgtagaaatgtctcttgactgtgagtcacagtggagaattttgaaaaccacaggtcgttcagtcatcagacttgattttatttcactaaaatgggctgctagagagctcaaggtactctgatttctaattggctgctcagggtgcccctgaccacttacttctggtacttggaaaacctagattaattggatatattgacagcaacatagtgcattctctaccccatgagttatttaaggggttttcaagtgtaattttgactagaagcagtttttgctctttttttgttttaattttagtttttagagacagggtctcactgtgttgccgaggctgtactcaagctcctgacctccggagtagctggaactacaggcacctgccactatgtccagctgagtttttgctttcttccttagtagaacataactaatgttggagctcactgtactcttttgccagtagtaggaatccgatttctggtaagtactgtaggtgacagaaccaaggttgcttagaagatacggagttaggagaaaaatgaaaaggcataaatattttctacagcagtaaatcctaaggaagtaactagttccaagacactgtcaacattaaaaatccatagtgcaggctgagcacagtggctcacacctgtaatcgtagcactttgtgaggatgaggaaggaggattgcttgatcccgggagtttgagaccagcctgggtaacggtgagactccttctccatctctataaaaataaatctggctgggcacggtggctcacgcctgtaatcccagcactttgggaggccaat

SEQ ID NO: 243595 - DNA, 531 bp, Homo sapiens
ggcaaaactgaccctagaataaaggctgctctggacccaccatcacaaagcctaaaaacaaacctcaaaagcctgaaactgatccaaataacctatatcccagagaaaagccaacaatgtttaaaggaatacaacgaattccatcaacaacaaggcccagcataaaatttgcaatatccagcatccaactagaaatgaccagacatacatgaggcgggaaagtacaatttatgatgagggagaaaagaaacactcagaaatgaccaaaataatagaattagcagacaaggatttttaaaaagttactataaatatcttccacatattcaagaagatagaagaaaatggacatcatgaggagagaaatggaagatattttttaaacaagaccgaccttgaacttctagaaatgaaaaatatatctgaaataaaaatatataaggtagtattaatagattagacacttcataagaaaaaattcgtaaacttgaatagcaatagaaacttgaatatgagacacacaaaaaaaaa

SEQ ID NO: 243596 - DNA, 414 bp, Homo sapiens
ttgctgttccggcgcccactacccaagaaaccaaagaaatgaagctggcaagctacttttcagcctcaagctttacacagctgtccttactttctaacatctttctgataacattattatgttgccttcttgtttctcactttgatatttaaaagatgttcaatacactgtttgaatgtgctggtaactgctttgcttcttgagtagagccaccaccaccatagcccagccagatgagtgctctgtggacccacagcctaagctgagtgtgaccccagaagccacgatgtgctctgtatccagaacacacttggcagatggaggaagcatctgagtttgagaccatggctgttacagggatcatgtaaacttgctgtttttgttttttcctgccgggtgttgtatgtatggtga

SEQ ID NO: 243597 - DNA, 663 bp, Homo sapiens
gagaagggtgcggttggctgcaaaaattagctcaagaccttttctagaagtaaagtctgtttctctgccattttgttattattttttgagacagagtcttgctctgttgcccagtggagtgcagtggcatgatcatggctcactgcaacctctgtctcctgggctcaagcgatcctcctgtctcagcctcctgagtagctgactataggcatgcatcaccacgcctgcctaatttttgtattttttgtagacatgaggtttcaccatgttactcaggctggtctcgaactcctggactcaagcaatttgcctgccttggcctcccaaaatgttgggattacagctgtaaaccacggcgccaggccattctctgccctttaaatctggccctggctgtgtgacttgctttggtcaatgggacatcagccgatgggatgcaaagagaggcttgagaagagcttgatcatctgtgcctgctgcttctagaacctcatcaccatgggagccagcctagggtgcctccaaagggtatgaggccacaaggagagagaccctgatgtcccagccggggcctcagacacacagccatccggcccttgctgagccagtccagccaacacacagaaatgtaggaaagactaaatattccattccattccattg

SEQ ID NO: 243598 - DNA, 618 bp, Homo sapiens
catcccaggatgtacatccctttgcaatgtgactatcccatgcttacagagtcttgctctgttgcccagtggagtgcagtggcatgatcatggctcactgcaacctctgtctcctgggctcaagcgatcctcctgtctcagcctcctgagtagctgactataggcatgcatcaccacgcctgcctaatttttgtattttttgtagacatgaggtttcaccatgttactcaggctggtctcgaactcctggactcaagcaatttgcctgccttggcctcccaaaatgttgggattacagctgtaaaccacggcgccaggccattctctgccctttaaatctggccctggctgtgtgacttgctttggtcaatgggacatcagccgatgggatgcaaagagaggcttgagaagagcttgatcatctgtgcctgctgcttctagaacctcatcaccatgggagccagcctagggtgcctccaaagggtatgaggccacaaggagagagaccctgatgtcccagccggggcctcagacacacagccatccggcccttgctgagccagtccagccaacacacagaaatgtaggaaagactaaatattccattccattccattg

SEQ ID NO: 243599 - DNA, 411 bp, Homo sapiens
catccacctcagccttccaaagtgctgggattacgggtgtgagccattgcacccggccctaggtatttcattattttttacggtgggattttcttcatttaatttttatattggttatagttcacatggtatatctttttccatccttttattttcaacctgcctgtgtctttgaatccatgatgtgcctctgatagacaacatatggttagatctttttttgatctattataatctatactttctgatttgatagtccattgatattttatataattattaattttgtggttggatttgtgcctgctgtcttgctgtttttttgttttatatatgacaggatttttagtttatcggtatctccttaactgcctttgtttgcaataaatatttttatcataccaaaaaaaa

SEQ ID NO: 243600 - DNA, 499 bp, Homo sapiens
tctccatatttgcttttcagaatgtcatatggttggaatgtcatatggtaagtcatcttttcagactggcttctttcacttagtcatatgcatttgagattcctctttgtcttttcgtggcacaatagctcatttcttattggtgttgaatcttattctactgtttgtatgtaccaaagtgtaataactcctacgcctactaaagggcttctcagttgcttcccagttttgacaactttccatcaagctgctatgaatatctatgtccacattttttatggaaataaaattttaactaatttgggtcaaagtcaaggagcacacttactggaatttatagtgacaatatgctcactttagtaataacctgccatactgtcttccaaattgttgtaccattgacattcccaccagtcaatgaatgacagttcctattgctcctcaacttgccagcatttggagttgtcagtataggatctttttttaaaaggaaaagaag

SEQ ID NO: 243601 - DNA, 608 bp, Homo sapiens
tagggttggggaaacaggaatccaacacaggagagagataaaggacatttccaggatgagagtagagagaagtctcagcctgacaggttaacaggcctagggagcgaccagtccagatggtggcaggggaacaaaagactccaaggttaatgtcttaaagaaatagaaaacatgatactttcaggaaccatttctctaggtgttaaagaagtagaagcagcagcaacaacctggtgtacttgaacgttcccagaggagattttacagttctgtcagaggatttagggtcccattaattatacaaatgagaaaacaaagcaattataatctccagagaaagtagctgaagttgaggaaggtaaaccacagcttaatacagcaatagaatattaaaagtttgtattaatttgggaagaatgtactttctaagagagttactcaactggtgatgtaaatcaatcatggcaggtgactgagaaagtcatgaaaagtgctggagcattggcagaagtgagggggtctcttttaggtaatgtgtgcttgacgatgtcatagtcattcagactattcatttaatggcatgtgtctaaggtttacaaaaaaaaaaa

SEQ ID NO: 243602 - DNA, 389 bp, Homo sapiens
gaagggcctttgtgactgccttgatgaacagaatgaggtgaaattgaggctacacatgatttccaaggttaggtcataaaataagacagctcctgcctgcctctgttcctcttgggacattcatcttgtaagaagtctagctacccttaattcagcatgctggagagaccctgtggagagggctcacaggaatagatgtctcaggagcctcagctgtgacagttcccagcaatgcaagaaccgcctaatacagatgattacaacatcctgccttcagatgccctggctgttgctgatagaccagagacaagccatccctgctgagcactacccttattccaacttcataagtaaataaattttgctactttggagtggctggtttgaaa

SEQ ID NO: 243603 - DNA, 410 bp, Homo sapiens
agcaaaagtaacacagttggaagcatcatattacctgacttcatattatactataagactgtaataaccaaaacagcatgatgacggtacagaattataccaactggctaatggaacagaacaggacccttacacctacaaccacgtaatcttcaacacggtcaacaaaaatacacaatgaggaaaaaacaacctattcaataaattgtcctaaaaaaattaaacagccacgagtagaagaataaaacaggacccctatcactcaccatatataaaaattaacagaaaatggattaaagacttaaatttaagactggaaactataaaaactctagaataaaagccaaaaaaacctcttctggacactggtctttgcaaagaatttataactaagtcaatgcaacaaaagc

SEQ ID NO: 243604 - DNA, 655 bp, Homo sapiens
gagaaaaggacagagggaccgacccaagcttcagagacatggaataatatgatcctggttcataagccttgaaaagctcccctccgccagggttaaggaatggtgtcaccagccttggctgtgaggataatttcttgatttgtgttatgcaggctcctgtcaggactgtctccttaactcccactacctaaggaaaagatagccagagagttgtccagggatttgggtttgggttgcttctagaaagacagcatctttcttgctattttttttttcacatccccccaaaacaatttttttcccccttcagactgggcagactttgatttagataagaggttggagttaatttgattttccccatgtctgtttagatcaatgggatataggagatagtttgaagctaatgtacccctatgcctttgtgtgagtgtaagatttataacttgagggaggcagttaataaatagcacatccttgaaccataaacatacgagatagacaagagctagataataaacagtttttcccccaatccctaagctttacttattttttttactgattcttgtactttgtcattagaaaaaggagtggggttggtttcccagtgaccgcattcattaagaaactgggcatgtacagcaagtagcaa

SEQ ID NO: 243605 - DNA, 350 bp, Homo sapiens
aaaaattccatctgttgtatgagattaacagcacattagacactgtatggatattgctgagaagttgtgactgtaccacaaaagaaaggactaatgtgaagacacagcaatagaaactctccaaaatgaaacggaataaactgaaaaaaaaaaatgaacagagcatcacttaactgtgagacaatcttgggcagcctaacatacatgtaattggagttcccaaggatgggagagaacataaaaaaacatttaaagacataatggctgaagaatttttccaaatgtgatgaaaaccataaacatatatagccaagaaactcaacaaaccttgatgtgatttggctatgtcc

SEQ ID NO: 243606 - DNA, 461 bp, Homo sapiens
tcctatttcataagcttttttagggtgaaaatgtggaatctctttaatgtttttattctctcattcaaaagtaatcattgattctagacactgcttccatgacaatgcctgtgattgtcacagaaggcagagcatgatctcctcaaacaatacttgctgtaggagggagggaaccaatgtgtgtttggaatctggcttcaccacttatcacctatgtgactttggccaagtcaccgcaaactgagtgcccaacaggtgctgagtccctttctatatattggtcaaaatcaatttaaagggccatcccaagtgtaatgtaaaggttcatctgaagattcagagattcatgttctctctctgttctatgttattattcaataggaatatatgattcttgataatgaactgtcagtgcagaaagaaccttcttttcattaaagaataactttttgttgacttct

SEQ ID NO: 243607 - DNA, 180 bp, Homo sapiens
atatatatatatatatatatatatatatatatatatactgcaaactgccatatgacatcaccttatcaccagctttgtggggccaggagccttgtctgtctcattttctgttcaacccccaacttctaccagtgggcctggtttgtaggaggtgctcaaataaatgtttatggaaaaaca

SEQ ID NO: 243608 - DNA, 341 bp, Homo sapiens
agactccatctcaaaaaaaaaaaaaaaaatcagatgacagaggggagcggggacaagttttaagtctaagcctcctgggtggggagttctgctgtttcaacatatgctccagtcatggcagactttggccagacagcgccctttttcagagtgaactgagtgtagcacaaattatctgccagtgctagttagcaaacagaatggagccaaaaaagaattgatttgggaaggcccaaggaatttgaaaccgttgagatgaacactttccgtttttgctacactgatttatgttgtgctgggaattgtacaagcctttgaccagaccttagggttgttcttta

SEQ ID NO: 243609 - DNA, 514 bp, Homo sapiens
atcacagaacaggcagaggcagttcagggggtattctggttgccttacccagctctgaagtctgtcagcctcttcagatgtcacttgccctgtggtaaggaagtgtagttggcagctggtgcagtggcaagaagagaaaggaggttccccaagacagaaatatctcagcaggggttagaataattcaccagtgaagtcatcacaacctagaaaaaaattgaatcctaccaacactaacatgagctgggaaagggatccttcctcaggggatgcttcgcttgaaacctcagcctgggtcatctgatccagagaaaagaccgtgatcatgggctacattctccataccagcttcatagctccagtgagaaaataaattcctgcacccaggagacgtggagtaagagatacagctgaccttgaccacatttcttacttccaagaagattgtagcaataattcaggtgctactatttgggacatttataattcaataaacctgcttacccctctgagc

SEQ ID NO: 243610 - DNA, 1562 bp, Homo sapiens
atcacagaacaggcagaggcagttcagggggtattctggttgccttacccagctctgaagtctgtcagcctcttcagatgtcacttgccctgtggtaaggaagtgtagttggcagctggtgcagtggcaagaagagaaaggaggttccccaagacagaaatatctcagcagaccgtgatcatgggctacattctccataccagcttcatagctccagtgagaaaataaattcctgcacccaggagacgtggagtaagagatacagctgaccttgaccacatttcttacttccaagaagattgtagcaataattcagtcttcagggaacaccaaggcctgtttgattttccaagtatcaacaagtggagttgacaagagtgacaaatggtcagagcaaagcatttcatgatgactgtaacgtgcctgcgtcagcagcgactgcttacagtgagattcacatgaccatcgtttatgacataggaagaataaaaggagaggagaaaaagataggtagttgatcgaaatgaagaactggatttggaaagcaacttcgaatagtctctgcctatatttctgagattaaggcaaacagtctcaagagatttcatccaggatacctcatcacagcctggagtgcagtgtcatgagcttggctcactacagcctccatcttctgagcttaaggatccttccctctcaacctccagggtagctgagactacaggcaacattcgaaacccaggtgccactccttcaggaaagtaccatcaagctccaaggactcttatcctctttctccttccccactacctagtcattagagcgtcagcatccactttcttgaaaggaagatgcctgtttttcacatatcccagaaaaccccattttaggacagcatttagcagagtatattcaggatcccactaacctttttggaagacatgacttccagatgatataaggcaagaataagaaatttcagtgacagggaacagaaatcatatttctgcattcaggatcatgttttcttggctccatcaggaactgtgcaggactgtgcactctgttgatactcacatggtggaattatattgcctttggccaaccctaaagccatcaagatagcaggtctggtctaccgagaagagagatcaaagagctcttcagctgttcccagctccccacacaaatctacctaacaaagtcccgataaacagtctgttttctggagtctatcaatactgatgaggtcttgttcttttggccaggctggagtgcagtggtacagtcgtgactcactgcagcttcaaacacctgggttccagcattcatcccacttcagcctcccgtgtagccgggactacaggtccctatcttttttgttggagaatgaaattaaaaaagatttggacactcattggttgtacacattgttactggggaatgtgttgattggaggccttgttagctaacagagcaaagagtaaatatacacatatgtttacaaatttctacaagtctccatatgtatctgcattaaattaaacatgaattcctacagc

SEQ ID NO: 243611 - DNA, 134 bp, Homo sapiens
aaaaaaaaaaaaaaaaaattgtggggaagagattgaaatctctaatgtagtataatgtgtatatataatagagcagccattcccattagggcccaatgctttgaggtgttgtagacaacataattagctgtgca

SEQ ID NO: 243612 - DNA, 347 bp, Homo sapiens
ttcctacacttgtatcatagtttaaggtcatactaaatgttcacagaaaattaatgacttatgcatcaaacatctcaatttaatcaggcttctattagaaagcaatctcttgcattacatataaaaatgagagcagagatactagttagagagcagcctattgcacaaggcagaaagtgattttgcttgtcgtatagcagaagttctattaggcaatgtcataactccaaataataccaaatacccctaatacttaaaattttcaaactcaaagagctgtttatgttaataggtccaacagggtgagtatatttattgtaattcagctttttttttttttgcaatat

SEQ ID NO: 243613 - DNA, 310 bp, Homo sapiens
acagttacccaggccagaatactccactcattcttctcctcacctccacagccaatcaagccctcaggtcccccccaagataacccataaaaccatctcttttctcattcccactacaccacgcaagcccaggccacaatccttttcccagatgctggcaacagctccctgaccaaaactgcctccggctgtgcgggtacacactgcctctctcccacatgcacactgcccagagggccagctggggcccgggtctgatcctgccacccctgccttaagatttcccattaaatgcatctgtttagaaaaa

SEQ ID NO: 243614 - DNA, 1322 bp, Homo sapiens
tcagccggaacggaaaaatccaggtcccaatacagagaggccacacaatgaattcaccctcattgagtgaggctatggatgagaggcatctgtaaggaagaccttgcacagtgcagggtgctggctaccctcagctaacccctagctcgcttcagctgctgggcatgaggaacctgcttagatttctcacagaagacatggagagttctttttctcacagaaaaaatgtagagtttgttccccagagtttgttcccaccatgtagaaagtgaccagtggtgaaaaggaaacataggaaagttaaggaccaaagggtccaaggagggaaaagaaaggacttctggttggttgctttgcgggcattttgaagagatcaggcatatgctctgggccttaaaaaaagacacagagattgaagtggtggggtgggcaagggagagagagatggagagagggtgagtgttgccaagtatcctgaggagacagggatgaggggacaaacacattgtgttcagataatggaaatacagtgaaaggttcatgcgttcctgttcatacatttcatttgacttatgtcttacagtttggaaataattttgatagtctaattttacaattaggagagatggagagagattatctctattttacagatgagaaaactgagccccagagagggacagtaacttgctaagatcacatagcaagtggaaaaagcacaataagaacccaggctttcagactcaaatcctgtgttctcttttcatccccctttagtttcatctttcctactgccaagggtagggaagctgtcagggacagaaggttggaatgggaccccaggacaagactgagcagagatttgaatgtggggctgaatgtaggggagctcagaaggctcctgggtggccccgagtgttagggagatcatccgagttagggagatcattccagtgcagaggcaccatcttccccatctacctgggcaaggcaaggaggcccaaggggaggttggggcaacaatagtctggtcctggactatgaaatcacaacccgatacagggaaggaagacccagaagaccaggtgggaaagaaaagggctggctccgaattaataagagcctacaggagcctatgtgttctgctggggatcacagaatgttctacatcttagaatgtgattcatcaaaagccattacaataaaaatgttgggtacttaaacatggcttagctttatttcactgatttggagtatagcacccctagtcataataagcatattcttacaggcttcaaaataaagtaagaatccctaaggtt

SEQ ID NO: 243615 - DNA, 450 bp, Homo sapiens
gggctggagttctaatgtcactatggcaacaagggacatggatttggggctctgcaaagaggggagccgaatgtgagacttgaataaagtgaggtctctcaaagggaacagaagcagaaaggtttcccactagcacagatgagtctgggctctcgaactcagccagaaaagctcctatgaaacccaagagagctcctacacagagaaggagaagcaagcacttaaggtaggctgaagccagcagttaatgcctgcaagttggtcaccatggaaacaacacaagaaaatctccctccactacctcattctttaatatctgaaattttaaatttacaaaattaagatacaaagaatcaatcatgaagttgaagtttatatgagtgctttctgctgttgcatgttgctcaaggtacagtaaaaccttaacatcgggttgacgactgtaacttt

SEQ ID NO: 243616 - DNA, 508 bp, Homo sapiens
aaaaatggggcctatacaatttctcctaatatggcatcaggaccaccttttgaagtgatatactcagggctaagtggagaaaacggtattgttttccatacaccacaaatggaaataaaaacacttttataaataaatggtataaaaacacttcctatgtgttatgatagttcaccaatctatgacctttattctttgtcaaacttctgtaaatactattgtattcttaagctttatacatttttttcactgccaacattctaaatttgacttatactcctgagtgacactatgtaagtaaggtactgctatatttttaaatcaaaaagaacaactaagaaacatgcttcaatatgctaaattctcaatgaaacataaaattcttcagagccatgtggccaatatgaaagcagtaccaccaacctggtggcagcatatcctaattataagcagaatacatgtagagaaaaagttgttctgaatgttccaattacaaaatgagcggccg

SEQ ID NO: 243617 - DNA, 418 bp, Homo sapiens
tgtaccagcaatgaataactaaataggaaactagaatttttaaataaaattaaatgtttaaaaaacatttacaatagcaacatatgaagcacttagatattaatttaataaaatatatgcaggatatgtcatgttcatgggttggaaaagattcttgttagtgcatcaattgtccccagttttatctataaattcaatgctattctaatcaatatcttagcaatcagatattgatcaaataattctaaaatctatgcagaaaggcaaaggaactagaatggtcaaaacaactatgaaaaagaacaaagttgtaggactctcgttacctaatttattcccgctgcccaatttaaagatgtaaactgggtagcaagagtccttcagcttgaggtacagtaaaaaagagtatgattttggt

SEQ ID NO: 243618 - DNA, 341 bp, Homo sapiens
cttccttcctcattaattcatccatacacacaggcattagtttgtccaatcaacaaatattaaaatgcctgttatatactgcatatctcagacatagctttcctgtgatagtctcttttgagagctaggagttgaggcagggctctagatctctcaaaccgctctctggctttatgtcatggaactctaggcaagtccaatctgcaagagaccctatagttgatcctctaatcaaacccttcatattttttttttttttgagacagtcttgctctgtcgcccaggctggagtgcagtggtgcaatctcggctcactgcaagctctgcctcctgggttcacg

SEQ ID NO: 243619 - DNA, 315 bp, Homo sapiens
caaaatttcaggtaaacttaaatattttaagtttttaataatttgtgttaccaaaattaaattttggttagagtttgacattcctaagtgatagaatcatcttaaacacatgttgtcaacagaaatttgaatgctgaagtcaatttttgttattgttattgttctgcttagtgaagaaatgtatcctctctaaccagggacagtatgtactgctttctccttaatactttgagattttcataaagaaaataatttcaaaggtgttgtgctgcaagctaaagagattatttctaaaggaagaatttgtcattctaa

SEQ ID NO: 243620 - DNA, 316 bp, Homo sapiens
ggattacaggcgtgagccactgcgcctggccagctctgacctttttacaaggatacactgggccctggttggcgtccaaagcaggctggtgctgcgtcctcactgtgagctgggcgcctgcagtgtggcagccgtcagaggacacagggcgtgttgggctggcattgtgcttggcctgtagtgaccacttggtggacgaggggacattgcctctctcagtcccaccctcgggccttgcagaagcaggtgagcctgggcagggccaggcgcccagagaccctctgtggaccccaggcatctcccagccctttgggct

SEQ ID NO: 243621 - DNA, 280 bp, Homo sapiens
accccgcctgtacagagaggtgccagttttcttcctcactgggattcctcctcaggggcttcctttttcttttctccagagatgccctcccctcctcagaacactctccccctcagcccttcacagagtcgctcaggagctttgtgtttaaacactgtttggccatgcacctccgtgggccctcagtggcctgtgtcataggcaggggccttaggttcctgatctgcctacgaatgtcgcccagaatttaatgataaaaaactacttgtaactcatatgc

SEQ ID NO: 243622 - DNA, 612 bp, Homo sapiens
tttaatcagttgaacagtttatatagacaggtggctttaataaattctgttctaaatctaggctaaagtttaagggaacctcacgttgaatctattaatgctaaagatcaattattgaaggaagaattgtagaagaatttaaatctatacatctacagttctgccaaacttacagttcttactattttttttcactaggaataatatagaggaattttttatggaacaagtgtattggtcaataaaactaagctttggtacaaagaacactattttaagaagtgatggttcattattgaggatttagtaataaataaataaatacacaaataaataaataataaaaactttgcaatagtccccaaatggcatagtcattgccagtataatgaagattatgtcttgtggtagacagaattctttttagggttctaatattctatcactttcaggccttcgctagtgtgcaaagagggagcatgtattaactgggtcattcttatccaaccatccaaaatgaaccatccaacaaccatccaagacgaacaaagagtaattgaaaccctgaacactaatatagagttccaaatttgaatcagtactgaaaaaaac

SEQ ID NO: 243623 - DNA, 350 bp, Homo sapiens
attgaataaaaacataggatacaaaaggcaaacatattctacttaaaacttgtccctcatcagcactcagtgccaacagtattaatttgctccagatgatagtgtgtattataaaattataaagttcatctaaattatgttttgaccctctgtgtagaatataaaatcactggatttcagagcataccacctgcttttttacatactttatacagagtatgatttcggagtatgattagagagtatgatatcagtatactgataaccaatttgttgtgtaattataactaatttgaatatattgacaaccaatgtgtttgtgtataaatatatattttgtgtatatattt

SEQ ID NO: 243624 - DNA, 454 bp, Homo sapiens
ctaagagactaaagacaggggcgtggaggggcggagctgggtggggggcgcctcatgaaggccgggctgggtgtcccaaaccagggccacggaaaggcagcgggaaggaggcgtgcgggccgtaggggctgaggggcgggtgttgggggcggaatgggagggacccgggacctcgcatgcatgaagccgcaggcccggggcgccctagtgtttgaggacgcgcggtccatgcctgaacctgggtgcgcagccgcagctgccgccatctgcctcagggggttgggctttgaccaggcggctgggcagcgccagttgaaagcggttgagcaggccgggcgcagtggctcacgcctgtaatcccagcactttgggagaccaaggcgggccgatcacggggtcaggagatcgagaccatcctggctaacacggtgaaaccccatctctactaaacata

SEQ ID NO: 243625 - DNA, 490 bp, Homo sapiens
ccctgggctggtcttgaattcctgggatcaagtgaccctcctgcctcaggctcacaaagcgctgggatttacaggtgtgagccactgtgcccggccacaaatcaaaatttttgagtcctgtcattggctcccccaggcccataggacaaagtcctaacccctagtcaggacactcagtgtcctctgctctctcctgggttttcatcctcttctcttctcactcctggccactgatctgtttccactgccctcatttgctctcctgctcttgcttgagctattctttctgcctggaatgcccaagttggcaccataatcaccaactaaaagatccttttctttttatttttttagagatagggtcttgctatgttgcccaggctggtctcaaactcctggactcaattgatctttttgccttggcctcccaaagttctgggattaacaggtgtgatccactgtgctagcctttttttattttttatttttt

SEQ ID NO: 243626 - DNA, 488 bp, Homo sapiens
atctctaggtcttgagtgtaacctgccccaccgtttaaaaaaaaaaaaaatagtgctctttcagaatttgaagctaggtatgtgagtgaaaatagaaagtgcattttgagtaaactcaccaactattcctggtgataaagaaaaggcaccaggccccaccaatggcagagacacctttcctattccacacatgcacaacttaaatctgatcacaataaacaaaagaagattgaaaccggaagttgctcacctttttttttttaaagtctccctgtgattgtataattttcttagctactacatttgctgtttgtctgtgctcctggagtgtaagtcctgaatacatgtgcagaacatgcaggtttgttacataatttaattatacatgtgccatgatgggttgatgggtgcagtaaaccaccctggtgcatttatacctatgtaacaaaccagcacttttttctcatctaccccagaacttaaagttt

SEQ ID NO: 243627 - DNA, 724 bp, Homo sapiens
ttttttttttgctcatgtataaaacacatatatccacatatgggttagtagtagtatttgttgaacacaatttttggttttcacacaaatgcaccttttcaaaaatcaattgttccttctcccaacataccccaggctggcaaatgacaaatgaaaataaaatccctgctggaaatagtggtataaaaagcattttccattttatgtgcacttttcaacccagagaaaataagaaatttgttttatttttgtgcagtagtttctaaaatataatcggagagatgctagtaaacatttaactttagattagctttctcaaaacttttaagcgctggaatgaaagatttgcttacattctgaagctggtgcagggtatcttttttaagccttctttggcatctcattttcacgcaccatctgagatgacttggaaaacaccagaaaataacaacactacttccacaaaacaactgcctggacagtgcctatttctacagccatcatttatagaactctttttctggggagaagttttattttaagtgtcaatactaaaagatggtatatttggagttggctgcttcaatcagtaaatgtagtcagcaccgactcagaaacagcttatttttaataattggaagaagaaatatttctagctgttagttttaaatggctacaaaggaaagaaattatttttttggaattattagcttgccgtatgtgt

SEQ ID NO: 243628 - DNA, 605 bp, Homo sapiens
agatttcagatttttctgggagggtggtggaaagagcaaggacttggaagacacaagataaagatttgaatcttgcttctggctctgtaacagcagagcctcaacttccctctggagaatgaggacataagactcctccataggaggtttataagcatggattcgaatttgtagaggacccagcccagcgaagtactcgttagctcccttcttttgggaaggatctgtcttttggatattttgtagattggccatggaagtggaaatatttgcctgtggccatttttcctagggaaaagcagggctgcctgacaagctgttgcaatcccaaaggcctctccatcccctagttgttttgatgtcgggatcaagcttggggtcaggttcaatgtgtgtctgggagaggggatacccaggcctttgcaagtctgagctctgcggctgcctaggactgtgacaccgaaggtgtggagaacatgggctgaggagggaggggcctttctgagctgagagaacttggcaagttacttttaaccttcgtttcctgtaagtttcccaaatttccttcggttattgatttccaatttcaacccgttttgattgga

SEQ ID NO: 243629 - DNA, 589 bp, Homo sapiens
agagtctcgctctgtcagccaggccagagagcagtgccatgagcttggcttactgcaacctctgcctcctgggttcaagggattcttgtgctttagcctcccaagtagctgaaattacagatgtgcaccaccgtgactggctaatttttgtatttttagtagagacaaggttttgccatgttgtccaggctggtcttgaaatcctggcctcatgaatcctcccacctcggcctcccaaagtgcctagattacaggcatgggccactgcaccaggcccagaagcttctttagactgccttctttcacttagctacatgcatttagtttctttcttgtctttttgtgagttgataggtcacttctttttattgctgaataattttctattgtatgaatataccccagtttggctatccattcacctattgaaagacatcttgtttgcttccattttttcatatgcaagtgcaggtttttgtggggtcatgttttcatctaacttaggtaaatacctaggtgcatgattacttaacagtatcataagcctgtgtttttctttgtaagaaacttccagactgtcttctaccat

SEQ ID NO: 243630 - DNA, 513 bp, Homo sapiens
cccattcttaccactggatgtcaagaactgctagatgcgatccagccagtctgtactcgactctcagttccatcttctcaactcacagtgtcttccaaagtccatgccacaccacagcctggaagatctcccaaggtggtatcttgaggcaatggtagagctcatgtcacagtattgtatgcctcaggctttgaataactcaccagtgaagtcatcttgacctggacagaaattgaatcctcccaagaatcccaggagcttggaaggggatccttccccagatgagccttcccttgaaatctctgccaggcatctgacccagagaaactgtaagtactgtgtagggctgggttggaaagtctaaactatgtagtaatatattatacaacaatcggtcagttatatgcctgacagtaaatgtaatgtggtatcttggattagaccctagaacagaaaaatgacactagtggaaaagctggtaaaatataaagaaaatcttttccagttaaaagt

SEQ ID NO: 243631 - DNA, 320 bp, Homo sapiens
tactccaatttttatggccttttaaaaaactacttttatattttagcactgacacacaggctcgcacctcttagaaaaagtaaaaagcttccattcaaaaactagcaatttttacagagctttctgtatgttctttgggtgggggttggggaagtaggaggaagaaggagatgaagcacactgtacttgtcccaaattatattttcctttttcatgtttttccctgaaacaatattgtttgtactccttatacaataatgtcacatctcccttgtttcttcagctggaggaggtggtggtggtgattcccgttgctaatc

SEQ ID NO: 243632 - DNA, 211 bp, Homo sapiens
  misc_feature (1)..(1): n is a, c, g, or t
  misc_feature (4)..(4): n is a, c, g, or t
  misc_feature (35)..(35): n is a, c, g, or t
ngtnagaccaataatgtcacattattgtataaggngtacaaacaagggagatgtgacattattgtttgtactccttatacaataatgtcacatctccctttttcatgtttttccctgaaacaatattgtttgtactccttatacaataatgtcacatctcccttgtttcttcagctggaggaggtggtggtggtgattcccgttgctaatc

SEQ ID NO: 243633 - DNA, 691 bp, Homo sapiens
acatcaccctgcctcaaaaagagcttcttggcctattcattcctaggcccaccaccaaaatcagattttgattatatttctcttatggtgtccaccaattccaatctattttacactgtttacatccagccctacctcatcttaaaaccctcaatgccgccaggaacggtggctcatgcctgtaatcctagcactttgggagtctgaggcgggtggatcacctgaggtcaggagttcgagaccagtctcaccaacatggagaaaccccgtctctactgaaaatacaaaattagctgaaagtggtggcgcatgcctgtaaccccaactactcgggaggctgaagcaggagaatcatttgaacccgggaggcatatgttgcggtgagccaagatcgcaccattgcactccagcctgggcaacagagcaaaactccgtcaaaacaaacaaacaaacaaaaacctcaataccttacccttgtcctctgtatccctgattaatattcaaataatcaccttaggccatccataatcacaccacattgggagaccaaggcagaaggatcacttgagcccgggagctctggaccagcctggaaaacatagcaaggctgtctgtacaaaaaaaatgttttaaattagctggggttgctggcgcacacctgggtttggtggcacacacctatagtcctagc

SEQ ID NO: 243634 - DNA, 416 bp, Homo sapiens
gggctgcaggattcggcacgaggagactttagccaccatatatctcattagcatacaaaaagacacttctgagattccagaggttttaggagctgtgtttctagtcacagaccaaatattcactgtgccgggaactggtggcaaagaccaaatgtatatttcttactacaaatcacaatatcaaagtgaaatacaagtttaatctcctatatttatatgtccaaaggccttttattcatggccacacctaaggattgcccttctgagtctccggatagcatctgcatcatagttgacttatacttctgctaatccgcacccagtgggtaggagcagaatgatctagccagtagccacacaggaatgtagatggaaggagctatgtagggctgacattttctgttgtttttccttgg

SEQ ID NO: 243635 - DNA, 576 bp, Homo sapiens
gaagtgcggttgccctgatccatgaatacttaatggtttcaaccattaagttagccattgaagaggtctagctttatttcatgagctgttgtaaatgttaacattctatcagacgttctgcactgtgaaactggaattattctgtaatgaggaaatctccctcacaaccatttagttaccccgaggtataaattatataaggaaggtaggatacttctttctttcctgttctcaggcaccacaaggctcataatcgctctccatagcttatactgttaaaataatctgacgtttctgctccagagagatgcattctctacctactcacagtgcactcctgcttctttgaacttttaccatgtttagagtgtacatcataaaatgtgatgtctggctatggggtctagattcctccacaaggtagttgggcacttgctacaacattgtaagctcttaaaggtgaagtacctcctgcagtgttatcctgtttaggagatagaaaacagccctggctgaccaggcgcggtggctcttgcctgtaataccagcactttgggaggccaaggtgggcggatc

SEQ ID NO: 243636 - DNA, 522 bp, Homo sapiens
gaagtgcggttgccctgatccatgaatacttaatggtttcaaccattaagttagccattgaagaggtctagctttatttcatgagctgttgtaaatgttaacattctatcagacgttctgcactgtgaaactggaattattctgtaatgaggaaatctccctcacaaccatttagttaccccgaggtataaattatataaggaaggtaggatacttctttctttcctgttctcaggcaccacaaggctcataatcgctctccatagcttatactgttaaaataatctgacgtttctgctccagcatgtttagagtgtacatcataaaatgtgatgtctggctatggggtctagattcctccacaaggtagttgggcacttgctacaacattgtaagctcttaaaggtgaagtacctcctgcagtgttatcctgtttaggagatagaaaacagccctggctgaccaggcgcggtggctcttgcctgtaataccagcactttgggaggccaaggtgggcggatc

SEQ ID NO: 243637 - DNA, 330 bp, Homo sapiens
tttttgtagtagagacaggatttcaccatgttgaccaggctggtgttgaactcctgacctcaagtgagccaccaggcccagccttgcccagttattatataaacaaggtctcagtatgttacccaggctgatctcgaactcctgggctcaagccatcttcttgcctcagcctctcagagtcctgggtttacaggccactgcacccagccaccttttcccattttaaagttggtttgtttgtgttgttgagttgtacgagttctcttttatagattctggatattaaccccctcgtcagctatgtgatttgcaaatactttctctcattct

SEQ ID NO: 243638 - DNA, 200 bp, Homo sapiens
cagatcaccagtggtttaacagctgtgggcggaggagtatcaagcactcccatatcctcgggggaaatggaagctcatgctgcctctgcagagggtgaatggtcagcacagaagacagccacagatcaagaaaaactagttgtcaacaaggcccactcacttagaaacaatctaaataaaacccggaagatcagagcaga

SEQ ID NO: 243639 - DNA, 666 bp, Homo sapiens
tgagaaggaatctcactctgtcacccaggctggagtgcagtggtgtgatctcggctcactgcaacctctgcctcctgagttcaagcaattttcctgcctcaacctcccaagtagctgagattacgggcacccaccaccacgcctggataatttttgtatttttagtagagacggggtttcaccatgttggccaggctggtctcgaactcatgacctcaagtgatccacccaccttggcctcccagagtgctgggattacaggcgtgagcaccatgctcaatggtaactactttttagggatgatacatggtacttagttgtcactgatttttttttgttgttgttcaaaaattattatagtatctaaaatcttgtgaacatgggaacagattgtgaggagaaaaataaataaaagcttgtgattatttcaaattcttatgatctcaagtcttgactaaaatgtgtgctttacagggattaagattaaagtgaagctgtttttttccctcataatgtttctaacttaaatttttaaggggcattaatacttatgaaattgatagttttctcatcttttgattactcccctcaattcatgcttctgaaaaatgcattctagctaaaaatataagaatgcttattaatcataaaatatattggtacttg

SEQ ID NO: 243640 - DNA, 474 bp, Homo sapiens
tccataaggaatttctagaaggatgcaataagaactgttaatagtcattttctctggagaggaaaacaagatctggagtgaaaggaaaagactgtatgtaacaggcaatctgtagaacactccacccaacagcagcaaatacacattcttttcaagtgcacatgggacatttaccaagataaatattaatatcttctgggccataaaacaagtttcagtacctttaaaagaatcaaggcatacaaagcatgttctctgacagcagtggaattaaattagaaataaatttcagaaagatttttgggaagttcccaaatcttcagaatctcaataatatacatttcagtgacccatgggtcaaagaagaaatcaatgggaaattaaaaagcacttggaactgaatgaaaatgaaaacaaatatatcaaaatttatggaatgtcattaaagcagtacttaaagggaaacttacagca

SEQ ID NO: 243641 - DNA, 283 bp, Homo sapiens
cctaggactgtggctgctttggtgctctcagaaagtgagacaacattaaatttagatattctgggtaaaattgggtcctgggagtacacagaatgtctacattccgagttcatccgctttcttcaggatgagccaagatcaactggaacagtccacgcagcttacatggtatcgcgagaagcttgcagttgccaggtgttctactttctgctctctcccacatggcaattagtgaaactgtctttcaactactctaataaatcaaactttattctctgtctca

SEQ ID NO: 243642 - DNA, 625 bp, Homo sapiens
gggagtgggtgcaacagaaacagttctagtgttggagccgaggaagccaactctgaaacatttggacctttgttgtctgacattgcttttgccactccttcttccttcctcccacctttgccttccccaccacctcctccaaactcccctgccttctatctctggccccactgatgacccctccatgtgagtcgtaggcttttactacccatgatttcttttctccaagcaaaagagagaagagtttatttcattctcagcagcatccctggccagcctcgtcaaagctacgtttgaaaaccaatggccaagatcagtgcttcttaagctttaagttgcaaatgaactctctgagtgaagatgttgttctcaacctgtaggaacttccttcctgccaagaagctggttcattcatcaccaagcatcatcatcatggaattctcaccctgctggaggttcgagccaagacatagaaagaggacattacctggggcaggaatcaattgcctatcactggggatgcctgcagatcattgtccagagtggctgctgttcactgagtgtttcctctgtgccgggcaccttgcacaccttattttcagtctccgcagctgccttgttgagg

SEQ ID NO: 243643 - DNA, 472 bp, Homo sapiens
tgtcagtgagcaataggggtctctgccacacctttggagaccactctactcctggctcagtttcccaacccctgtatgtcagagcctgacgtcttcctttttccaacttgtcttgagtcccatctggcctgagtttgaacaatagtaatcaggcctgttggctgatatgagatttgaggtaaccacgaataagcccttcttggtcagaaccattaaagataacttctagtctcaatgaccacacatttgcaaagcagtcctcctggaatgtccttccctgaactcctgtggcccagtcattataggcagagcactgggtccaaggaaaagccaggccccctgtatgggatgggccagtttgctgagaatgacacattactgttgcccctctaacttgaccctgggtttcctgtgggtaagcagctgtttcagcaaatcccagattcctgcaaaacagccttttaagtttttc

SEQ ID NO: 243644 - DNA, 723 bp, Homo sapiens
ttctctgtggagtgtttcctccgtggtgcttttccaccattgatagaagatgaccaaatgtccttggccatcactcttctttgctcgtgcccaaagtcgctaagccaggtatatcattcttctaatgttgtagaaattgaaaagagcaagtaaacactgaagccagatctctctcatgacctcttctccacagaaccatcggaagttcaaacttcttctgtgagccctgtgactttgggcagtctaaattctacctcgcctgcttctccaatgtcatcaaaacaatgaaaacaaaaccattcagaattcacaggaagggtttaatacatttaatgaaattatatctcttaattatgaaaacttgaccaaataggcttgccatttttggttataaaagccatcccaggacctgcagtttacactctgaatgccacctgccagtctaagctcctctgtggacgtccatctggctagcatccccttaggcagtaaataagtagggagagaggcctttctacaggacttttccttttaaagtcctttaaaggaaccctacctgtaatccttagaaattttatgtctttgtcttctctccttaactagcaaaagtttcaaaggcttatctgtaactcaaggggtgtcagttcatttgtttgcaaatgaaacctgagctttctgaaaatgactcccctgcaaaatcattcccccataacactcctccag

SEQ ID NO: 243645 - DNA, 366 bp, Homo sapiens
agatttcatgagatatttcatgttttgtccctctaatggttctattaagtctcttcaaacaggcacttttctaccagagcaaacttgaaagaacagaacatttattccaaaagcaatttcctttcccagttattttctgtattcccttggcagtgtttttcgacagttttacttgaataagagcttatttggtctcaaaccagcttctcctgctgcttgaacctgcagtcaagtctcagaccttttctgtgtgacctcccaatttgctaccatggaaatgattacaatcacacaagtgtattttttattgcaagatgagttcagatatttattttttaaaattaaagcaaactcttgcaaaatata

SEQ ID NO: 243646 - DNA, 573 bp, Homo sapiens
ttttttgagacggagtctcgctctgtcgcccaggccggactgcggactgcagtggcgcaatctcggctcactgcaagctccgcttcccgggttcacgccattctcctgcctcagcctcccgagtagctgggactacaggcgcccgccaccgcgcccagctaattttttgtatttttagtagagacggggtttcaccttgttagccaggatggtctcgatctcctgacctcatgatccacccgcctcggcctcccaaagtgctgggattacaggcgtgagccaccgcgcccggccagatatgactcttaacaacttccttcaagtaactcattttgagacagtcaaaaaattccttcattttattgtctaaaattatgcataacaaatgactcagaaataaaatctatttttattttacatggaatataggcaattcctaactcagaaatatgatgggttgattctttaccttgagatatttaggaatgacccaaatgtccaaaagtaatacagggattatttagtatgtatgaagcagtccttgggatgttatttttaataattttgagtagg

SEQ ID NO: 243647 - DNA, 136 bp, Homo sapiens
gcataaattaccttttatagaagtttagttgttaatgatcatttttagggtctcatccagagaggttcaacacattgttatggctgatttaaattatgattacaattatgaaatattgtgtctgtgaagttcaaaa

SEQ ID NO: 243648 - DNA, 311 bp, Homo sapiens
ctctgcccagtgcctggcacagcaaatgcccaggtggctgctgctttccactgagacttgaggctcctgagagttggtggcaaagggctcacccagagctgaagactccagcccattcctgtgcgagggctccaggcaccttggaagcaccgtgggccggggagccaggccaggctggttgtggatccccatgagtccttgtcactgtgtggcccagctggaaagcatggtcaataatgtctgggaattgtgaaaattgtgtgaagtgtctgcacacagtaggtgctcagtaaaggtttgttgagtgcgta

SEQ ID NO: 243649 - DNA, 318 bp, Homo sapiens
acattgaaaacaagcaaagaagtaagcatcatccagtatccgcagataaataagcactgttaatgttaaaattatacacgcacaaaagcaaatacacattttaaataaaattgatatcatagtacaggataaaaatacatatgtatagctttatttcttgaaagtatatataatttgcttcaagttgagatggagtaaaaggactggttttaccatctcattttaaacaattaaaaaaaaaaaaacagacaaaatgtaggaaaaaatggcactcaacatgttgtttaccagccagttaagtatagtagtctctgagac

SEQ ID NO: 243650 - DNA, 482 bp, Homo sapiens
caacagatagaagcctcatctctctctctctctcttttttttttttaaaggcaaagccaaggagagtgccagggaaaaacataaacccttccttggtccccaagcaagaaccacacacagcttaggatctgaggtggaagatgtgggtagcaggtggggcataaaaagctaaaaagctgtggaagtccagaacttagaataaaatacaactgggcctaattgagggtagaggatgggaggagggagaagatcagaaaaaataagtattgggtactaggcttagtacctgggtgacaagattatcggtacaacaaaccctcgtgacacaaggttacctatataacaaacctgcacatgtaccccgaaccaaaaataaaagttaaaataacgaataaaaaaacccactacctatatgattggtgactgttccaatgaattcaaaagagaaccagactagaatatcattttcttgctggggggtg

SEQ ID NO: 243651 - DNA, 491 bp, Homo sapiens
gatcctcaatttatttctaaaatagtcttagttccaaagcaaacacactccagttaatgtgccctgagatgtgtttcttaaccaaccagtccttgacagctgagctctgtggacacttgaagacaacagctattgttgagtttctcactgtgcagttggaagagccctttgtgtttaaatgactccaaagactgaactcactttagttgactttctcaggaagctcatgggtagtaaactgtgagaatttggggaacagttcagcttattacttcataacccctgatactcttgctaacacgctgaagacagaaaatatagcttctggggacatcgaaatccaagacaagaaggaggcaactggcacttgttgtaagtttgtggaaaagcaggttttctttttggaatcatggctaacttaagtgatcaaaagactgaaaattattctttccacttggctttccacaatgaataaaactcatttcaacaca

SEQ ID NO: 243652 - DNA, 387 bp, Homo sapiens
acatgaggaaatagaatgttattgaggactgggggacacagttatagttactgagtgcctatcacataacaaaagttatcctaggtgtttttcatagactatatgatttaattcatataacttcacaccacaggaaactaagtcaagggaaatgaaataatttagatatttcgtagatatttcgtcgtagatactggccaaaccagaacatgaacccagatatttctgactaaaatgctcaaagcttttctacttcactacataacattctattttgtcactatcaatcctataaatgtattaataattttaattttgtggaccagattttccccttttcaccttgatcaaagataatgtgattataaaggctgagattttgtgaaa

SEQ ID NO: 243653 - DNA, 529 bp, Homo sapiens
attggtgcttcaaggagggcatttatttagccttaatactagcctatttggcatcataaataagagaaagaaaagatgaagaaatatgtcagaaatagattctgattcaaatgctacaattggggttagttaccattaaatagcaaaatagaaaatggatgactcctatggcaaatggtttggggagagacaatgtcgaagttgcttggcatgacaatgagtgccttaaaaccgtttggcctagaagtttcatctgcaggaatttatccaaggaaaataaccaggaatgtacgcaaataactgaatgatatttataatagcaaaaaaaaagaagcaatgtaaatgtccaacattagaaaattggttaagtcattagtttttagacagtacttcttaaagtataggattccataggagtgtgttgataaccatgtcagaaaagccacaggctcttcatcaccacttcaatcagagtagtttcagttttatgtgttgtacatattaaggttccatgtgagactttgtttag

SEQ ID NO: 243654 - DNA, 673 bp, Homo sapiens
cgggagtccacccggggggggccctctaaaattagggatcccccggcgcaagaattgggcgcgaactttcctaaaaatacaaaagttagccaggcatggtggtgcatgcatgtagcccaagctacttgggtggctgaggcacaggaatcgcttgcaccctggagacagaggttgcagtgaactgagatcacacaactgtactctagctcaggcgacagagcaagactcttaaaaaatatatatatattcataccatggaatgcaagggtttaaaacaatgaaatggaactttatgtactgacatcgaaagcttttttttatatgaacatgattgtaaaagagtaaatataatttcaatctgctattttaaaacagtacatttctagatacatattaaaagtatggaatcagcttcacaaagtgcatctctagattacaggcctttttacttccaacatttcatattttgcatttttattatttttattgtaaacatgttttaaatgtatgttagtttgcagagataatataagtaaaactcaaattgtataagtgagtttttcagacaatttattaatcttgggcagaaacaattaagtgttaaccatttggaatacaaatgtttgtacgttatgatatgtaatactaagcataattaaaactttgtaacttt

SEQ ID NO: 243655 - DNA, 420 bp, Homo sapiens
ttttattaaaaatgattcccagctttttagagatttctagttttaagagtattcttatatgatacacacttgtgacagcattccagtgagacaggaaaaataagtattagtgccctataggtaggaaagctgaggctgggcacggtgcctcacagcctgtaatcccagcactttgggaggtcaaagtgggtggatcacctgaggccagatatttaagaccagcctggccaacattgcgaaaccctgtctctactaaaaatgcaaaaattagctgggcatggtggcgcacaactgtaatcccagctactcagaagtctgaggcacgagagtcactggaacccaggaggtggaggttgcagtgagccaagattgtgccactgcactccagcctgggtgacagagtgagactctcaactcaaa

SEQ ID NO: 243656 - DNA, 443 bp, Homo sapiens
cttattcccgtgggatgtcatcatagtgttccttggacctttgcccagcgagatatgatagggatatttctttagttgggcctttgtctaccttgtggtcaggtgattaagaaggatgtttctcacagcccgaatgcctgggaaatgtttcactttgaccaagggttgcaaaatagtggggaagcttaaaatggtgcagtttggactaacacccaggaggttgaggccgcagtgagccatgattgtgtcactgtactccagcctgggggacagagcaagaccttctctccaaaaaaaaaaaaaaaaaaaaaaaaaaatcatattgagagggatgtgtaagacctgttggacatttggggaaaattggtgatagttccatgcaaaacaagcaaatggagacaatcaagacaattattcagtccaagaaaaccaaaacattgttc

SEQ ID NO: 243657 - DNA, 342 bp, Homo sapiens
actaatggcatatacattcatgaatcgtgcccaaggggtgagaagcaaaaaaaggaggactattattatgtccataatattattatgttactaaaacatctgataacgatgatgatgatggtaatatttacgtcatgctattagggcaccatgctgctctaagagctttacatacactatcttctttaatcttcataacacctaaacttgtgaggtaagtactactgtcatcccactttacagatgaggaaacccaagcacacagaagttaaataacttctcacagcctaaaaatatccaactattaagcagcaaaagattcaaactcaggttgctttatcc

SEQ ID NO: 243658 - DNA, 363 bp, Homo sapiens
cactctgtagcccaggttggagtgcaatgatcatagctcactggagcctccaattcctgggctcaagcaatgctcctgccccattgttgagatgtggtctcactatgttgcccaggctggtcttaaactcctggcctccagcaatcctcccacctcagcctttcaaagtgctgggattacatgtgtgagccaccacatctggccttaaaatcactaatagtctttttaaaaaaaatttctaaattacactttatttttcctctacttttaggttcagtaggtacgtatacaagtttgttacatggataaattgcatgtcactgagatttggtctatgagttatctcatcacccaggtaatgag

SEQ ID NO: 243659 - DNA, 508 bp, Homo sapiens
tgcctcaaaaaaaaaaagaaagaaaaaagaaaaaaaatttactttttggcacactaactccacttctagacatctatcctaagataataatcaacatataaaaatgcacatacaaatattgactataagaataaaaaaatttcagcatttaagctgtacaggtgaatgtttaaattatggtacacccatttgtgttatttattttaaaaaatttttttgaagtataactatgtagaaaactgtcctagcataatgttaagcatcgttcccaatgtgttttaaaatctgatgcaaagcaaacagaaggcaggcaattgggaaggaaggatgggggaaagaaagaaaggaacaatgaaaaggaggaaaaggaaggaagagaaagaaagaaagaaaagagagaaagaaagaaaaaagaaagaaaagaaaggaggaaggaaggaagagaaagaaagaaagaaaagagagaaagaaagaaaaaagaaagaaaaaaaaatcataaaaaaagcat

SEQ ID NO: 243660 - DNA, 830 bp, Homo sapiens
ccagtatgacaacgagaagaagtgggagctcatctgtgatcaggagcggtttcaagtcaagaatccccccgcagcctacatccagaagctgaagagctatgtggatactggtggggtcagccgaaagtttaagaggcgagttcaggagtccacgcaggtgctacgggagctggagacctccctgaggaccaaccacattgggtgggtgcaggagttcctcaatgaagagaaccgtggcctggatgtgctgctcgagtacctggcctttgcccagtgctctgtcacgtatgacatggagagcacagacaacggggcttccaactcagagaaaaacaagcccctggagcagtctgtggaagacctcagcaagggtccaccctcctccgtgcccaaaagccgccacctgaccatcaagtatgtgggccacaaagtggggtggtgggagaacagagaattcagcccccacactgctgcatctagccagcccaccccgggcccttggggttggcgagaggggtagccatgcattaggggtccgagtaagggactcatacagagtttgggacaccagtatgttaagaagccatcaggggtggggctgggtgctgtggctcatgcctgtaatcccagcactttgggagactgaggtgggcagatcatttgaggacatgagtttgagaccagcctggctaacatggtgaaaccccatctctactaaaatacaaaaattagccgggtgtggtggtgcacgcctgtaatcctagctactcaggaagctgaggtgggagaatcgctggagcccaggggatggaggtggcagtgagctgaga

SEQ ID NO: 243661 - DNA, 934 bp, Homo sapiens
tgggtgtgcactttagatattcctctgtacatcctgtgtgtgcttacatggacacattctgtgtacttatactgtgtgtatacacatgtgcagcccatatgtccatacataggtgtgtgtgtatactatgtgtgtactttgtccacttatggatgtgtgtgtgtaccattgagtccatatctaggagagagagagaatgtgtgtgtgtgtgtgtccatgtatggatgtgtggatattctatgtctgtatttagagtgcaggtatatggatgttcatgtgctgtgtgtgtgtgtgcgcacacacactctgcctctttgtgtgtgtgcatgtgtataccttgtgtgcccatgtatcgggggtgtgtgtaccctgcttgtctatgtatgggggagcacatgtagcctgtgagttcttattctgctgggcaggtgtgtggaggtggtgggggaggctgagcatgaaaggccacttgtgccagttggaggagggtgggcgctgctgcctgctgcctcaggacttggtgggcctgtgggaggccgggctccacccaccagccttccctgttctcggtccccagtttaagaggcgagttcaggagtccacgcaggtgctacgggagctggagacctccctgaggaccaaccacattgggtgggtgcaggagttcctcaatgaagagaaccgtggcctggatgtgctgctcgagtacctggcctttgcccagtgctctgtcacgtaagccccctgctcccagccctcatgccgctcctcagagctttgatccccgtctccctgcatctcacccactcccctggccagtttcaagccaggcagcccgagcctaccctggaaccctccacttggccttgagcgatgctccttccagaaggcctgcccccgacagggaggggtggcctctcttccaccactatgt

SEQ ID NO: 243662 - DNA, 460 bp, Homo sapiens
ttttggccattttaaatgtagctactagaaaatttaaaattacatatatgtttgcattatatttctattggatggcactgctcattaatcttttcactgctgcagaaaaggtgaagtagagtttgacacgtttaacaaagccaagtaaatcaagaacataagcactgacagtcctaactctgaataagcttgaaagtaagactaaggctgggtgtggtggcttaggcctgtaatcccagaactttgggaggatgaggcgggtggataacctgagccaggagtttgagaccagcctgggcaacatggcaaaactccatctcttgtagagaaaaaatatgaaatacaaaaatgcaaaaattagctcggtatggtagggtgcatctgtagccgcagctactccagaggctgatgtgggaggattgcttgagcctgggaggcagagcaagacccggtctcaaaa

SEQ ID NO: 243663 - DNA, 368 bp, Homo sapiens
atcatgaggacttgaactggagcagtaatggtggggatggtggagaagggatgaagggataaacttaagagacattacggggctagacaatctattagacttgctaaaaatatgattgatgtacaagcgagaaaaagaaattaattcaactagagatattctcagacatgcatgaaatagcatttgcagcattgtttgaaacagcaaaagtttgagacaacctaaatgttcctctctagggagcaggttaaaaaaatcataatttttttgcatggtacaggcataacatggagcaccaggcagccaccaaaatgaatgagacagctgtttagattactaatatgcagtgacctccaagacatattgtt

SEQ ID NO: 243664 - DNA, 413 bp, Homo sapiens
aaaccagcgtggtctgtagttaataagcacaagataagagactgcatttactggattgctcatttcatcagaaaaaaagtgatgtttaatacacttaacaaaaactaaagtcaaagataggacataaaattaggcctatctcaagttgatgggaaccaagctactttagaaaggatacaataaaacatagtcccaaagtgaaatttttgatttagggcttctgtgagacaattctattatagaaataatgggatgacactgtttaaaggcaacctttacccctccaatagtgtttagtaaataaaagtgaaatcttcattctaccacacgcagcctgatgacctaaatccaaaactgattgttaggttaacacagtgtttcattgcttccattttccaccatttacgtggtta

SEQ ID NO: 243665 - DNA, 299 bp, Homo sapiens
cacttggaatctcaatttattgccaatagacgacgttgtcaggcactaattttctggtggcgctccatcacaggcctctcaaatcaggggaggggctcagaggccggtgggcaggggggctcggaggagccgtcgcgagccagccgggggttcctgtaacgaggctttaatgaggggagcgcgacggcctttgtggacaaaccggaggaggaggcggcggccgggtcaggagctcggcaaggtcgcttcctcccccggcccccagagcccgggaatccggagagggtcagcggcggccg

SEQ ID NO: 243666 - DNA, 377 bp, Homo sapiens
gaaggaacttttgtagactagttaaacctcttaagcctctgtggcccaggctggccatctgtgctgccgttgctgctttgaggatggctgaggcctgcagctactgggggattggatggcaggcctgtccactctacccagtgctgtcaccccacattgtggcaccaactctgtctggaagacatctgtgcttcttaccttggccagtgagtgactcaatgacaactcagctctggcactttgcctcttgggagccaggaacagctgggaccctgaggaccatgggtgggagctactggctaggctgaacaagccctggctggggcccaggacttggaggatacctgctgcccactccattagccctcaccacagag

SEQ ID NO: 243667 - DNA, 450 bp, Homo sapiens
ggtttgctgaccaacaaacacatcatagaaactgtctacattaaaattcctgtcttggccagctgctggccatcgactagcactggtctgtaaaacttgatacgatcagcagggtgcggtggctcacacctgtaatcccagcactttgggaggctgaggcgggtggattacctgaggtcaggagttcgagaccagcctggtcaacatggagaaatcatatctctactaaaaatacaaaaactagccggctatggtggcacatgcctgtaatcccagctattcaggaggttgaggcaggagaattgcttgagcccaggagatggaggttgcagtgagctgagattgtgccactgcactccagcctggctggcagaatgagactctgtctcaaaaataaaacaaaaacttgatacattaaaaacttattcttttgtgtgttttgttcggtga

SEQ ID NO: 243668 - DNA, 319 bp, Homo sapiens
ccttgggaagacacaaaaccatcaccactagaaaatgcctttgaccaagccttggacagatgaagacaaagcggagcacacatcacgaaaagtgtctgtctcatccgcagcctggcctacccttcccccatcaaggtggagaaaatcaactttccataaattatgcagccttaaagcaagtgcttcactatgctgggagttaacaacctcatttgtaaaatcagtggatgagactatcctagaaaatgacctttaagaccttttccgggtctaacttacactttactaagagtgccgattaaataaacttgtgatgaaa

SEQ ID NO: 243669 - DNA, 341 bp, Homo sapiens
ccttaatgaaagatttaaaaaggaggaaaggagtagagtatacaacgtccacccagtagaaaaagctaattctgttgtggcagcacaacagaatcttttgggtctttctcatccttagagaaaggtaggtaacaagagtattcaactttttagaataaaacagcaggattaagctataaatgcagaagtattatactaagaaaatgcctcccagatattgttaaagcaaatagtatcatatccagcacaaaaccgcagtgaattgatttaatcagacattatcagagcaaggaagaaataacattctggttttaatggcaaaagaaaaatcccacctcata

SEQ ID NO: 243670 - DNA, 503 bp, Homo sapiens
agatcgaggtgtccaatcttttagcttccctgggccacactagaagaataattgtcttgggtcacccataaaatagctgatgagctttaaaaatttgcaaaaacaatctcatgttttagaaagtttatgaatttgtgttgggccactttcaaagctgtcctgggctgcaagttggacaagcttgcctagattattgacttagtataggaaaagcctgagtcgaaatggagcaaaagacttcctaggcaaatttcgttctttttgaaggatattccattcttatatttgcactttacttgtgtgaaatgggatgcatgctctacagaatgtaaacttaggagttctggccttgcaatgtaatttatgcacatagcatttaagagtagttttgaagtcagcaagatagacctgagttcaaactgtggttgtgacattcactactgactgacttagggaaggtacttaaacctgtaaaacctaagtttacttaccaaaaaaaaaaa

SEQ ID NO: 243671 - DNA, 575 bp, Homo sapiens
aagagagaaatacagatgtatatacacattacctaaagcagaatgaggaccctactgggctgccatcccagctggactgctgctgtggagctcagcatcaagtacttccaggagaagcttcagcaggacctagaggcagagcatggtagaggtagaggatacagccctcataccaccgtgctgtatgtccatctttcaagtcctggtggtgcccgcagagtttgaagggaagccactgcttcagagataccaggtggtaaatgcatgcctagtggaagtgtgctcctctgcatctatgcctttgagcagaaagcctttgagtcccaattagtgggcccatgagtggccaaaatgagggactgggacctgtatagccgttaaactataaatcagggccaaaaaggaaagataaattataagtttaaagaaaatgggctaggcatggtgacttacacctctattcccaaaggaagctgaggcagaaggatcatttgaggtcaggagttcgaggttacagtgagctacaatcctgccaccgcacttatatgtgcaacagagcaagaccttgtctcaaa

SEQ ID NO: 243672 - DNA, 417 bp, Homo sapiens
ctccttcccttgctctctccctctttttagtccagttttatggcgctctgtgttagaggtcttcatggagctacctcgagtccctctgagaaagggccatcaacaagcccaactcacaagtcacgagcagagctggtccccagcctggcctggcagctgccctgctgaaagctgcaggggccccaggctctggctgagtggacgcatttcctccccaaacagacgcttgcatgagaacagaattctccaagtatcaagaaaacaccaggctatgagaatggatggccaacagcctggaaattttctaagtcccatttgtgctggaagctggcacagaaacaaccaagacggcaaggcatgtggtttcctaggctttttaaaaaactatttcagaaaagaaaaaaaggcacaagcata

SEQ ID NO: 243673 - DNA, 387 bp, Homo sapiens
gctcactgcaacctccacctcccaggttcacaccattctcctgcctcagcctcctgagtagctgggactacaggctcccgccaccacacctggctaatttttttgtatttttagtagagatgggatttcaccatgttagccaggatggtctcgatctcctgacctcatgatccgctcgtctcggcctcccaaagtgctgggattacaagtgtgagccaccatgcccggccttatctttgtttttattgcatttgacttcgggttcttggtcatgaaatccttgcctaagccaatgtccagagggatttttccaatgttatcttctagaatttttatagtttcaagttttaggtttaagtccttcatccatcttgagttgatttttgt

SEQ ID NO: 243674 - DNA, 448 bp, Homo sapiens
  misc_feature (27)..(27): n is a, c, g, or t
  misc_feature (45)..(45): n is a, c, g, or t
gtcacctacttctcctctacaaaaagnaatagggtgtaaaacagnaagtcaagggttttcaggaaaaggtctttcttcatgaaaagcagggcactggggcataagagtatccctaatagcagtaagcccctgagtttacttttgggcccttgggtgtttctccccatgtgtatttttcctttttcctcagtgagtccagagaattcattttgtctttctacttttaagctaccactcaccaaccaccacactcagagggatttctccaaggtggcccgccaggggacgtgcagcctcctgggatctccctgcttgtggttgaacatgggtgggacagaagtttattttttgctactgaagaagaaaattaatagcaaattaaccgtgtaaataatagaaatgaaatagtgtttaggcaccaaacctttgaaaactgatctttcttaaa

SEQ ID NO: 243675 - DNA, 330 bp, Homo sapiens
agagagagagagagagacctgtgtgatgtagctaaagcattaatctgagggaaatgtatagctttaaatgcctacgtaaaaaaagagaatttgaaaaaatcagtgatttcagtttccatctccagaagctggaaaaatagtaacttaagtccaatgtaagtcaaaggaaaagtataatagagcagaaatcaataaaatacaaagcagatagctgacagagaaaatcaacagacaaaaagttaatacttagaaaaggctaaaaaagaaaaaagaggtcaaacgcgatggctcacgtctataattctagcatggcaaaaccctgtctctaca

SEQ ID NO: 243676 - DNA, 418 bp, Homo sapiens
ggttaggtttttgtggctcgatagcgcacttcattttagcactgcatattctattgtctgaatgcaccacagtttatgcactcacctactgaaggatatcttggttgcttacaaggtttggaaattatgagtaaagctgctacaaacatctgtgcgcaggttttttgtggatagacgttttcaacttatttacgtaacgaccaaagagcacaattgctggatcatatgccaggagtcttctgagaaactaccaacctgtcttccagagtgactgtaccattttgtattcaaacgagcagtgaatgagagttcctgctgctctgcatctccgtcagcatttgatgttgtcagtgttctggattttggccatcttaatagctgtacagtgggatcttgtcattgctttaatttgcatttc

SEQ ID NO: 243677 - DNA, 328 bp, Homo sapiens
cctcccaagtagctgggactacaggtatacaccactgtgcctggctaatttttttattttttgtagaattgggtctcactgtcttgcccaggctggtttcaagctcctgggctcaagcagccctcccatcttgatctcccagagtgctgggattataggtgtgagccaccatgcccagcctattccagtttttaaggtgaaagtttaaataattgatttgagatatttctttttttttttgagatagaattttgttcttattgcagtgagctgagatcatgccactgtactccagcctgggtgacagagtgagactccatctcaggga

SEQ ID NO: 243678 - DNA, 364 bp, Homo sapiens
caggtggcttattttaggtaaaaaagcttttcagacttttgcttaaattcttatctaataaatatagttcttacaaagtcatagtaaaatattcaaaaccaaaattttctctaaatcaacagctatatttgttccatgtcttgaaggagagattttgaaagattaatacattgaatttaaacctctaggtctggaatacttaatttaaacctctaggtctggagtagcatccttccaggtaatattatacaatttaagcctaaataatgcagtgtaaatttgagctgacaccaccttaagtctctgttttctaatgcgccctgtactttggagagacggtatgctttttgaaggaattggatag

SEQ ID NO: 243679 - DNA, 1147 bp, Homo sapiens
caaatagatataaaatatttatatacttgctagagatagtgatatggtttggctgtgtgcccacccaaatctcatattgaattatagctcccataattcccacgtgttatgggagggagcccgtgggagataattgaatcacagggatggtttcccccatactgttcttgtggtaatgaataagtctcacgagatttgctgtttttataaggagtttcccctttcacttggctctcatttttccttttgcctgctgccgtgtaagatgtgccttttgacttctgccatgattgtgaggcctccccagccacgtggaactatgagtctattaaacctctttttctttataaattacccagtcttgggtgtgtctttagcagcctgaaaaccaacaaaaacagatgggtcacaaagttggccctgaactttctatcaccaacctaaataaggaaagagcatcaattcttgaggtaaaaataggctgattgttcagaaaaatgcagaaatgtgcacaacaccagagatcaggcgattttctgtgaattcttcctcaaggagatgatgccagaatatgtaattgacagcattctcaaaacatccttccaatgcacatggaggctgtttctcaaaaatatgttctgagtctggtactcaacatctctactactcctgccaaatcttgtctgaactgggtgcagtgagctctcaggtttccttgtttatcactcccgcaactccagtctaccactatccatcctccagtctaccactatgtagctgacatagatttttaaaaatacagaaacaagaacaggttgttcctttgcattaagaaattatggttgtttctggctgggcatagtgactcatgcctgtaatcccaacactttgggaggctgaggcaggtgatcacttgaggtcaggagttcgaaaccagcctggccaacatggtgaaaccctgtatctactaaaaatgcaaaacttagccaggtgtgctggtgggcacttttaatcccagcttctcaggaggctgagacacgataattgcttgaactcaggggggcagaagttgcagtgagctcagatcgtgccactgcacaaccagcctaggcaacagagcaagactctgtgtcagaaaaaaaaaaaa

SEQ ID NO: 243680 - DNA, 359 bp, Homo sapiens
cagatatttgatgcccaaaatgtttggagggcctttctttttcttttttttgagacagagtcttgctctctcacccaggctggaatgtagttgtgtgatcttggctctctgcaacctccatataaacatggcatcttataaaataacaaaatagtatttaaatataggcataagttacaacatggaaagtcagaaaaccatggagagagtttagatgttttgaggtcaggggatcgagaccaacctggcaaacatggcgaaaccctgtctctactaaaaatacatggtcctgaccacatctatgtatttccttacatttctcttgatttgattagaagagtcttttttttttttttttt

SEQ ID NO: 243681 - DNA, 438 bp, Homo sapiens
ccactgcctttggaatctcctatatgtgcccctgaactttctctaggattcctgctgaagatagtgtggcatgtgtcacttgtggactgtcttccgtctttattctgagaggaaatggggcaggagtgtacagcagttaggagcacagactcttgagccagcacaaatggggtcaaatctgagctgagtccaaatattactagctgtgtgaccttgggcaagttgctttacctctctgtgtcccactttccctatctgtaaaacaggaaacataatatagttacccttaagatgaggtcaacaagtgaatcaaataatctatgtaaagcactttgaccagtgcctggtgcctggtcagggttacactagagtttcctacacagaagtcaggaggtgagatgccaagatactcagagggaaaatcaggctgaaaaagta

SEQ ID NO: 243682 - DNA, 217 bp, Homo sapiens
ccactgcctttggaatctcctatatgtgcccctgaactttctctaggattcctgctgaagatagtgtggcatgtgtcacttgtggactgtcttccgtctttattctgagaggaaatggggcaggagtgtacagcagttaggagcacagactcttgagccagcacaaatggggtcaaatctgagctgaggtgcgctcgtgctccacctccccggcgcc

SEQ ID NO: 243683 - DNA, 450 bp, Homo sapiens
tttgtggtttatggtcatgctgaccttagccattaggctgatgccctttgcatttaggtggtttttgatcaaggggaactttacaatggtggtgcttgtgcaagatggccatgcttctgctctgtcaagagagaatcagaaaataagaacctttagtagcctgggtgcagtggtgcacaccagtgcggtggctcatgccaacacgttgggacaccaaggcgagctgattgcttgagcccaggagtttaagaccagcctgggcaacatggcaaaaccctgtctctacaaaaaaatacaaaaattagccaggcaagatggtgtgtgcctgtggtcccagctacccaggaggctgaggtgggaggatcatctgagcctgggtggtcgagggtgcagtgagccatgatcgcaccactgcactcaatggaggtgacagtgaaactttgtctcaaa

SEQ ID NO: 243684 - DNA, 421 bp, Homo sapiens
ttatgtttcatatacaccttatacacatagccttaaggtaattttataaaacattgtaaataattttatgcatgaaacaaagtttgtgtaaagtacttatgtgtggaattttcaacttgtggtgtcatgttggtgctcaaaaagttttgaattttggaacatttcagattttggatctgtggattagggatgctccacctgtactattttacacaacgttgcttgtactatttcaaagcattctgaaagcaaagtcttaatattaataaaaaattttctatgtgacaataaaattaaaatgctgcaggcccaagaaaaaaatattatcatattgaaatatttaatgccccaaatctaatcagatgcaggtttttgaaagtaccatcctattcaaaattatgaaataaagaatttgtttcat

SEQ ID NO: 243685 - DNA, 404 bp, Homo sapiens
acgaagggagtgtgagctgctttagggactggggcccagctcctctccgtacagtgatggacagacagtgtcatagactggagaggaaattctattttctccttagtttaagaaaaaaaaggccgggtgtggtggcttacgcctgtaatctcagcacttttggaggccgaggtgggtggattgcctgaggtcaggatttcaagaccagcctggctaacatagtgaaaccccgtctctactaaaagtacaaacaattagccgggcatggttttgggcacctgtatttccagctactcgggaggctgaggcaggagaatctcttgaactcaggaggcagaggttgcagtgacccgagatcgcaccattgcactccagcctgggcaacagagcgagactccgtctga

SEQ ID NO: 243686 - DNA, 628 bp, Homo sapiens
tctgtttcttgcactctagttataggcacttgctaaatgtttcttgagtggatgaatgaataagtgaatcctggacagattgagatgtatggggtgagtcataatcctggcaaaaccctaattaaacacagtggaaccattgccttatgcacagggcaacctcaggcattctgcgttcatcgtgtctgcagtgttctccaaattctgaagcagagatgtctagatgcttgtttagtgcggagggtcactttctttatattttaaaatcagtaaggtcatacttaacttcgtttgtacatattaatatatccataaatgttggtagttcctttgggtactatgagtgactataatattaactaaactgcatttttagattagaaaattgtgaggggggaccaagcacagtggctcacacctgtaatcccagcactttgggaggccaaggcggatggatcacccgaggtcaggagttcgagaccagcctgatcaacgtggtgaaacccccgtctctactaaacttacagaaattagccgggcatggttgtgcacacctgtaatctcagctactcgggaggctgaagcaggagaatcgcttgaacctgggaggcagaggttgacgtgagcc

SEQ ID NO: 243687 - DNA, 446 bp, Homo sapiens
gctgaattgtgttccccaaaaattcatatgttgaagtcctagccccaatacctcaactctgactgtattggaagacagggcctttagaggtgattaaggaaaatgaggtcatacgggtgaaaccaaatccaacatgactagtgtcttcataagaagaaattgggacacagacatgcacagaagaaagaccatatgaaggcacagggacaagatggccacctacaagccaaaaagggaggcctcagaagaaaccaatcctccccacacgttcatctgagacttccagctccaggactgtgacgataaattcctgctgtttaaaccacacagtctgtggtactttgttatggtcaccctatacacgaatacagccagccaataagattctgttgtagcattataaatgcatcaatcagttctgaaatggttaaagaattatgagcatc

SEQ ID NO: 243688 - DNA, 501 bp, Homo sapiens
ttccattgagccgggacccagccagatctcaaaacaaggagccaggagagacacctcaactatgttctccttcaccccttcagtctgttgccggtgcttgcctttggctgagctctactgaaaaccagaagacaagaaagttcagcttgatgtactggatggtccaaacctggcttctaggctgtggagcaggttggagaaaacgtagggaagattagggtgggagaaggaagctattcagcataaagagagatctccatactcagcatttcactgccttcttacttgaggtccagtttttgcattttcagttgcctacccagcccttcagcttgaatgtcccacatcagattcaagatgtccaaacttcctcaccaagctattaatagctgttttcccagagtcccttgattttatcagtggcatcatagttcttcttacaatcatttggactctggttcattatatctcattatttataaaatctttagttacctaaag

SEQ ID NO: 243689 - DNA, 357 bp, Homo sapiens
atacatatctagacagagatttcctgtcttgcttggtacatggaaatactccaaaggctataatttggaatatgaagattcttgttctgttctttctaccttattaagactcaagatggaatgtcctgtgatatccagaccaacaggagcatgggtattttatttctctgtctgacattttattagacagtggtaacaaatgagctgtggctgcagagtaatgagagtgttttacaggtcaaacacaaaattcagcactatgtatgtggcagcaagcactggacttggaagacctaccgtaacttgtctcgattcttttggttattggttgtatttcagaagttgctcagcataatg

SEQ ID NO: 243690 - DNA, 648 bp, Homo sapiens
gtgagaatttatggtgctttttccgggcctgctcatggaccaatcagcatgcacttcctcccttctgagcccataaaaaccctggattcagccagacttggacagatgtcaatactaccaactgtgggaagaagctacccacttcaggactccttgactcctcaggatgacctgcctacagaaagaagctacccactatgggtcttctctctgctgagagctggatactcgtcaggatgacctgcctgcagaaagagctacccaccatgggtctcctctgaactgttctgttgcccaataaagctcctctcctttttgctcaccctccagctgtctgcatacctcattcttcctggccgcaggacaagaactcgggacccaccgaatggtgggactgaaagaggtgtaacacaaataaggctgaaatgccctgccccgctttccacattgtgggtgacaagaagagaagagctgcagcccttcaggaagcccagacctaggagctccccgagccagagctgtgacaccctgtttggggctctgtgtggttcttggtgtccccaagcttccgggtgccaccgcattctccttgtccagacatgggtgcccgcaatggaagccgcttgcggtacacgtgatctagcctca

SEQ ID NO: 243691 - DNA, 252 bp, Homo sapiens
gcatcacttgagcccagggtttgagactagcctgggcaatgtgtaaaaccccatcaatacaaaaaattacaaaaatacaaaaatcagccaggcatggtggtgtacacttgtagtcccagctactaaggaggctgaggtgggagaatcacttgagcccaggaggtcgaggctgctgtgagcccaggaggtcgaggctgctggatcgcagtgatgtgatcactcactctgggtgaaagagtgagagactgtctc

SEQ ID NO: 243692 - DNA, 407 bp, Homo sapiens
taaaagctgtaaatggttagattcacattgaaaggaatccaggatagtcttattttgcacttttaaaaatatgtatttaatctgccacgatatctgctatctgtagtgttattaaaatgcaggttttcatcattctcagcaaagtaacacaagacgagaaaaccaaacatggcatgttctcactcgtaagtgagagttgaacaatgagaacacatggacacaggaaggggaacatcacacaccggggcctgtgggggggtgggggctggaggagggatagcattaggagaaatacctaatgtaagtgacgagttgatgggtgtagcaaactaacatggcacatgtatacctatgtaacaaacctgcacattgtgcacatgtatcccagaacttaaaaagtataattt

SEQ ID NO: 243693 - DNA, 417 bp, Homo sapiens
aggttttgcacaggctatacatcctgtctggaagtccctggctttacgggccatgtgaagatgttataactctttgcagtttccaagcaggggagtgtgtggtcagatgcggctgttagaaataccagttccaggctgggtgcggtggctcacgcctggaatcccagcgcttcgggaggctgaggcgggccgatcacgaggtcaggagattgagaccatcctggccaacatggtgaaacaccgtctctactaaaaatacaaaaaatagccaggcgtggtggcacatgtctgtaatcccagctactcgggaggctgaggtaggagaatcacttgaacccaggaggcggaggttgcagtgatccgagatcttgccattgcactccagcctgggcgacaagagcgaaactccgtctcaga

SEQ ID NO: 243694 - DNA, 488 bp, Homo sapiens
gtggggcgctctctcccggtgtgggtactgctgtctgtggtgtggctgtgggacccgtgagcaagcagcgacgccagcggcggagaaccgacgaaaggtgtcaccacagtgatggcagtggaggacagcacgctgcaagtagtggtacgggtgcggccccccacccctcgggagctggacagtcagcggcggccagtggttcaggtggtggacgagcgggtgctggtgtttaaccctgaggagcccgatggagggttccctggcctgaaatggggtggcacccatgatggccccaagaagaagggcaaagacctgacgtttgtctttgaccgggtctttggcgaggcggccacccaacaggacgtgttccagcacaccacgcacagcgtcctggacagcttcctccagggctacaactgctcagtgtttgcctacggggccaccggggctgggaagacacacaccatgctgggaagggagggggaccc

SEQ ID NO: 243695 - DNA, 2921 bp, Homo sapiens
cagccagccctgcaccccagagctccctgcagggcctagagcccttcaagaggagagtctggggatggaggcccaggtggagagggccatggaagggaactcttcagaccaggagcagtccccagaggatgaggatgaaggcccagctgaggaggttccaacccagatgccagagcagaaccccacacatgcactgccagagtcccctcgcctgaccctgcagcccaagccagtcgtgggccacttctcagcacgggaactggatggggaccgttctaagcagttggccctaaaggtgctgtgcgttgcccagcggcagtactccctgctccaagcagccaacctcctgacgcccgacatgatcacagagtttgagaccctacagcagctggtgcaagaggaaaaaattgagcctggggcagaggccttgaggacttcaggcctggccaggggggcacctctggctcaggagctgtgttcagagtcaatccctgtgccgtctcctctctgcccagagcctccaggatacactggccctgtgacccggactatggcgaggcgactgagtggccccctgcacaccctgggaatcccgcctggacccaactgcaccccagcccaggggtcccgatggcccatggagaagaagaggaggagaccaagcgccttggaggcagacagtcccatggccccaaagcggggcaccaagcgccagcgccagtccttcctgccctgcctaaggagagggtctctgcctgacacccaaccttcacaggggcccagcacccccaaaggagaaagggcctcctccccctgccattcccctcgcgtttgcccagccacagtcatcaaaagccgggtgcccctgggcccttccgccatgcagaactgctccaccccgctggctctgcccactcgagacctcaatgccacctttgatctctctgaggagcctccctcaaagcccagtttccatgaatgcattggctgggacaaaataccccaggagctgagcaggctggaccagcccttcatccccagggcacctgtgcccctgttcaccatgaagggccccaagccaacatcttccctccctgggacctctgcctgcaagaagaagcgcgttgcgagttcctcagtctcccatggccgcagccgcatcgcccgcctccccagcagcactttgaagaggccagctgggccccttgtactcccaggtgactggcactagggacagggatagcctgggccatggaggccgatgaagacaagaaggaggaggggacggggagctgagacccagaagaaaggagggcctagggtattgccaagcatctcagggatgctgctgatgagacaggtgggaggtgggctggaggacggggacagagcgtcactttccttcctcgctgcactccccgccacccatccaactggcctgcagagctgcccttgagtcccctgtgccctagcaaccggaggaatggaaaggacctcatcagggtggggagagcactctcagcagggaacggcgtcaccaaggtgtcctgaccgccagaatgtcctgaccaccaaggtgtcctaacctaccggcccctctgctggatacccctcttggacctgtagccacctgcaccaggagctggacctgccttccttacctgggagcaattagtgccaacacacctttgctgtattaacatccctccccagacatccatcctgctactcaccctctgttaatctcctgttacactcagcttcttggcatgtacatattcatttgtgagtgttaatgtgctgctgttttttgttttttggtggtttttgttttttgttttttttgttttgagatggagtcttactctgtcgcccaggctggagtgcagtggtacgatcttggctcactgcaacctccgcctcctgggttcaagtaattctcctgcctcagctttccaagtagctgggattacaggcacccatcaccacacccagctaattttcgtctttttaatcagagagggggtttttccatgttggccaggctggtcttgaactcctgacctcaggtgatccgcctgcctcagcttcccaaagtgctgagattacaggcatgagctaccacgcctggcccgtgttgctgttttaaaggtgctgccatgttcccccatctttttttttttggagatggagtctcgctctgtcgcccaggctggagtgcagtggtggcgatcttggctcactgcaagctccgcctcccaggttcacaccattctcctgcctcagcctcccaagtagctgggactacaggcgcccaccaccacgcctggctaattttttgtatttttagtagagatggggtttcaccgtgttagccaggctggtctcgatctgacctcatgatccacccgcctcggcctcccaaagtgctgggattacaggcgtgagccactgcgcccggcctcccctctcatttatgatgccctctgtgcaggcagacggctcttgggctcttttccccacctgtctctaacacaggccccacggtgatggccacaggcagtagaggaggaatgaggatgggttggggagcggggagtcgcggcttggctcttcctggtttctgagagggacatcttcatccctactccccttggtccccaaccacagtcctggtgaagatgtggatgataatggtgccttgatttccaaatgaagacagctttattgcttaactctattgtacataggatacacgttcagtgtaaaataaagtgtaaaggggaattcaggcttaatgctgcacctagatataaatgctaatgatacttgggtttatagccttctgatcctttatttctgcatatatatatagatatatacatatatttttggtataacaataaaccgtctccatcctt

SEQ ID NO: 243696 - DNA, 2694 bp, Homo sapiens
cagccagccctgcaccccagagctccctgcagggcctagagcccttcaagaggagagtctggggatggaggcccaggtggagagggccatggaagggaactcttcagaccaggagcagtccccagaggatgaggatgaaggcccagctgaggaggttccaacccagatgccagagcagaaccccacacatgcactgccagagtcccctcgcctgaccctgcagcccaagccagtcgtgggccacttctcagcacgggaactggatggggaccgttctaagcagttggccctaaaggtgctgtgcgttgcccagcggcagtactccctgctccaagcagccaacctcctgacgcccgacatgatcacagagtttgagaccctacagcagctggtgcaagaggaaaaaattgagcctggggcagaggccttgaggacttcaggcctggccaggggggcacctctggctcaggagctgtgttcagagtcaatccctgtgccgtctcctctctgcccagagcctccaggatacactggccctgtgacccggactatggcgaggcgactgagtggccccctgcacaccctgggaatcccgcctggacccaactgcaccccagcccaggggtcccgatggcccatggagaagaagaggaggagaccaagcgccttggaggcagacagtcccatggccccaaagcggggcaccaagcgccagcgccagtccttcctgccctgcctaaggagagggtctctgcctgacacccaaccttcacaggggcccagcacccccaaaggagaaagggcctcctccccctgccattcccctcgcgtttgcccagccacagtcatcaaaagccgggtgcccctgggcccttccgccatgcagaactgctccaccccgctggctctgcccactcgagacctcaatgccacctttgatctctctgaggagcctccctcaaagcccagtttccatgaatgcattggctgggacaaaataccccaggagctgagcaggctggaccagcccttcatccccagggcacctgtgcccctgttcaccatgaagggccccaagccaacatcttccctccctgggacctctgcctgcaagaagaagcgcgttgcgagttcctcagtctcccatggccgcagccgcatcgcccgcctccccagcagcactttgaagaggccagctgggccccttgtactcccagagctgcccttgagtcccctgtgccctagcaaccggaggaatggaaaggacctcatcagggtggggagagcactctcagcagggaacggcgtcaccaaggtgtcctgaccgccagaatgtcctgaccaccaaggtgtcctaacctaccggcccctctgctggatacccctcttggacctgtagccacctgcaccaggagctggacctgccttccttacctgggagcaattagtgccaacacacctttgctgtattaacatccctccccagacatccatcctgctactcaccctctgttaatctcctgttacactcagcttcttggcatgtacatattcatttgtgagtgttaatgtgctgctgttttttgttttttggtggtttttgttttttgttttttttgttttgagatggagtcttactctgtcgcccaggctggagtgcagtggtacgatcttggctcactgcaacctccgcctcctgggttcaagtaattctcctgcctcagctttccaagtagctgggattacaggcacccatcaccacacccagctaattttcgtctttttaatcagagagggggtttttccatgttggccaggctggtcttgaactcctgacctcaggtgatccgcctgcctcagcttcccaaagtgctgagattacaggcatgagctaccacgcctggcccgtgttgctgttttaaaggtgctgccatgttcccccatctttttttttttggagatggagtctcgctctgtcgcccaggctggagtgcagtggtggcgatcttggctcactgcaagctccgcctcccaggttcacaccattctcctgcctcagcctcccaagtagctgggactacaggcgcccaccaccacgcctggctaattttttgtatttttagtagagatggggtttcaccgtgttagccaggctggtctcgatctgacctcatgatccacccgcctcggcctcccaaagtgctgggattacaggcgtgagccactgcgcccggcctcccctctcatttatgatgccctctgtgcaggcagacggctcttgggctcttttccccacctgtctctaacacaggccccacggtgatggccacaggcagtagaggaggaatgaggatgggttggggagcggggagtcgcggcttggctcttcctggtttctgagagggacatcttcatccctactccccttggtccccaaccacagtcctggtgaagatgtggatgataatggtgccttgatttccaaatgaagacagctttattgcttaactctattgtacataggatacacgttcagtgtaaaataaagtgtaaaggggaattcaggcttaatgctgcacctagatataaatgctaatgatacttgggtttatagccttctgatcctttatttctgcatatatatatagatatatacatatatttttggtataacaataaaccgtctccatcctt

SEQ ID NO: 243697 - DNA, 2594 bp, Homo sapiens
cagccagccctgcaccccagagctccctgcagggcctagagcccttcaagaggagagtctggggatggaggcccaggtggagagggccatggaagggaactcttcagaccaggagcagtccccagaggatgaggatgaaggcccagctgaggaggttccaacccagatgccagagcagaaccccacacatgcactgccagagtcccctcgcctgaccctgcagcccaagccagtcgtgggccacttctcagcacgggaactggatggggaccgttctaagcagttggccctaaaggtgctgtgcgttgcccagcggcagtactccctgctccaagcagccaacctcctgacgcccgacatgatcacagagtttgagaccctacagcagctggtgcaagaggaaaaaattgagcctggggcagaggccttgaggacttcaggcctggccaggggggcacctctggctcaggagctgtgttcagagtcaatccctgtgccgtctcctctctgcccagagcctccaggatacactggccctgtgacccggactatggcgaggcgactgagtggccccctgcacaccctgggaatcccgcctggacccaactgcaccccagcccaggggtcccgatggcccatggagaagaagaggaggagaccaagcgccttggaggcagacagtcccatggccccaaagcggggcaccaagcgccagcgccagtccttcctgccctgcctaaggagagggtctctgcctgacacccaaccttcacaggggcccagcacccccaaaggagaaagggcctcctccccctgccattcccctcgcgtttgcccagccacagtcatcaaaagccgggtgcccctgggcccttccgccatgcagaactgctccaccccgctggctctgcccactcgagacctcaatgccacctttgatctctctgaggagcctccctcaaagcccagtttccatgaatgcattggctgggacaaaataccccaggagctgagcaggctggaccagcccttcatccccagggcacctgtgcccctgttcaccatgaagggccccaagccaacatcttccctccctgggacctctgcctgcaagaagaagcgcgttgcgagttcctcagtctcccatggccgcagccgcatcgcccgcctccccagcagcactttgaagaggccagctgggccccttgtactcccaggtgactggcactagggacagggatagcctgggccatggaggccgatgaagacaagaaggaggaggggacggggagctgagacccagaagaaaggagggcctagggtattgccaagcatctcagggatgctgctgatgagacaggtgggaggtgggctggaggacggggacagagcgtcactttccttcctcgctgcactccccgccacccatccaactggcctgcagagctgcccttgagtcccctgtgccctagcaaccggaggaatggaaaggacctcatcagggtggggagagcactctcagcagggaacggcgtcaccaaggtgtcctgaccgccagaatgtcctgaccaccaaggtgtcctaacctaccggcccctctgctggatacccctcttggacctgtagccacctgcaccaggagctggacctgccttccttacctgggagcaattagtgccaacacacctttgctgtattaacatccctccccagacatccatcctgctactcaccctctgttaatctcctgttacactcagcttcccaaagtgctgagattacaggcatgagctaccacgcctggcccgtgttgctgttttaaaggtgctgccatgttcccccatctttttttttttggagatggagtctcgctctgtcgcccaggctggagtgcagtggtggcgatcttggctcactgcaagctccgcctcccaggttcacaccattctcctgcctcagcctcccaagtagctgggactacaggcgcccaccaccacgcctggctaattttttgtatttttagtagagatggggtttcaccgtgttagccaggctggtctcgatctgacctcatgatccacccgcctcggcctcccaaagtgctgggattacaggcgtgagccactgcgcccggcctcccctctcatttatgatgccctctgtgcaggcagacggctcttgggctcttttccccacctgtctctaacacaggccccacggtgatggccacaggcagtagaggaggaatgaggatgggttggggagcggggagtcgcggcttggctcttcctggtttctgagagggacatcttcatccctactccccttggtccccaaccacagtcctggtgaagatgtggatgataatggtgccttgatttccaaatgaagacagctttattgcttaactctattgtacataggatacacgttcagtgtaaaataaagtgtaaaggggaattcaggcttaatgctgcacctagatataaatgctaatgatacttgggtttatagccttctgatcctttatttctgcatatatatatagatatatacatatatttttggtataacaataaaccgtctccatcctt

SEQ ID NO: 243698 - DNA, 2637 bp, Homo sapiens
cagccagccctgcaccccagagctccctgcagggcctagagcccttcaagaggagagtctggggatggaggcccaggtggagagggccatggaagggaactcttcagaccaggagcagtccccagaggatgaggatgaaggcccagctgaggaggttccaacccagatgccagagcagaaccccacacatgcactgccagagtcccctcgcctgaccctgcagcccaagccagtcgtgggccacttctcagcacgggaactggatggggaccgttctaagcagttggccctaaaggtgctgtgcgttgcccagcggcagtactccctgctccaagcagccaacctcctgacgcccgacatgatcacagagtttgagaccctacagcagctggtgcaagaggaaaaaattgagcctggggcagaggccttgaggacttcaggcctggccaggggggcacctctggctcaggagctgtgttcagagtcaatccctgtgccgtctcctctctgcccagagcctccaggatacactggccctgtgacccggactatggcgaggcgactgagtggccccctgcacaccctgggaatcccgcctggacccaactgcaccccagcccaggggtcccgatggcccatggagaagaagaggaggagaccaagcgccttggaggcagacagtcccatggccccaaagcggggcaccaagcgccagcgccagtccttcctgccctgcctaaggagagggtctctgcctgacacccaaccttcacaggggcccagcacccccaaaggagaaagggcctcctccccctgccattcccctcgcgtttgcccagccacagtcatcaaaagccgggtgcccctgggcccttccgccatgcagaactgctccaccccgctggctctgcccactcgagacctcaatgccacctttgatctctctgaggagcctccctcaaagcccagtttccatgaatgcattggctgggacaaaataccccaggactgagacccagaagaaaggagggcctagggtattgccaagcatctcagggatgctgctgatgagacaggtgggaggtgggctggaggacggggacagagcgtcactttccttcctcgctgcactccccgccacccatccaactggcctgcagagctgcccttgagtcccctgtgccctagcaaccggaggaatggaaaggacctcatcagggtggggagagcactctcagcagggaacggcgtcaccaaggtgtcctgaccgccagaatgtcctgaccaccaaggtgtcctaacctaccggcccctctgctggatacccctcttggacctgtagccacctgcaccaggagctggacctgccttccttacctgggagcaattagtgccaacacacctttgctgtattaacatccctccccagacatccatcctgctactcaccctctgttaatctcctgttacactcagcttcttggcatgtacatattcatttgtgagtgttaatgtgctgctgttttttgttttttggtggtttttgttttttgttttttttgttttgagatggagtcttactctgtcgcccaggctggagtgcagtggtacgatcttggctcactgcaacctccgcctcctgggttcaagtaattctcctgcctcagctttccaagtagctgggattacaggcacccatcaccacacccagctaattttcgtctttttaatcagagagggggtttttccatgttggccaggctggtcttgaactcctgacctcaggtgatccgcctgcctcagcttcccaaagtgctgagattacaggcatgagctaccacgcctggcccgtgttgctgttttaaaggtgctgccatgttcccccatctttttttttttggagatggagtctcgctctgtcgcccaggctggagtgcagtggtggcgatcttggctcactgcaagctccgcctcccaggttcacaccattctcctgcctcagcctcccaagtagctgggactacaggcgcccaccaccacgcctggctaattttttgtatttttagtagagatggggtttcaccgtgttagccaggctggtctcgatctgacctcatgatccacccgcctcggcctcccaaagtgctgggattacaggcgtgagccactgcgcccggcctcccctctcatttatgatgccctctgtgcaggcagacggctcttgggctcttttccccacctgtctctaacacaggccccacggtgatggccacaggcagtagaggaggaatgaggatgggttggggagcggggagtcgcggcttggctcttcctggtttctgagagggacatcttcatccctactccccttggtccccaaccacagtcctggtgaagatgtggatgataatggtgccttgatttccaaatgaagacagctttattgcttaactctattgtacataggatacacgttcagtgtaaaataaagtgtaaaggggaattcaggcttaatgctgcacctagatataaatgctaatgatacttgggtttatagccttctgatcctttatttctgcatatatatatagatatatacatatatttttggtataacaataaaccgtctccatcctt

SEQ ID NO: 243699 - DNA, 2048 bp, Homo sapiens
gtggggcgctctctcccggtgtgggtactgctgtctgtggtgtggctgtgggacccgtgagcaagcagcgacgccagcggcggagaaccgacgaaaggtgtcaccacagtgatggcagtggaggacagcacgctgcaagtagtggtacgggtgcggccccccacccctcgggagctggacagtcagcggcggccagtggttcaggtggtggacgagcgggtgctggtgtttaaccctgaggagcccgatggagggttccctggcctgaaatggggtggcacccatgatcgcccgcctccccagcagcactttgaagaggccagctgggccccttgtactcccaggtgactggcactagggacagggatagcctgggccatggaggccgatgaagacaagaaggaggaggggacggggagctgagacccagaagaaaggagggcctagggtattgccaagcatctcagggatgctgctgatgagacaggtgggaggtgggctggaggacggggacagagcgtcactttccttcctcgctgcactccccgccacccatccaactggcctgcagagctgcccttgagtcccctgtgccctagcaaccggaggaatggaaaggacctcatcagggtggggagagcactctcagcagggaacggcgtcaccaaggtgtcctgaccgccagaatgtcctgaccaccaaggtgtcctaacctaccggcccctctgctggatacccctcttggacctgtagccacctgcaccaggagctggacctgccttccttacctgggagcaattagtgccaacacacctttgctgtattaacatccctccccagacatccatcctgctactcaccctctgttaatctcctgttacactcagcttcttggcatgtacatattcatttgtgagtgttaatgtgctgctgttttttgttttttggtggtttttgttttttgttttttttgttttgagatggagtcttactctgtcgcccaggctggagtgcagtggtacgatcttggctcactgcaacctccgcctcctgggttcaagtaattctcctgcctcagctttccaagtagctgggattacaggcacccatcaccacacccagctaattttcgtctttttaatcagagagggggtttttccatgttggccaggctggtcttgaactcctgacctcaggtgatccgcctgcctcagcttcccaaagtgctgagattacaggcatgagctaccacgcctggcccgtgttgctgttttaaaggtgctgccatgttcccccatctttttttttttggagatggagtctcgctctgtcgcccaggctggagtgcagtggtggcgatcttggctcactgcaagctccgcctcccaggttcacaccattctcctgcctcagcctcccaagtagctgggactacaggcgcccaccaccacgcctggctaattttttgtatttttagtagagatggggtttcaccgtgttagccaggctggtctcgatctgacctcatgatccacccgcctcggcctcccaaagtgctgggattacaggcgtgagccactgcgcccggcctcccctctcatttatgatgccctctgtgcaggcagacggctcttgggctcttttccccacctgtctctaacacaggccccacggtgatggccacaggcagtagaggaggaatgaggatgggttggggagcggggagtcgcggcttggctcttcctggtttctgagagggacatcttcatccctactccccttggtccccaaccacagtcctggtgaagatgtggatgataatggtgccttgatttccaaatgaagacagctttattgcttaactctattgtacataggatacacgttcagtgtaaaataaagtgtaaaggggaattcaggcttaatgctgcacctagatataaatgctaatgatacttgggtttatagccttctgatcctttatttctgcatatatatatagatatatacatatatttttggtataacaataaaccgtctccatcctt

SEQ ID NO: 243700 - DNA, 3219 bp, Homo sapiens
cagccagccctgcaccccagagctccctgcagggcctagagcccttcaagaggagagtctggggatggaggcccaggtggagagggccatggaagggaactcttcagaccaggagcagtccccagaggatgaggatgaaggcccagctgaggaggttccaacccagatgccagagcagaaccccacacatgcactgccagagtcccctcgcctgaccctgcagcccaagccagtcgtgggccacttctcagcacgggaactggatggggaccgttctaagcagttggccctaaaggtgctgtgcgttgcccagcggcagtactccctgctccaagcagccaacctcctgacgcccgacatgatcacagagtttgagaccctacagcagctggtgcaagaggaaaaaattgagcctggggcagaggccttgaggacttcaggcctggccaggggggcacctctggctcaggagctgtgttcagagtcaatccctgtgccgtctcctctctgcccagagcctccaggatacactggccctgtgacccggactatggcgaggcgactgagtggccccctgcacaccctgggaatcccgcctggacccaactgcaccccagcccaggggtcccgatggcccatggagaagaagaggaggagaccaagcgccttggaggcagacagtcccatggccccaaagcggggcaccaagcgccagcgccagtccttcctgccctgcctaaggagagggtctctgcctgacacccaaccttcacaggggcccagcacccccaaaggagaaagggcctcctccccctgccattcccctcgcgtttgcccagccacagtcatcaaaagccgggtgcccctgggcccttccgccatgcagaactgctccaccccgctggctctgcccactcgagacctcaatgccacctttgatctctctgaggagcctccctcaaagcccagtttccatgaatgcattggctgggacaaaataccccaggagctgagcaggctggaccagcccttcatccccagggcacctgtgcccctgttcaccatgaagggccccaagccaacatcttccctccctgggacctctgcctgcaagaagaagcgcgttgcgagttcctcagtctcccatggccgcagccgcatcgcccgcctccccagcagcactttgaagaggccagctgggccccttgtactcccaggtgactggcactagggacagggatagcctgggccatggaggccgatgaagacaagaaggaggaggggacggggagctgagacccagaagaaaggagggcctagggtattgccaagcatctcagggatgctgctgatgagacaggtgggaggtgggctggaggacggggacagagcgtcactttccttcctcgctgcactccccgccacccatccaactggcctgcagagctgcccttgagtcccctgtgccctagcaaccggaggaatggaaaggacctcatcagggtggggagagcactctcagcagggaacggcgtcaccaaggtgtcctgaccgccagaatgtcctgaccaccaaggtgtcctaacctaccggcccctctgctggatacccctcttggacctgtagccacctgcaccaggagctggacctgccttccttacctgggagcaattagtgccaacacacctttgctgtattaacatccctccccagacatccatcctgctactcaccctctgttaatctcctgttacactcagcttcttggcatgtacatattcatttgtgagtgttaatgtgctgctgttttttgttttttggtggtttttgttttttgttttttttgttttgagatggagtcttactctgtcgcccaggctggagtgcagtggtacgatcttggctcactgcaacctccgcctcctgggttcaagtaattctcctgcctcagctttccaagtagctgggattacaggcacccatcaccacacccagctaattttcgtctttttaatcagagagggggtttttccatgttggccaggctggtcttgaactcctgacctcaggtgatccgcctgcctcagcttcccaaagtgctgagattacaggcatgagctaccacgcctggcccgtgttgctgttttaaaggtgctgccatgttcccccatctttttttttttggagatggagtctcgctctgtcgcccaggctggagtgcagtggtggcgatcttggctcactgcaagctccgcctcccaggttcacaccattctcctgcctcagcctcccaagtagctgggactacaggcgcccaccaccacgcctggctaattttttgtatttttagtagagatggggtttcaccgtgttagccaggctggtctcgatctgacctcatgatccacccgcctcggcctcccaaagtgctgggattacaggcgtgagccactgcgcccggcctcccctctcatttatgatgccctctgtgcaggcagacggctcttgggctcttttccccacctgtctctaacacaggccccacggtgatggccacaggcagtagaggaggaatgaggatgggttggggagcggggagtcgcggcttggctcttcctggtttctgagagggacatcttcatccctactccccttggtccccaaccacagtcctggtgaagatgtggatgataatggtgccttgatttccaaatgaagacagctttattgcttaactctattgtacataggatacacgttcagtgtaaaataaagtgtaaaggggaattcaggcttaatgctgcacctagatataaatgctaatgatacttgggtttatagccttctgatcctttatttctgcatatatatatagatatatacatatatttttggtataacaataaaccgtctccatccttggtgtgtgtgtctctctgtacacctagataggatagcaacaccttccctttctcaccttgctactcttaagacctcaggaaacttctgagtatatacagaaaacagttctcactctgcctcctcctggagcctgaggtctgagcccggctcttcacttcacagcccaatacgccctaaagggcctcctcttctccgtgggtttgggagtaattgcacctggaggtctgttccacccttctacggccttggcggtgggttgctaggagttctgccttcttagtggcccccaggtcttag

SEQ ID NO: 243701 - DNA, 2069 bp, Homo sapiens
cagccagccctgcaccccagagctccctgcagggcctagagcccttcaagaggagagtctggggatggaggcccaggtggagagggccatggaagggaactcttcagaccaggagcagtccccagaggatgaggatgaaggcccagctgaggaggttccaacccagatgccagagcagaaccccacacatgcactgccagagtcccctcgcctgaccctgcagcccaagccagtcgtgggccacttctcagcacgggaactggatggggaccgttctaagcagttggccctaaaggtgctgtgcgttgcccagcggcagtactccctgctccaagcagccaacctcctgacgcccgacatgatcacagagtttgagaccctacagcagctggtgcaagaggaaaaaattgagcctggggcagaggccttgaggacttcaggcctggccaggggggcacctctggctcaggagctgtgttcagagtcaatccctgtgccgtctcctctctgcccagagcctccaggatacactggccctgtgacccggactatggcgaggcgactgagtggccccctgcacaccctgggaatcccgcctggacccaactgcaccccagcccaggggtcccgatggcccatggagaagaagaggaggagaccaagcgccttggaggcagacagtcccatggccccaaagcggggcaccaagcgccagcgccagtccttcctgccctgcctaaggagagggtctctgcctgacacccaaccttcacaggggcccagcacccccaaaggagaaagggcctcctccccctgccattcccctcgcgtttgcccagccacagtcatcaaaagccgggtgcccctgggcccttccgccatgcagaactgctccaccccgctggctctgcccactcgagacctcaatgccacctttgatctctctgaggagcctccctcaaagcccagtttccatgaatgcattggctgggacaaaataccccaggagctgagcaggctggaccagcccttcatccccagggcacctgtgcccctgttcaccatgaagggccccaagccaacatcttccctccctgggacctctgcctgcaagaagaagcgcgttgcgagttcctcagtctcccatggccgcagccgcatcgcccgcctccccagcagcactttgaagaggccagctgggccccttgtactcccaggtgactggcactagggacagggatagcctgggccatggaggccgatgaagacaagaaggaggaggggacggggagctgagacccagaagaaaggagggcctagggtattgccaagcatctcagggatgctgctgatgagacaggtgggaggtgggctggaggacggggacagagcgtcactttccttcctcgctgcactccccgccacccatccaactggcctgcagagctgcccttgagtcccctgtgccctagcaaccggaggaatggaaaggacctcatcagggtggggagagcactctcagcagggaacggcgtcaccaaggtgtcctgaccgccagaatgtcctgaccaccaaggtgtcctaacctaccggcccctctgctggatacccctcttggacctgtagccacctgcaccaggagctggacctgccttccttacctgggagcaattagtgccaacacacgccccacggtgatggccacaggcagtagaggaggaatgaggatgggttggggagcggggagtcgcggcttggctcttcctggtttctgagagggacatcttcatccctactccccttggtccccaaccacagtcctggtgaagatgtggatgataatggtgccttgatttccaaatgaagacagctttattgcttaactctattgtacataggatacacgttcagtgtaaaataaagtgtaaaggggaattcaggcttaatgctgcacctagatataaatgctaatgatacttgggtttatagccttctgatcctttatttctgcatatatatatagatatatacatatatttttggtataacaataaaccgtctccatcctt

SEQ ID NO: 243702 - DNA, 386 bp, Homo sapiens
cagtctgatatggttttgatatttgtcccttccagatctcatgttgaagtgtaatctccattgctggaggtgaggccttgtgggaggtattggatgatgggggcagatctttcatgaatggtttagcaccatccccttggcaatgagtgagttcttattctgagttcatgggagatatggttgtttagaagactgtggcacctttccctcaaaccctgctctcgtttactctctcactgtatgatgtgctggctcgcccttgtccttccactgtgatagtaagcttcctgaggccctcaccagcagcagatgctggcactatgctttgtgtacagcctgaagaactgtaagccaaaataaaacctcttttgtttataaattaccca

SEQ ID NO: 243703 - DNA, 463 bp, Homo sapiens
acattttttcctatggaaaaccagaagattgaaagcagcccaggtgaacgatacttatccttgagttttacaagactaggagggactaaaggagatgtgaggttgctttattctgtactttacattcctgctggagctgtggaccccttgcaagcaaaagaaggcatcttaaatatatcaaggagaaatgacctcatttttccagagcaaaaaactcaagtcactacaaaattaccaataagaaatgatgcattccttcaaaatggagctcactttctagtacagttggaaactgtggagttgttaaacataattcctctaatcccacccataagccctagatttggggaaatctgcaatatttctttactggttactccagccattgcaaatggagaaattggctttctcagcaatcttccaattattttgcatgaaccagaagattttgctgctgaagtgg

SEQ ID NO: 243704 - DNA, 716 bp, Homo sapiens
atttttgccaccaaacacttatgttcacaccatttttaaagcagttttaaatccttgggcaattggtcaaatgcttcttctggctattttcttgttctgaaagtcagaagtttgaagagggttttagggattcgaattaaggtgtcagcagacctgtgcttctctggaaggctctacgggagagatttaccttctccagcttccagtggctggctgcccacacaccttggctcgtggccacctcctcacgtcagtccagcctctgccaccatcgtcaactctcccactatgactgagaccttctgcctgtctcagcacatgagtttcaggctctctaccgttcatgcccatgacaccaggagcagcaccctggagcagacacagccagaccacaaacccagctcaaggttaatcactgctgcccgtcaatgtgattatctccctctgcatggcagtgccattttcccactgtgggaccagagtatgtgctgtcatacacaacagtaaacactggatgctgttaattcatggctgcctggcgtgctcgcacacacacacacacacacacacacacacacacacacagacacacacacaggcatcaatgcctttctttgtaaaatacaatttaaatttattccttattctaatacaaaaaagttacatataatcaaagccacacctacttcaaaaacacagccagccaatggaggtat

SEQ ID NO: 243705 - DNA, 517 bp, Homo sapiens
cttgaacctgggaagtcgaggctgaagtgagccgagctgtgccatgattgtaccactgcaatccagcctgggtgacaaagcaaaaccctgttcaaaaaaaaaaaaaagtaagaatgttgaagtatatttattttcatggaaagttactcacaacatatggctatgcagaagaggatgatatatctgtatgatctcattcttttaggaaatatgtaacacacaaaagaatgtcaacaagactatgtattgacagtttttaaagtggttgtctgtaagtgatggaattgctggtgaattttattagtttcctttgcccatttgtattttctcattttctacagtaaatatttatggtttgtgaaattttaaattttttaccaaaaaaaaaaaaaaaaagaccgagcatgatggctcccagctgtaattccagcactttgggaggccaaggcaggaggattgcttgagcccaggagtttgagaccagcctagacaacatagggagaccccatctctataa

SEQ ID NO: 243706 - DNA, 780 bp, Homo sapiens
gttcccattgtccaagccagggacagtttgagcataaaaataagaatgatagtaatggatgataactcattgaataaattaagaatctgtataggtccagactgatacatatgaagaaataaataaatgaataaataatagaagagcagagaaggctctttgtcatagtattctaactataaatatacaaatagtgataaaattaaattattagtgggctttaaaagtagtaggtggaaagtttgataaaaagaagtatatttacatgtctctgaatatcttaccaaattgcttattgatatcagaggaaaatagtaattcaataatgagaaaacttgtaacacacctctttaggccaagtcattaaacctaacaccactaatattgggacagctcacgtcatgtgcatcctaataagatgatctgaaaaagacaaacatcgcttcagtgataatgcttccaaaaacgtataacccgaacgtaatcatgaggagacatcagacaaatcaatagacattttacagcttggttggtattttttaaaaagtcaaggtcaagaaacactaatcatgctccttagattagatctgggcctggggggaaaataactacaaaggacgtgattgggacaattgacaaaatttattgggactgtggatcagactgtgtaactattaaattttccgatttttgagattgtcctagattttggaaagtgcaatgaaagggtaaggggacaccgtgtcttcaatttactcttaaatggtacagaaaaaaaaa

SEQ ID NO: 243707 - DNA, 328 bp, Homo sapiens
gtttacacatttttatctaattttttaattatactttaagttctgagatacacatgtatacatatgtaactaacctgcacattgtgcacatgtaccctaaaatttaagtataataataatttaaaaaaagagcagagagacattgaataatggggaaaaggagccccaaagcctgattaatgatgatgtatgtgatgtttacccaaaataaaaagtccaaggtgaacttaccacaaatgaataataaacacgaagacaatcaccttgcctacaaaacaataatcctgagtacataaataataaaacagcttttggatatttcaactaa

SEQ ID NO: 243708 - DNA, 444 bp, Homo sapiens
cgcgctgccagtgtccgggaactgggtttgcgaatcctgggagccgcgttcctgagtcttctccgctctctgccctcaaaacctcatttgtaggactgacctccggctccaccctccccacgggcgagttaaaactgttcccccgccgtgggaaactgccgaatgaccgtggaataaaggatttcccatcaggctttgtagccatttccaactccaatgacatgaagaagtgttcaccatctttaaggagagaaggaggatgaatgcagtcgcttgtctaaagctaaccaaacggaccaaagcctccgttcatgggtgtcccgcttggtgcccttaaccctgatgctcttaacctgggcatgataaggaaaattgcagtttttccattttcgattttcagaagttcaaactaaaattttgtgttactttgttacgtttgagcca

SEQ ID NO: 243709 - DNA, 426 bp, Homo sapiens
ctagggtggggtcttgacaaagtagctgattcaggaacatctgtggatgtgcacgtggacattgtcaatcatctctgtctacctatttgccttcttcctcagcctgttctctgtcttctatctaaaagtgcactatcaattttcagagagatgctagaacccttgttcattttcttatatggcaacttttctctgtatagtttcatgaaacctccatacatgaagtttgcagtgagaggcaaaaaactgagtcgtgatcatggtgtttttagccccagttagagggttaggtgagttgaagttgtcagcccagggaactttacaagtgaggacagcttttaaacatcactgccgacattatcatcatcagcaacaactaataacaacttctttaaatttaaaaaaacctttgccttcttgcctagg

SEQ ID NO: 243710 - DNA, 570 bp, Homo sapiens
  misc_feature (11)..(11): n is a, c, g, or t
  misc_feature (51)..(52): n is a, c, g, or t
  misc_feature (71)..(71): n is a, c, g, or t
  misc_feature (79)..(79): n is a, c, g, or t
  misc_feature (91)..(91): n is a, c, g, or t
  misc_feature (104)..(104): n is a, c, g, or t
  misc_feature (118)..(118): n is a, c, g, or t
tttggggcccnccctttgggggggggttttggaatttaattgcccggcctnnctttttttaggggaagggnttcctccnaggggaaacccntttgccccccttnttctttaagggggnataaaatttgaagaatgtgggtaagtcatgtgcctacctgaaggaagagtaatttagacaaaagaaccagcaaatgcaaagaccctgaggtagaaatgtgtttggtgggttcaaggagcctggagcaaagtgacaggggaagaatggcaaggggcgagagagagagagagaggagggtagggtcgcatcacaggacctcagaggtccttatggggatttgggcttttaccctgggtgatttgggacccactggaaggttctgagcagaggagtgacatgatcagaattacatgtgaaaagaatctctactgtgttgagaatagcttaaggtagacacgtgtggaaacagatgtgaaggaagcagaggaggagacatgagagatggtggtagtttgttccaaagtgttgctgatgggaacagagagaagtggtcagaccctggatacatattg

SEQ ID NO: 243711 - DNA, 807 bp, Homo sapiens
ttctgagatggaattttgcttgtcgcccaggctggagtgcaatggaccatcttggctcagtgcaacctccgcctcctgggttcaagcaattctcctacctaagcctcctgagtagctgggaacaggaggatcgattgagccgaaggtcgaggctgcagtgagccatgattgcactgctgtgctccagcatgggcgattctgtcaaaaaaaaaaaaaaaaagaaagaaagaaaaaaagaaatacatgaagtggccgtaagtgctatgaagaaaatgaggcagcataggaggatagaataatgacggctgctatttagggagggtactcagggaagccttgccccctctcttaagagataaaatttgaagaatgtgggtaagtcatgtgcctacctgaaggaagagtaatttagacaaaagaaccagcaaatgcaaagaccctgaggtagaaatgtgtttggtgggttcaaggagcctggagcaaagtgacaggggaagaatggcaaggggcgagagagagagagagaggagggtagggtcgcatcacaggacctcagaggtccttatggggatttgggcttttaccctgggtgatttgggacccactggaaggttctgagcagaggagtgacatgatcagaattacatgtgaaaagaatctctactgtgttgagaatagcttaaggtagacacgtgtggaaacagatgtgaaggaagcagaggaggagacatgagagatggtggtagtttgttccaaagtgttgctgatgggaacagagagaagtggtcagaccctggatacatattg

SEQ ID NO: 243712 - DNA, 504 bp, Homo sapiens
acagaaaaccaaacactgcatgtcctcactcgtaagtgggagttgaacaatgagaacacatggacccagggaggggaacatcacacaccggggcctgtcgaggagggatagcattaggtcaaataccgaatgcatgtggggcttaaaacccagatgacaggttgatgggtgcagcaaaccaccatggcacatgtatacctatgtaacaaacccgcatgctctgcacatgtatcccagaactgacattaaaaaagagaaaagatatggccacaataatccagttgtcttttccctctgaagcaaaagtcccagagagagagttagcctgtgtgcccacttcaggaatcccagcatgtccagctagagtccccatggggtctagcttcatgtcgtcttgggagaggggaccccagcactgggaagatcatcaaaagacactggctgattgctgttgggaatagaagagccattaaagaaaatgaactgagaatgtgtgcttaatta

SEQ ID NO: 243713 - DNA, 470 bp, Homo sapiens
ccgctagtaccatacaggtaatatacatatgatgaaaggaggaaaaagaaaaacagacagaggaaggaaagaaagaagaaggggaggaagaacacaggaaggaaaaaagcagaccctgtcattcttttcaaaagacttaaccatagccatttacctaaaaagaatattaattacttctattgtataaataaaaaaaactaaaagacaactgaaggtggcctgaattttttcattgtgtaaaaattaatgggactgtatcattagatgacccacaggaagaaggtatcatacacctattcacagcgagtaagatgtcagaacatcttacttacagatggctattgtgttttctatcaatagccaatttctggaatttaaatttaatacattttaagaacgatatcctgagacttacattatcaatgatcacactttccttatcttgaactaggataataaaaatacgtaaa

SEQ ID NO: 243714 - DNA, 439 bp, Homo sapiens
catttaatggacaaggtgggaaagtgcccaaagtatcaggaaggtacatacttatatgtagattcatgagcattcttttaataatctttcctaaacagttactgtgtgcaaaccactgttgtgagagcactattgagagattttggattaaatgtccatcataagagtgcactagagacaaagcagactattatagatgatgaaactgtcccagaggccaaacacagcagtgataggaaacttcaactgtgtttttatttacctggaccacatttgtaaatgaccatggcaggccctcaataaatgctgaccacttggaggagccctaagcgttaggatctgctgcgagggctgcctggaacggaggtgagaggatacaagtggcccggggcaagcatagtgaatcactggctaatctggccttcgaggtagtgaaagg

SEQ ID NO: 243715 - DNA, 450 bp, Homo sapiens
gccaaaaggaaccacctgttttctggggctgtggcctgcagccttaggaacagtgctttgctctgggggaagctaaaagttgcaatggggctaagctaagagcagcaactccatggctcagcctcctgagccttgtgctctatttgatgagataatccacagctgcctggtgcaaagtcaagaaccggagaagagaaacagagattgctgaccttctccgtgggccaccagagtccagcctgcatgtgcaggctctccctccagcacacaggttgctcctgcagggctcagccccagcaacgctgagagggtgaaactggccacctacctctccctctgattcccaccctggatgccctgtgtcccaggacccctgtaacattctcccaccctaagtaatcatctctggaccttgccacctgatcatgccattaaattcccctaatgcca

SEQ ID NO: 243716 - DNA, 466 bp, Homo sapiens
ttggactcccagagctgctctcctgttttttctccgcagtactcagcctggagagcattcttagtctgtttggagaatattaactcctccctgtcctcattactttttttttgaccctagcttgactcctttaaattgagcttgcaaagttttaaaatttaaaatacaggccctgtgttggctgtcacagtatctggattgtagcaaagtcagttgcgggaatgcccattgaaagatttcagagtgtattatgtagagtcagtcatattgaactatacagttgtacaattagtcacccagaaattccaatactatgtttttctcagtttgcaagtagaagttgattatgagtatctacttttgtacttccaagtttgggcatttaggaatgtagttaactagtgtttctaagaagaaatttattttcaagtaccatatagcttgatttttaaaaaagtgtgtatat

SEQ ID NO: 243717 - DNA, 655 bp, Homo sapiens
  misc_feature (416)..(416): n is a, c, g, or t
  misc_feature (427)..(427): n is a, c, g, or t
  misc_feature (436)..(437): n is a, c, g, or t
  misc_feature (442)..(442): n is a, c, g, or t
  misc_feature (445)..(445): n is a, c, g, or t
  misc_feature (471)..(471): n is a, c, g, or t
  misc_feature (478)..(478): n is a, c, g, or t
  misc_feature (490)..(490): n is a, c, g, or t
tgagacagagtctcactctgtcacctaggctggagtgcagtggtaccatcacagctcactatgacctggacctcctgggctcaaatgctcccaccttggcctcccaaagtgctgggattacaggtgtgagccaccatgactggcccagaatcacttttgatttgaggtctttatataataatgacggttaatcttttgttatactgtttttttgtttgtggatcttttggatcttgggaatggggttttgggttttttggggttttttggtatagaaaagttcagacattctttctcatcaaatttcttttctttgtaacttcaacaagaaagtctcctccatcaggagttttgttaaatgttctcttttcttgtgactttcaaaaatattaaactttctaaattcttcaaaaaanaaaaaaaaaanaaaaaaaannaaaanaanaaaaaaaaaaaaaaaaaaaaaaaaanaaaaaanaaaaaaaaaaanaaaaaattgggcaggtttttgctggggccccgaatttgagccccttggccaattcgccctaaaggagggggtataaaaatacaggggcgggttttaacacgggggaggggaaaacccgggggtaccccattaaaccctggaaaaacacccctttgcgaggggggg

SEQ ID NO: 243718 - DNA, 259 bp, Homo sapiens
gatgtaggtgggagataaggagattgtcacaatgaaaaaaggaattcgttgaataggagagaatttttaaaataatttattttgtctaactccaaaataaatatacgctgaatgtagaaaatgcagataactcagagaagcacaaagaaaaaaggtctaaaatcctactacctaaaattaccattgttaatatattatcgtatgccctttcaggaagcaaatattgtttattataaaaataaataaaatttattacaaa

SEQ ID NO: 243719 - DNA, 447 bp, Homo sapiens
cgcccagcacacacgctccttcactcccaggtcagcatcctggggcctccgtgtccttgtctggaccatgggtgtaaagaagccacatttcatcacaacgaagccagcaccgatgtcagctgcacaatgttttgtcctgttatggtcttaatgttggtgtccccaacatatgttgaaatcccaattcctaagttgatgggtttaggagatggcgcctttgtgggggtgattcagtcacgagggtggaggcttcatgagtgggattagtgccgtcataacagaggctctcacgagacccccgtccctttcaccgcgtgaggacacagtgggaagacggccatccataagccggaaaacgagcccttcccggacacccaatctgccttgatcttggacttcccatcctccaaaactgcgacaaataaatttctactgttcataagccac

SEQ ID NO: 243720 - DNA, 123 bp, Homo sapiens
tgctcaatcggttattttaagctcaaagtccctttgtcaaataactgaatctttgccagtaagacaggtgataatatctcaaggtgattttaatttatattttcatattaaaatacttttttt

SEQ ID NO: 243721 - DNA, 327 bp, Homo sapiens
gcactccagcctggatgccagagtgaaactctgtctccaaaaaaaaaaaaaaaaaaaaaaaagccaacagcaaaaaattacagactcaatgttcccatttatataacaactgtgaaacaacataattatagagatgaagaatagctgagtggctgacagagtgcgagatggggtagcgtggctatacaggagcagcacaagggagtcctgtgatggtgtggttaactagcttgattgtggtggatttacacaaaaccaggcacacacaaaggagtgcatgtataactggtgaaattccgataaactctagggttataccaatgtcag

SEQ ID NO: 243722 - DNA, 371 bp, Homo sapiens
atccagtttctgtgtggcttagctgggcccccagctcaggccctctgaagggctgtatttagggtgatagaaagaggtgtggcttagagattggaatacctgggttcattctttcaatacacacttgtaagccctcattgcataccaggcactggtctagaccctgcaacagaaaacagtctcccgaggcttgttgggcttctatgctagttgtaagcataccccacactggggatgatggcgcccttcctccctccagggccatgatggtgactgactatatgataataatactagaatgatgatgatgatgacagaagcaacaattccctttcatttataaagtggaatataattaagagtctttaaaa

SEQ ID NO: 243723 - DNA, 456 bp, Homo sapiens
acctatcagactaattatttctaaatcctaccacctattcagggaactgccctggaaagccagcttgtctccactgataaatgacaaagacaattgcttcagaattgattttcttcaatgccttgatggacactgaattttggcatttggtctggatgtcaaagtttgttatattttcctcagaacactgaatggtcatgaatgaagaactgagttaaaattacaaattagtaaattctataatccggcatacacaaaaaaagcacaaggggaatagatgaaacaagtctggcaaattgtggagaatgttgaagttggcatgagaacttatgagaactcatgatatataccagatatatttattatataccaccatatgatggatatatgtggattcattgtaccattctctttacttctgggtatgttcaaattttaccataataaaaagttaaa

SEQ ID NO: 243724 - DNA, 579 bp, Homo sapiens
tggccaggtgtttaccagttttactgattcttttcaaagataatcaggttttggtttcactaattttctctaaacagtttttttgttttttatctcattgatttctcttctttttatttctttccttctgtttgctttggatttaatatactcttctcctattttctttaagtgaacgtttgaattactgacttaagaactttcttcttttccaatacaagtatttgatgctataaatttccctgtaagtccaactttggttgcaactgaaatattataattttcattgttattcagttcaaatgttctctaattttctttcttctttgacatgactttttcagaagtatgctgtttaatttccaaatatttggggatattccagatacctttctgttgttgatgtctaatttaattctattgtggtcccaagaatatactttgtatgatttcaactctttaaaaatttttaaggtttgctttatgacctacgataaggtttatcttggggaatgtttcacgtgcacttgagaagaacgtccattctgctgtcattcgatagaatataatataaatgac

SEQ ID NO: 243725 - DNA, 656 bp, Homo sapiens
ataattaattaataagaagcatgtcccatatttgaacccaggcagtctgctcttgagctcaggtgcaaaagaacaatactctgctgtttcccttgttgaccaggacagcgtgcacggggcaggcgcgtggtgtgtcttcacaaacactagctatcactgctgtgagctgagcacttccactgaattgactcattcgctcattggaaatacatttattattgagagcctactgtgggccaggcagttttccagatgctagagataaaatatgagtaagacagaattcagccagccccgaatgagagaaacaggaagaaagtgcagtagattctcattattcacaagttctaaatttgcaaattcttccctgtaatcccagcactttgagaggctgaggcaggaggatcgcttgaggctaggagtttcagatcagcctgtgcaacagagcaaggccctgtttgcttaaaaattatacacattgaataattcttaaaaaaaatttgtttgtggccaggcatggtggctcatgcatataatcccagtactttgggaagccgaggtgggtggatacctgaggtcaagagttcgagaccagcctggccaacatggcaaaaccccgtctctactaaaaattcaaaaaattagctgggcgtggt

SEQ ID NO: 243726 - DNA, 482 bp, Homo sapiens
gttgaaccaactggtgaatagagaaatacagattaagtatccctacaatggaatattattcagcaatagaaagaaatgaagtatggacccatgcatggaaggatgcaggggtgtttcctacagcatagaaggaccttgaaaacacagggctaagtgagaggagccggacaggaaggatcatgtattgtgtggtctgctcatgtatgatctgctcacatattgtatgatctgcttacatgaaatgcccaaggtaggcaaatccagagtcaggaaataggtcggtggttgccagggacagggacttttgggggaaaatagagagtgactgttaacagggacctgctttcttctagggtgatgaaaatggtctaacattgattgtagtgagggttgtgcagctctgtgaatatgctaaagaaccatcgaattggacactttaaatgggtgcaaattatattccaataaactatctgtagaaactt

SEQ ID NO: 243727 - DNA, 183 bp, Homo sapiens
aaagtcttattatataaaaacaaattctaaaaatatttgaacttttatgatccatttatcacatctggcccactaatttcgaatgattaagtctatgagggaagctcatagacttttagcccgaagaaatatttccattgtattagaattttgacactgtattattactatttttttttagga

SEQ ID NO: 243728 - DNA, 348 bp, Homo sapiens
tctgtctgtcacttccctagacccaggatccttgaggtgcccagtctgcttgtctatggaaggctgtctggaggggacaacagaagagatctgccccaaggggaccacacactgttatgatggcctcctcaggctcaggggaggaggcatcttctccaatctgagagtccagggatgcatgccccagccagtttgcaacctgctcaatgggacacaggaaattgggcccgtgggtatgactgagaactgcgatatgaaagattttctgacctgtcatcgggggaccaccattatgacacacggaaacttggctgcatgtatctgataaaacaaaaactgtcctttaaa

SEQ ID NO: 243729 - DNA, 460 bp, Homo sapiens
taagaattctgataaatcacaaacattcaacgtcttaaatattctaacttttcaaaacctaacttctcaatcaatgcacacagtgttcacttcaggaatgcaggaataggtaatcgtcacaggactgcaaaaaccataggaattttaaatattaaaataaaatgcaacttttaacttaataaaacatgtctctgccactctttaaagccctctgttaggctttataatattgaaatgatgacactaagtaatcaccagtagacctgtgatttaaattgattttccacacgtggacaggactggtactgatttctctcctattttgcgatggatagtacattttaatagtaaaagtaaatgtcttttttaaatgtcacacattttgctttaaaaaatcatatacaggagaaagacatgaataattttggttttggtaaatattcatttgaaaaaagaaaaa

SEQ ID NO: 243730 - DNA, 351 bp, Homo sapiens
ccttttcccaaaatattagtcaactggcccaaccatagttattaaaaagttcatgaccccttgaccactgatttaataccccagtcttacaatcgacctttatacatgtcacaggctccctgtcccactcattaaccgcctcagcgctcctgagtaagcgtcccctccggcagccgcgccccctccggcagccacgtcctgagctccggtgtcccccactgtgcacagtccccaccactactccagagggtctccacctccaccctcacttcagaaccagcagttacacaaaagtcctgctaggatcttgatgggagctgttctgaatttagaggcaaacatggagaaaat

SEQ ID NO: 243731 - DNA, 361 bp, Homo sapiens
attggttaatatttcagtttattgaagatacattattttgtatggagtgtttaagttgttgaggtttaaccattacaaacagttatgacaaaaatagatccaggggtaaacagcctccacagtcatgcttttaataagcacagccataactaggaaattggatttccaggagctgggagacaggaggggggaaagttgcagagacatgggaaggaatgggaaggaccctcagttcttctctgcacccataacacttatcaggatttcctcttaaaatagaggaacatttcatcccttctagtaatcataaacatatttgcccctttctagagaggaatcttttctctggtgtctttccagg

SEQ ID NO: 243732 - DNA, 590 bp, Homo sapiens
  misc_feature (7)..(7): n is a, c, g, or t
ttaagtnaaagctggtttattatcattcacattatttcatagaaaaaggaatatagcaaacggtcagaatgcagtacatttgaaaattctatctcaaaaacagaactatcctaagtgttgggtaaagtatagaaatgggtagaggaattaaagtgcaagaggttattggaaaagaggtggccaagaaattgataggccagtgtaaaggttttttttacacattcacttaattctgtcccttcaatatgagttctacatattaactctggttggactctcagctttaaaaattctcactaagcaatgaaaggatttttccttctgaacaacactgactgatcacactgtatcttttgtatttttcacgtctttgtcattttgcaggtgttttcactgttactggcactaaactttcctttaatgaaggttccagctactagaaggccaattcagtgcaagattacagtgataacaaaaattaatcgctatcaccaatgacactttattccaaagacaatctattatatttcatagaaaccgtaatatttttacattaaaaacaactttcatatatgtgcaatggaggacag

SEQ ID NO: 243733 - DNA, 412 bp, Homo sapiens
agctgtgtgacctctttgggcttcagttttctcatctgtaaaatgagataataacagtgcatacctcccctcctatctcatagaggtgctgtgagaatgaactgagttaatacctgtaaagcacttagaacagtacctggatcaaagtacatactcaatataggttagcttggatcattactactgcagtccactgggaggtgggagtagagaaagccatctctggagagatcaaggagggtttcccagaggaggtgatgtttcagcttagacattaagacagcgtagaagaaggccaggtgtggtggctcatgtctgtaatctcaacactttgggagactgaggcaggaggatcacttgaggccaggagtttgagacagcctgggcaacacagagagaccccatctctaaa

SEQ ID NO: 243734 - DNA, 358 bp, Homo sapiens
gtaattattattcccattttatagatgaggaaactgaggctcagaggtcacatagctaataagtgattgtccccactgtttctcacatatcataatgtcaccctcaatttccaaatgaggaaatcagacaccaagaaagaagtagagcccagatgtcctggtcccagccttggctcttattccatcctgttttcctgtttgggtgaaggtgcaaactcactctctgcagaatttgcccttaacagaaaatggcctgaggtttgtagctagcactcagataacctaatgtggatggaagcatttcaaatgtttggccaaaataaagttggtggagtgtgcagctggagaacagacaaca

SEQ ID NO: 243735 - DNA, 718 bp, Homo sapiens
tgaagatggacttattgatttctatattcttcctctagcatcatgaaatttgacctcttcagccgtgcatggttaacactccatctatctgagtaagtcctgccttgaagaatcgtgagtgcaaaccagtttgagagagaagaggaaaaataaatgagtcgtgctctgtcttccaggctggaatgcagtggtatgatcacaactcacaacttactgcatcctctacctcctgagctcaaggggaatccttccacttcagcctccaaggtggctgggaccatagatacactccactactcaaagtttagcaaccactcaaggaaatttaaaacactaaatttctggacttgccagactaagggccagactctggacctcaccaaattcatcaaggtaatgtaaccctgaaatattctttttagtaaccagtatgcttgtggacacttaattcttttaacatcaatagcatttattgattgttgccattggacccatccttatgaccatcttaacatctccttccccagcaaaaaaacaaaacaaaacagaacaaaaaaaactaaaaacaaataatgcttcacattaaaaatatgccattttctctcctgttcctaggggacttcccttgctatgagtatcttgctggtcagtagaagcagaaagaatctcagatgactctgctttcttgggaagcactttgtaaaatacaattttcaaa

SEQ ID NO: 243736 - DNA, 873 bp, Homo sapiens
tcagagagaatatggccctgctgaaacattgatttcagacttaaagcctccaaaacaagactgtcaatgaaggaaccaagagcccatggcaaatgggtgggcacatgacccaagccagggaaatcagaatattattactttacatgtttctggctgagctatgggaaacgattctctctatctactaaggaagcatcatgaaatttgacctcttcagccgtgcatggttaacactccatctatctgagtaagtcctgccttgaagaatcgtgagtgcaaaccagtttgagagagaagaggaaaaataaatgagtcgtgctctgtcttccaggctggaatgcagtggtatgatcacaactcacaacttactgcatcctctacctcctgagctcaaggggaatccttccacttcagcctccaaggtggctgggaccatagatacactccactactcaaagtttagcaaccactcaaggaaatttaaaacactaaatttctggacttgccagactaagggccagactctggacctcaccaaattcatcaaggtaatgtaaccctgaaatattctttttagtaaccagtatgcttgtggacacttaattcttttaacatcaatagcatttattgattgttgccattggacccatccttatgaccatcttaacatctccttccccagcaaaaaaacaaaacaaaacagaacaaaaaaaactaaaaacaaataatgcttcacattaaaaatatgccattttctctcctgttcctaggggacttcccttgctatgagtatcttgctggtcagtagaagcagaaagaatctcagatgactctgctttcttgggaagcactttgtaaaatacaattttcaaa

SEQ ID NO: 243737 - DNA, 655 bp, Homo sapiens
ggcacacagctgggccggcacactgcactcacacccagtcgaatgcctttgcactgtgtccacattgcaccaccacacatgacagccctaaatgtgaactgaaggaacaaggactgacccctctgaccaccactacccataaccagtactgtctctgcgtctgagtcctggcctggtttacctgctgggtgacccctggcaagttactttgcctctctgggccttagttcccgcacgtgtaaaatgaggttgggctcaatgacctggccagctctgacatcctgtcattttcttgccaaggtctcagcctatcagttgtgacacaagtctcatcagtttcagttttcttgtccatagaatgaccacagatcggccagatgcggtggctcacgcctgtaatcccagcactttgggaggccgaggctggcggatcacctgaggtcaggatttcgagaccagcctgaccaacatggagaaatcccgtctctactgaaagtacaaaattagctgggcgtggtggcacatgcctgtcatcccagctacttgggaggccgaggcaggagaatcgcttgaacccaggaggcggaggttgcagtgagccgagattgcgccattgcactccagcctgggcaacaagagggaaactccgtctcca

SEQ ID NO: 243738 - DNA, 198 bp, Homo sapiens
tccacccacagagctaatcacctccactcctgccccggggcacctatgagatggatggcatcacctaaatgatcacaaacatctccaaaggccacgctgccagtgtagacacactcattccatgggtgttagtgataccaaatctcccccagttcttagctcaggaggccctgcttaataaacatgtgtgtcctctga

SEQ ID NO: 243739 - DNA, 670 bp, Homo sapiens
tagattgtggatattagtcttttgtgggatgtgtagtttgtgaagattttctctaactctgtgagttatctgtttactttgctgattatctctttcgctgttcagaagctgtttagtgtaattgagttccatctatttaactttgttttggttgcctttgcttttgggttcttggtcatgaagtctttgcctaaacaaatgtctagaacagtttttatgatgctatcttctacaatttttatacttccaggtcttagatttaattatttgattcatcttgagttgatctttgtataaggtgagagatgagtatccaatttcattcttctacatgtggcttgccaattatcccagcaccatttgttgaataggttttcctttccccattttatgtttttgtttgctttgtcaaagactagttggctataagtatttagttttatttctgaattctctattctgtttcattggtctacatgcctgtttttataccagtaccatgctgttttgttaactatagccttgtagtatagtttgaagtcaggtaatgtgacacttccagatgtgtgttttttttgttgttgttgtttgtttttttgcttagtcttacttgggctatgtggacatcaaagctgagaatcaaataaaaacctcaacccctattaaagca

SEQ ID NO: 243740 - DNA, 373 bp, Homo sapiens
tagagcatctgattcaacccttccatttgactcaagaagaaaccaggaccttgaaagtttcagagatttggccaccaggactccagaacttatggactaaagtgttctcatatgtgtccagggctccttctgccctaccccattgctatagtctttcccacttatcagcaattttactttctgtggttttagttactcatcgtcaaccatgatctgaaaatattaaatgggaaattccagaaatgaacaattcgtaagttttaaatttcactccgttctgatattgtgatgaaatcttgctccgtctactctgtcctgcctgggtcgtggatcattcctttatctggtgtctctcctgaagatgcttcccacc

SEQ ID NO: 243741 - DNA, 426 bp, Homo sapiens
gttgctctatgaggaatccaggaaaagcatgacttaaaactctttaatattatttttttccacttataattgtaacacaagctggcacaattcttaggcttgtggggttggggaattggataggggtggggtaataatgaaaggttgacttgaggattctggtttataaggctgagggctgagcgcagtggatcatgcctgtaatcccagagctttgagaggccagggcaggaggattgcttgaggccaggagtttaagaacagcctgggcaacattgcaagacttaatctctataaaaaatgcatgcctataatcctagctacctgggaggctgaggtgggaggattgcttgagcccaggagtttgaggctgcagtgagccatgattgcaccatggagactccatctgttaaaaaagaaaaaaaa

SEQ ID NO: 243742 - DNA, 411 bp, Homo sapiens
ttttgtttgcttatattcctaggctaaggcccttcagaggttccaactgaaagccatgggaaatagttctcaaaatcagcatgcatctgattcacctgaaggacttattaaatcacagattctggggctgggtgcggtggctctcagctttaatcccagcactttgggaggctgaggtgtggattgcttgagtccaggagttggatggagacaagcctgaggaacgtggcaaaaccctgcctttgcaaagaaattaaccaggcttggtggcatgcacctatagccccagctactcaagaggctgaaatgggaggatcacttgaacccaggaggtggtggttgcaatgaactgagatcacgccattgcactccagtgtgggcaacaaagcgagaccctgtctcaaaaaaaaa

SEQ ID NO: 243743 - DNA, 1060 bp, Homo sapiens
tcatcaaaatagatattgtataattttcactgtaatttcctctttaactaatgagtaatacagtaattttcagcttccaaaagaaaggtatctggccaaaatacagtagcagaaagcagctataccctttcacctaaaagaaaagctttaaaaatgaacaaaacatataacacttagtctttagacatgaaatatcggttagttctgagacaggagtgtgaccctgtctcagaaaaaacaaataaatacaagaatcactgtagtgtgctacagtgattccttaaaaaagaaaaataaaatcctacagagttttacaattgtcccggcttatattctagagacagtttccaggcctcagtgcagggcaagggaacccagatggagcctgatggtcaccctaagttgagatgatgaagctaagaatacaggaaaatgaagaaagctagaattcgtaggacagagtaccaaaacagagacaactatacagacaggaaggggaggggggtgtcccatcttcatctcaaaatttcagctcaataccaatccccatatccttgtgaggaaacacacaaggcctagagcagagtcaccagaaaggaagagagagaacaattaccaaagatttctaagggttgggaatagttcatgctctcatcggccagactggaaaacttcataatttaagagacaccaggtagaatactcagaagaatactgtcttagtattggggaaaattagctgtaggctaccagctgctctgttcccacctaactgagcttcgaaataatacctgcaaggccaggcgctgtggttcatgcctgtaatcctagcactttgggaggcccaggcaagtggagcgcttgagctgaggagtttgagaccagcctgggtgacacggcgaaacccatctctacaagaaaatacaaaaaaaaagccaggcatggtggcccgtgcctgtagtctcagctgcttggggagcttaggtgggcatttcgcttgagcaggagaggttgaggctacagtgagccaagatggcaatactgcactccggcctggatg

SEQ ID NO: 243744 - DNA, 435 bp, Homo sapiens
tagataatttggtttattctttctggattctttaaaaattatatggctatttaaaaattcaagctttaaaaaacgtattgcaatttttaagaataatttcttcaaagctctatttttttatatatgtttgaaattgagttaaactcaaatttaagtgtgctttcttacaatgcctctgaaaccctagattaattatatccctggaattcagtcctaggcacctccatgttctctagctattcctccacattacctcccctatcctcatctcatcctttaaggtagaatggctttcttttctggctttcttaaaagaggtaactcagctggctttctgtcatggaaatcaagcttgatagtgcatttttgttgtttaaatgtgtcatcagaatccgtctggcagtgagcacactttaaatctaaaaatgatcactt

SEQ ID NO: 243745 - DNA, 566 bp, Homo sapiens
cagcctgctgcagtgtgggtgggtggggagattcagctctttcactgtgaccctgctcccattccacactaggctacaaggacaggaaagagtttcagcagaaaggagtgagcagccacttactccttcaatgaataagctttcctaagcaaggaccagagaaatggtctccacacagaacctgcaatgcccactgggcactactgggtcctctctcccactacccacccccaggtactaaagcaccctggagaacttaggtataggtggtgggaagtcactgaatgcaagggagagagtgacttgatcaggtttgtattcaaaaacacaacgttaccggcaatgtggggaatgggtaggggaggggtggtccagagaatgggaagccagttaggagaccaccccaggtgagggatggtgaagacttgggcaaaggcagcagcaataaaacagcttctataggggcctcattacccttgacctgtatcagaggcaagacagtcactaccaagctgcctctaattcttcagagagcagagacattaaagtattgtaatgagtaaaaa

SEQ ID NO: 243746 - DNA, 336 bp, Homo sapiens
gaccccaaggtttttagaggaactgaaagacagcaattagttcatttgagtgaggaacagaaaggattcttagaggtagggctatattaaactcgaatgggtctgaacactcttactctgcagtccctattctacgaagtcactatcttatttaaatgcactcaaattccacattaaatatcacctttttgatataaaatttttgaaaagactcataattttgggccaggcgtggtggcttacgtctgtaatcccagcaatttgggaggtcaaggcgggtggatcacttgaggtcagggattcgagagtagcctggccaacatggtgaaaccccat

SEQ ID NO: 243747 - DNA, 1773 bp, Homo sapiens
atggacctgcccccgcagctctccttcggcctctatgtggccgcctttgcgctgggcttcccgctcaacgtcctggccatccgaggcgcgacggcccacgcccggctccgtctcacccctagcctggtctacgccctgaacctgggctgctccgacctgctgctgacagtctctctgcccctgaaggcggtggaggcgctagcctccggggcctggcctctgccggcctcgctgtgccccgtcttcgcggtggcccacttcttcccactctatgccggcgggggcttcctggccgccctgagtgcaggccgctacctgggagcagccttccccttgggctaccaagccttccggaggccgtgctattcctggggggtgtgcgcggccatctgggccctcgtcctgtgtcacctgggtctggtctttgggttggaggctccaggaggctggctggaccacagcaacacctccctgggcatcaacacaccggtcaacggctctccggtctgcctggaggcctgggacccggcctctgccggcccggcccgcttcagcctctctctcctgctcttttttctgcccttggccatcacagccttctgctacgtgggctgcctccgggcactggcccgctccggcctgacgcacaggcggaagctgcgggccgcctgggtggccggcggggccctcctcacgctgctgctctgcgtaggaccctacaacgcctccaacgtggccagcttcctgtaccccaatctaggaggctcctggcggaagctggggctcatcacgggtgcctggagtgtggtgcttaatccgctggtgaccggttacttgggaaggggtcctggcctgaagacagtgtgtgcggcaagaacgcaagggggcaagtcccagaagtaacgccactgctcgggggaaggagcatggggcaggagggcccggctgcttctccaggcccctgcggggggctgcttcggaggaactgcagggcagcctggcccggaggcctccctggagccactcaagcagagagcggcgcctgctgagggcagcaccccagtcaagagaggagcaccgagccagagcacggtggcagggggaggtaagtttgcccctgcacgtgtcgaggaagtttgtcccttcctcgcctatctttctctcccctctgcacgtcctcacctgcctgtcttccgtgggccgcgagcagaggccttgtacttacgggaaggaggaggcagtctgtttctgacccacaggaactgccactccggtgatgcacttgaggacagctactctgaaatcagttcccaggagagaacatttgatttccgagtaggagaggaggcaggaggcaggataatgacgctgttataccatgtgaaactcgcaagggggcagccttggagcttggaacggaggctggcaggaaaagatgcttcagccggggagggaaaatgcaaggtcccgcagtgatgggcaaaggctacggagttgactcttgaacaacgtggggatggggtgccgaaccccacgcagtggaaaatctgtgcatgactttgactcccccaaagttcaactactaatagcctactgttgaccaaaagctttacccagtatataaacaattgagtaagacatatttgaagccaggcacagtggcttatgcctgtaatcccagcactttaggaggccgaggcgggaagactgctcgaagccaggagttcaagagcagcctgggcaagatagtgagacccccacctctacaaataa

SEQ ID NO: 243748 - DNA, 433 bp, Homo sapiens
gctggtctcaaagtcctgggctcaagcgatctgcccaccttggcctcccaaagtgctgggattacaggcgtgagtcaccgtgcctgggcaaccagaactttttataaacttgtgtgtgtatgtgtaaacataaatatacatacatacttttactgttggactgtattaaaacaggagttttaaagaggtggttaagatagacagcagactttgcttctgaaggtgatagtgggatagcagataatgtttcttgaactgtcacttggaaccaagtactgtgttaagaaagtactaggtttgttatctctaatcttcactccaaccctgtgaggtaggactgttatattaagtttatattaacttttttgttaccaccgttactttgttagcaaggtttaatattgatatcctttgatgtactaagagcacctac

SEQ ID NO: 243749 - DNA, 934 bp, Homo sapiens
agcgtggatagagagaagaggaaaagaagagacacagctactttgagaagccaaaagtacatgatgagtccgtggacgttgacaaaggacctgggtcggccaaggagttgatcaagtccatcaatgaaaagtttgctgggtctgctggctgggaaggcacagaatcgctgaaaattgcagaagacaaaaagcagctgagagatttctttggcatgtccaacagttatgcagagtgctatccagccacgatggatgacatggctgtggatagtgatgaggaggtggattatagcaaaatggaccagggtaacaagaagagaaccttaagccgttgggactttgatacccaggaagactacagcgagtatatgaacaacaaagaggctttgcccaaggctgcattccagtatggtatcaaaatgtctgaagggcggaaaaccagacgcttcaaggaaaccaatgacaaagcagcgctcgattgccagtggaagattagtgcaatcattgagaagaggaagaagatggaagctgatggggttgaagtcaaaagaccaaaatactaatcaccagttacaaccagagtcgctccacaaggatatgctccccactgttttctttctacaatttccgaaggttgcaagatgtttttttgtggatgaatataaaattttattgtgaaaaaaaaaagaaacacagatagtaaaaacaaatgttatgtctggcaacacagctcattcaaaaataaataatcatttactgatgatgggctttgtagattcccatcatctacagattagaacatataaggacaaattctgaagagctatactcccttccatcttttctctacctgcaatgaaaattacagaattcttattgaaggatactaaggttctattctattttccagccttaaatagaggaattagaggat

SEQ ID NO: 243750 - DNA, 397 bp, Homo sapiens
ttttttttggtagagacaggctcttactatattgcccaggctggtcctgaactcctgcagtcaagtgatcctcctgcctcagcctgccaaagagctgagattataggcatgagccaaggtgcctggcataggaagagaatttttaacagaagcagcaaaacgattagttactttacatttttttcatcatgcaggtaacctaattacatttcagattttgaggggaaaatttatccctaatccctgaagcactgacaaaatgttaccacttcttttctgtgtatgtgtgtacgtttaaaatatatatttggcatcatacaatatatatcctcttttatagtctatacttttaaaatttatcactacgtaaacatttttatgcaacataattgtgatc

SEQ ID NO: 243751 - DNA, 238 bp, Homo sapiens
ttcacaggtattggttcctaataaacatcttgcacctcaaattccatcccagaatctgcttccagagaaccccatctataccaagaccctgatgatcccagtcatctcagttattcctgctgaagttccactcgtgagtgaggccatcctggatcagcagaccagctgcgccagctccaacataaaaaacaaccaactcagataatcctgaaaaataacaaatacctgttgttttaaa

SEQ ID NO: 243752 - DNA, 215 bp, Homo sapiens
aaaaaattggtaaattaaatcattttattctcaaattatcaacccaaattacctgttcttcacctcatctaataaagtcctataaaaagaaaagtgggccagacatggtggctcatgcctgtaatcccagcactttgggaggccgaagcaggaggatcatttgagcctgggagtttgagaccagcctgggcaacatagcaagacctcatctctac

SEQ ID NO: 243753 - DNA, 1549 bp, Homo sapiens
aaaagtccttccctaagactatgtctaagacatacattaaacaagcaaacaaataatatatcacatataacacagcctagcaaagagtaggtactctcattacctactatttctcgctcacattttctccctaaaatgagtgttatttttatgataatttgttctgtacccttcatgcaaacaatctttgaaattcttattcccaatgtgatgtggaatgacttgttccatcattccttagcaaggttaaggtactccagtaaatattttccttttcttagatatagatgtggtaagatgttaaaaggaggtggtttgtggcaaggcaatgttttaaaatttaactttttgttaacattttaaaatgtaaataaaaataatttcctgggttttggaaaactaagatttggagacattagacccacattcttttaagtaaagcacttcgttcatatagattgcccagcccctgtaggcatttgaatttactaccttggcttaagtacagtcttgcaaactctgtcccctacactcttctaggtcaggggagataagaaggagagggaagaactaagttatgatgaaagcagccataagaagggggcagaaatggggtcatttgacccttcgtcttctcaaatcagaaactcattgtgtggctgtgcctttaaattaaccatttactttcatggagttacttcaattgctcttctaagacataaatgagatgcctgtttctttatattcttaccctgtgtagtacttgctggtggtggaaagccatgctacctccctgaattcccaggattgtgatgcaaggtctaatgcagtagttctccaagtgtggtctgtagaccttatggggtggggggtccctgagaccgtttcagggagttcacaggtcaaacaattttaataataaagctaacgtgttatttgatcttttcactgggttgacatttgcactgatggtgccaaagcaatgttatgtaaaactgctgatgttttgggcaccaaactggaacaaaaccttatattctttaccactaagcatctgccggttaaaaaaaaaaaaaagaagtttaccttaagaatgtccatccatgatgaagtggtaacaatttttattaaatctcaatcctgaaattcttaagtacttttttagatttctttttgatgttctgtgtgaagaaaaagtattcctactacatatcaaagtgagaaactgtgcttgtgctattgagttgcaagttaaactagccttttaaaaaatgaaacataatggacgatgtggtggctcacgcctgtaatctttgggaagctgaggcgggtggatcacgaggtctggagattgagaccatcctggccaacatggtgaaaccccgtctctactaaaaatacaaaaattagctgggcgtagtggtgcatgcctgtaatcccagctacttgagaggctgaggcaggagaatcgcttgaaccagggagtcggaggttgcagtgaatcaagatcacgccactgcactccagcctgacgacagagcgagactct

SEQ ID NO: 243754 - DNA, 477 bp, Homo sapiens
tcctgcacacagggacccttgtgacatatatacaggccaattgcctaggtgatgttgtgcaatatacctgagaccagatcaatggcctaataatgactcttttacctagagccaggacatgtgcaggatggtgatgtaactctcctctctggaacgggccatgaataaaggaaagattgtgacatattgcaagaccaggcacacagctgatgttactcttttgccagagccatgcaaggagagcattttgagatatctctggacctatcacctaggtgatgtggctctcctgcttgggccctgccagtctggacagtgacatatttctaggccaggcacacaggaacattgtgacatcgctggatgtagcatctacgaaatgtgactctcctctcctgcttaggtcctgcccacaaaaggaattgtgacatatcactgagtgcaaaacctagtaaatgcaactctcctctttattct

SEQ ID NO: 243755 - DNA, 620 bp, Homo sapiens
aattatgacatttctgcctgtggccggtggaaaccgatgttactcattcctgcccctgagcaccgtcccttcagatctttagaacaagggaaggtaaattttttgtgtaaagggccagagaataaaccttttaggcgtggctgagcgagtaataaatgggtgtggctgtgtccagtgagattttacttgcaaaacaggccgaggaccagatttggcccgtggctatagtctgccaatctctgctttaggataaatgttctgcagccttcagtcatttccttcagagagggggaccttctctgaggctttctcggcgcagccctctcctctggagttctacacggcggactcgagctgctgtggtctccctggattctcagcctgacctcctccatctggggagtccggcagctgtggctcatgacctagaaactctccaggcaatgactgtggtgatggcaggcttgccccgttgtgtttcctttttgttgcctgctgtcttgaaaaccattgtttcacatcctgtttgttcttggctgtggaagatgcctattaccccatcttggctgaaactgggagttgcttagctatttaaatttaatttaatttaaatacaattt

SEQ ID NO: 243756 - DNA, 620 bp, Homo sapiens
ccttacagtgtggggttcttgttttggatcttctgtaacttagggatcttcttcctctgcaggtgtttttgtctccagatattcttgtccagttgtcctccaatcatcactgtcccttagaattagaggcttaaagaatcctgatgcccaaacctcactaaatcatactctctgggggtagaactaaagcactggtatttttaaagctctccagatgattccactgtatagccaaggttgagaaccactgtcttgctccctgaacctggtcaacttcttgaggtttatgctatggaatcaggtatcttagatttgaatcttgcctctaccacttgggcaattccttgtgtttttgttttctcatctgttatatggggataattgtatctacctcaaaaagctgttgaacgggctacatgagaacacaggtaggtcaagaataatctctggcatatagtaagtgttctataagacttagcaagtgttctataaaatttaactcatgtgcctaggacagggcctagcgaatgttgacataatatttgtgcacttgccatgagataggcattgttctaagcactctacttttgttgtgttgaagatctagtataagaaaaatt

SEQ ID NO: 243757 - DNA, 373 bp, Homo sapiens
tgaataatataggtgcacagaaataggactgaaaagctgaaggtaaggaaggaaagagataagaataacaaatgggccaggcgtggtggtggctcacgcctgtaatctcaacactttgggaggctgaggtgagaggatcacttcagcccagaagttcgagaccagcctgggcaacagggcggaaccctgtctctacaaaaaataccgaaaaagcacaattagccaggtgtggtggcacacgccttcgtcccagctacttgggaggctgagatggggggattgcttgagcccaggaggcccactttgctgtgagccaagatcatgccactgcactccagcctgggcaacagagcaataccctgtctcaaaaaaa

SEQ ID NO: 243758 - DNA, 453 bp, Homo sapiens
caagcatagcatcaaggtcataatctgtgacatctgggtgaggtatggtagtttctaatcatgatctgcttccaagcctgagtgacagagccaggtgctgtcccaaaaagcaaaaacaaaacaaaacaaaaagattccagaacctctcctgattaccctgaaacccacaaattaaaagctaagcagtcattttttttttggtaaactttcattgaggccctcataatttcagtgtttttctctcctgtctttcactcttctttgctgccacggagtacttatttgtggcctcctcgaaacacctcttctgctgaaccaaccctagacttctttatgagaactctttccaattcagtggtgctgggctgctgagttgagatggttgactttattaaatttttggccaacaattttacctagtactgggaaatacaatttattaggttggttata

SEQ ID NO: 243759 - DNA, 2658 bp, Homo sapiens
tgaaacggagtttcgctcttgttgcccaggctgcagtggcaatggtgcgatcttggctcactgcaaccttcgcctcctgggttcaagcgattctcctgtctcggcctcccgagtagctgggattacaggcatgtgccaccatgccgggctgatttttgtatttttagtagagacggggtttcaccatgttggtcaggctggtctccaactcctgactttaggtgatccgcccgcctctgcctctcaaagtgctgggattacaggcgtgagccaccgcgcccggccagttacgggaatttttaatggagttttaccctttttagctcttttccacatcactacaggtcatcacatatactttttaccttactttttagcgtctcaaaaaatagggagagctctccctgaacagtgcagagcccgtatccctgatttcctaggctatttgatttctacatccaggaacgtagggtcatatccactgttcttgctttttcttcctaagaaaggagagaattcctcgcacatatatatcgttggcttggccttccaaagcaaagcaaaactaaactctgttgattttgcctgggaatcctcggggcccctagtattggaaacttctttgaactgtgaggagctgctaatttgcaggtgacatgtgaaagaaatgtaaccgaggccagcagtagctaaaagtcggccaccacccaacgtgtgacgccgatttgtggccactgtgcttataatcgtgtacacacaggtttgtgagcagcagagaacaaaagcaagtaaacaaaaacaagctaaagatggcgtctgacggccttgaaaaagcctcacagtcttgtccctccctgaggaggcccctcccctacctgactttttgagtgactgttgtttgcagccaatagtgtccgtgaccctgctccccagccatcgtctaaccgccaatcaccgggagccagaaggcaaacggggcggtgtctccccgcgtgcgcgcggtagccgggtacacgggcaggcgccgcggatagttctgtctcccgcgcgcccgcctccgcctctgcctagctgagtcagcccgtgcggtagcgccaggcacacgcggtagaacatctgtagggctgcaaagctgcacctccgcgtcagttctcacggcgagcgccgccttcagcccaagttctcaaagctctcggggctacgtagtctaccctccccggtgacccggcgagatccctagccgctcctccggccgctctgctctccgcatccctcgcgggaatgaccccctttacccgggactcccagagcgcactgtatggtagggcacagtggcgagtcaccctgtcccctgaggcctcttgagcagtcgccgatctctgcttcccgcgtcgctgcgatcgcctttcccgtagctgaatcacactgacccatcggaaacggttctgccctccctggggtccaccttgtcatccttgactaatatttaatcaactaacatttaccaagttctcgctggcacgagttctaggagctactttttcatttttcagtttctccataaatgcagtgggtcctttaggcaaacctgaaatcggaaatattaatcttaccaatgtaatcttagcaaatgtaaataaaaaggactgtgctatactgagctaaaaattctcatcctgctatagaaatatacgtggaattttcagattacgtggaatcctttaaagaccgcattcggccttctgggtctacagctctctttttttacccctaaaaataaggtcttggattttttgcagaccattagtcgagtcactcttttaaaatgtgggaaaatagtattttgtggtatttacttagctgctcttgtgtgataaggagctcatttctgataaaaataggttttgagagaaccttttgacaggtgagccattttgcaccttgaagtggaggagtaggactgaccaacacagcaggagctttaagtggccgttttccttatttatttcttaaaatgaagattatgatatgaattgccatgctttcagtaatcacatttaaggaagtctattgctagcatgaccctgaatgagtcaagcacccattataaaaacatatatcatctgagtgataccatatcatacacatctattaaatagtgagaaaacttttatttttcatagtttggaggtgaactcagtcatgcagaaaattcaaactcagaatggggagaaagcaagcaagggaactgccaagagtatgatatatttagtcctaacaaaaatgtgacttgggaggaaagggatagttaaaattatggacagtcttaccctgaactgtctgtctaaaggagatgaattgtctttcttttttatctaaatatttatgaaaaataccaaaagtactggaaagtacatttttaaggctcgtttcacatttatttaaattagaccaatactgaaatgaaccccaaatgcttatattttttgcaaacctaagtgtgacatctactgtcatgttgtgttggcaacgcatcccaagattgaagatctttttctcttttttagacctagtcagttgttttcaggactttctacttaaacatgttgccatcatttgaaatttaaaatgttaaataaatacacttcttctctaata

SEQ ID NO: 243760 - DNA, 405 bp, Homo sapiens
ttagtgtttctttatgctgttggtgggttggtagaaccactctgaagggtaattcattatatcccatccactggaattggcacgagcagttcctgccaggtatagttttttgcccaagtgcacaaggaaacatgtaaagccatcctagcagcattatttgtaataacaaaaaactgaaaatcacctgcatgttcaccatcagggaaatggataagagaagtgtgatctgtttgtgcagaagggaaaatgagtgccttagaactaaatgtatttatagcgtatgatactatttaaggatgaacaatgtgcaaaacaatgtcatatactgtttatgatatggatgtagtaaacgtataaaagcttgcacaggaatgattagcaccaaattcaggacacagttttcct

SEQ ID NO: 243761 - DNA, 347 bp, Homo sapiens
agaaattggttatgttttgataaatgaaactttaaataatagctggagtatttttttaaaatattctttgagaatttcaaaagtagtaatttgataaatttggaggattttttaaaaacattgtttgaaaatttctgtaatagaaactaggtggccaggcatagtggctcatgcctgtaatcccagcactttgggagactggggagggtggatcacttcagaccagcctggccaatgtggtgaaacctcatctctacgaaaaaaataagatacaaaaattagctgggtactgtggcgctcgcctgtaatcccagctactcaggagactgaggcaggagaatcacttg

SEQ ID NO: 243762 - DNA, 321 bp, Homo sapiens
cttaggcatcccagctctcccctggaccattacagaaacctcctggctggcctctttttcagcttctcccatatgacccttcttggtacacatctttaaacaccagagtatatagtatggcgcttaagagattggctctggatttacaaagacctggattcaaatccaagcttagccattctctttgctagatgaccttcagcaagttatcccctctgagcctcagattccttacctgtgaaatgggagtgccagcctgggttgttataaagattcaattatacttgactaatacagatttagtattgtcctggcacagta

SEQ ID NO: 243763 - DNA, 364 bp, Homo sapiens
aggcctcagaggaatgagcccctaaatggtgggactttaggcagagggtcaaactgaggagatcaagaatggaggggagggctgggcacggtggttcacgcctgtaatcccagcactttgggaggccgaggtgggtggaccacctgaggtcaggagttcgagaccagccgtccaacgaggtgaaaccccgtctctattaaaaatacaaacattagctgggcgtggtggtgcacgcctgtaatcccagctactcaggaggctgaggcagttgaatcacatgaacctgggaggcagcggttgcagtgtgccaagatcataccactgcactccagcctgggtgacagagcaagactccatctcaaga

SEQ ID NO: 243764 - DNA, 207 bp, Homo sapiens
agggcctgagatttcagaaactgaaaatttttttttcaaaattctgttttctgggcctgaccacttcatgaaatatgcataataagagtttcttaaaagcttgtaaagagtttggaagcctatttattgccctcaataaatttatgtctcatttaggcaaaaaaatgccaaccaagtacaaaggtattgatatagaaacaagcaaat

SEQ ID NO: 243765 - DNA, 287 bp, Homo sapiens
cgagactccgtctcaaaaaaaaaaaaaaagtgagaaaatgttaaaaagaagcaaaagaaataagcccagtatcaaatttatgtattcatagaaagttttcctaaaaacatatgtttaaatgtaacatacgctgggctgggcactgttgcgcatacccccaaatgccagtcctttggggctttcagaccaaaggattgctggaggccaggagtttgaggctgcagtgagccatgttggtaccactacactccaatttggacaacagggtgagttgagaccccaactca

SEQ ID NO: 243766 - DNA, 110 bp, Homo sapiens
ctactatctgccagtcactgtcatgggcgctagggatgtggcaatgagccaaacagattcccactgagcttgcactctggtggagacaaaaataaataatcatatatata

SEQ ID NO: 243767 - DNA, 381 bp, Homo sapiens
agaaaattatctttttaatgaaaatatcataggattaaattcgacttatttaatatatttttaatacataaaactcattaaatgaaaaacctagagttttcttcaaataaaatcttccttagagagaaaaatgtgaaattcttatcagcagcaaacgaatgattaaagtgaatttgaaaagttcaaatgtctactttgaagacttctgccagatttgcagaaaccaagagttttgtgctccataatcataaaatcatggtgaccaacaaaacaaaacaaacacactttggagcaaatgtaaaaggcaacaaacctgaggggtcatcagcaatatggggaggaaatatttgcctcagttataataaataataagttgtcata

SEQ ID NO: 243768 - DNA, 550 bp, Homo sapiens
ttaataggagaaaaataaccctcttccttccttatgccaatcttctcgagttccttgctacttgcagctgagtccactcttgactgatatcacctaatctcagtcgctatcagattaaacaacagcattactttcagagggccaccaagaaaaaattgcctgggagaagagtaaggagcctgaagatctgactaactttctctgtagccctttaccgaatagcagattagctgagctcatatgatcgtatcaactagtcatcaccttgattagaacacagaagaagtaagtgttcgtggattcaaactgaagagtcggatggaggagtgtcaaggacctgtcatcataaggaggcagaaagtgagagggtatctttaactataagtgatggttttataaagtagatgcacagttttagaaagtaggaaacccactacaaatgaagtgtctgaacatatagtccagaaggtgtctggtttaaacaaaaaagaaattactacttaggggcatgaacagcaccctatctataaataaagactgccatcataaa

SEQ ID NO: 243769 - DNA, 690 bp, Homo sapiens
  misc_feature (676)..(679): n is a, c, g, or t
atattatgtgaagaataataaaattgtgcttatttcttggacacataggaagtgtttagtaaatggcaggtcttctctagggcaaacataattcatggtacagcatttgtaaatgtaaaatatacataataaaatgtctgattattctattaatcatgctatacaatatataaacctttattccaatgatatagagagtagaattttacttaaagtattttcctaaaatctgacccacattaatagatatgaataaaactacatactgtatgcactattgctcagaaatgctgtttttcagttaaataatctaaaaagaattgcatataaaagcactttaaacattagatatttttctttaatttttcacacagttataaagttactctaacatgcccctgaatgttggcacaaaatcaaaatttcaacttaatgtgaattctgccaaaatacttaagaaatataagcccacaaatctggagaacaatctggcagcacttagtgacatcaagaatgtgcagccctatgacccggcaactctcccctgggagcctcttccaaaggttgatctggaggttctttgcagctttgtcttggcaccagggaattatgagaaacctaggtgtctggcagtttatttcttattataaacaactaaaatatataaattacacannnnaattaaccttc

SEQ ID NO: 243770 - DNA, 388 bp, Homo sapiens
agaatgtgcagccctatgacccggcaactctcccctgggagcctcttccaaaggttgatctggaggttctttgcagctttgtcttggcaccagggaattatgagaaacctaggtgttcgtctccagtagaagagaaaaaaaaaagtgtggtagattagcctctgggctgtgcagtggtcaagagcaatgatctacatacagctgagtctatagccacaatgttgagttaaaaataacaataagcacatctgtagcagaatgccatgtttataaatttaaaacagagacattcataaaacaacaatgcacgtttttcaaggatacatagtaatttaagtggagtaggtgactatataaagaaggtaatagcagtgaagagtggaaataa

SEQ ID NO: 243771 - DNA, 381 bp, Homo sapiens
cctaacttccagctttgaaataggactgaagatgaaccatgctcctggcaccccctgttgagagcccaagttcagcagattgcggccatgggggactgaaaatggagccctggacaaagacacttgctgggtgacccaaggcaagactttccatgtacactatgaatgccaagtgctgtgaataccaacccatgctttcaaagagcctgctgcctcagagcatgtgatgtggaactttctggtggcctcggcgtggaggttctcaacctcagctgcacactgtgtttagttggtctggagcgagatctaggcatcagtatattttttaagctccccatgtgattgtaatatgcagccaagaataaaaaaaaaaaaccctga

SEQ ID NO: 243772 - DNA, 868 bp, Homo sapiens
atggatcaaagggctcgctcatgataacaacagccttctctaagccaggcactgaatactgtggatacaaagagcccagagtcatcaagaggaaccaggaactctaacatgatgtgtggagcaggctatgcaaagaggggtacctctcccagtcagaggcatcagagaaggcttcctggtggagaacgtgtgtgatggacttatggactcattcactgcatcgatcttgggcactgcccagcttcatgttccactctcccgtttatcccaaattgctgaggatttcctaagaaccatcactttccagagctcattattttctgttatttgcctcagcagcacaagctgttttcacaaagaaataaagggtcttctattccagaagagttcttctatgcatgtaggtgagcagacagtgcagagccatgctgaggtgtgtgtgccttgctgtcactgtctctcctccgggaggaacactaggctcctgtacaccaggcttcccacagcccaggaggaacacatccacgccttgccagtcatttgcatcttagtaagactaaaactaataaaactaacaataaaacttaaaatagattgaaggattacagtatgccaagcatatatgtattgtgttatttggccctcacagtcaccttttgagctaggcaccagtaccagctttaagagctcaggaagctgaggtgtcaagattttaagtcatttgctcaaggtcacacagctaggaagtgtagtgggagagtcagtcccccatttgtccaatgcagtgctgtcgcccaagtgtgaagagggatgtgcgggtctgagaacaaagttagcctgcttagtactttgtccaaggtcagccctg

SEQ ID NO: 243773 - DNA, 685 bp, Homo sapiens
cagggtctaactgtggcccaggctggaatgctgcggcatcattacagctcactgcagcttcgacctccccagctcaagtgatcctcctgcctcagcctcccgactagctgggaccacagtgagcacagggaggaggaggtgcatgcaagcgatactgcagggccagaatcagaatcatcagcacgtagcaactgattggatttctggagcaagaaagaagagttgaagataatgttgaactttctcattgggagattttactaacattattgagcaattactgcatgatggatgttacgctaagagcattctacaattattatacctcttacgtctcccagtagttctgttaagcactgaatactgtggatacaaagagcccagagtcatcaagaggaaccaggaactctaacatgatgtgtggagcaggctatgcaaagaggggtacctctcccagtcagaggcatcagagaaggcttcctggtggagaacgtgtgtgatggacttatggactcattcactgcatcgatcttgggcactgcccagcttcatgttccactctcccgtttatcccaaattgctgaggatttcctaagaaccatcactttccagagctcattattttctgttatttgcctcagcagcacaagctgttttcacaaagaaataaagggtcttctattcc

SEQ ID NO: 243774 - DNA, 1173 bp, Homo sapiens
cagggtctaactgtggcccaggctggaatgctgcggcatcattacagctcactgcagcttcgacctccccagctcaagtgatcctcctgcctcagcctcccgactagctgggaccacagtgagcacagggaggaggaggtgcatgcaagcgatactgcagggccagaatcagaatcatcagcacgtagcaactgattggatttctggagcaagaaagaagagttgaagataatgttgaactttctcattgggagattttactaacattattgagcaattactgcatgatggatgttacgctaagagcattctacaattattatacctcttacgtctcccagtagttctgttaagcactgaatactgtggatacaaagagcccagagtcatcaagaggaaccaggaactctaacatgatgtgtggagcaggctatgcaaagaggggtacctctcccagtcagaggcatcagagaaggcttcctggtggagaacgtgtgtgatggacttatggactcattcactgcatcgatcttgggcactgcccagcttcatgttccactctcccgtttatcccaaattgctgaggatttcctaagaaccatcactttccagagctcattattttctgttatttgcctcagcagcacaagctgttttcacaaagaaataaagggtcttctattccagaagagttcttctatgcatgtaggtgagcagacagtgcagagccatgctgaggtgtgtgtgccttgctgtcactgtctctcctccgggaggaacactaggctcctgtacaccaggcttcccacagcccaggaggaacacatccacgccttgccagtcatttgcatcttagtaagactaaaactaataaaactaacaataaaacttaaaatagattgaaggattacagtatgccaagcatatatgtattgtgttatttggccctcacagtcaccttttgagctaggcaccagtaccagctttaagagctcaggaagctgaggtgtcaagattttaagtcatttgctcaaggtcacacagctaggaagtgtagtgggagagtcagtcccccatttgtccaatgcagtgctgtcgcccaagtgtgaagagggatgtgcgggtctgagaacaaagttagcctgcttagtactttgtccaaggtcagccctg

SEQ ID NO: 243775 - DNA, 358 bp, Homo sapiens
ctggtctctctatgcaatctgcaattctaagctcattctattaaaaaatgtatctcttaattttaaagaccacctgaagatttacattttctagctgcacatatcctatagagggaaatatttatttcatctctctgggatttttccaggaactaaaacctcaggcaccaaaacctcaggcaccatctgcacttcacccgggggtctcctgtcagatacagattctgcagctctgccctctggctgtccacaccattggtgctgcaccagagctgacccttcacagctacttagtggttacttggagttggtaaaataatggatacttggacctaaatcaaactttttatttatcaaa

SEQ ID NO: 243776 - DNA, 356 bp, Homo sapiens
accaagatggagtcactcatgctaagttccatatcaccaaactgaaactaagtcatcagaccttcccagaactcaagacagagagagataatatgcaaatccccaaacaggccagttgtagccagcatgataaggaagtcccctctactttaacctttataaggaaagtaacctgaagtaacctgagcttaccaatctgctttttgttccctgtgtctgctttcttcacccttttctgcctataaagccaagcttctctgtttagctcatcagagcacttttcctaaagttttagaggagatgctgccccaattcatgaattacaaataaaaaccaattcaatcatttaactaaat

SEQ ID NO: 243777 - DNA, 731 bp, Homo sapiens
ctggcattgtttgaatacttgcgtgtttgtgtgtggggtgatgttttcctgagaatgtggcaaaataatagaaggtcccagggttcctcagtctgcagaccatagctgagtggtgtgtgcctctagccatgaggtgaagcataggtgaaattcagatccataggaagacagacagactttgcaagttagtaagctaacttgctagaggaaacggtagactcctgtgctggctgccaactaaaaagcctttctccacagttctgttctcatgtacaccctcaggaccttggatgagcttgtgtgttcaggaaattgggcaccgagattttttttgtatctttgattttagttgatatgtagtccttccaaggaaagtattcgttggatgccctttctacactttggcattgtgcaagaggtatcaaattttaaagtaaaagtgcacaacctggccaggcgcggtggcttacgcctataatcccagtactttgggaggctgaggcgggtggatcatgctgtcaggagatcgagaccatcctggccaacgtggtgaaaccccatctttactaaaaatacaaaaactagctgggcgtggtggtgcgtgcctataatttcagctacttgggaggctgaggcaggagaatcactttaaccagagagttggaggttgcagggagccgagatcgcaccactgcactccagcctgggtgacaaagcgagactccatctca

SEQ ID NO: 243778 - DNA, 405 bp, Homo sapiens
accttcccaagcaagggggatactgtaattaagtctacttgaggcttcaaggggtcaggtgacttgcaaaagatttgtctagtaggtggtggaaaaagaattcaaagccaggcaattttaatctggagactgaactcttagacattttacactgtggtgccttaacagagcaatagatggctgttgttctaacatagacagatctgaaatttgctctggttcaagtatgactcctcatttgtcatctaggacattcatgtttcctggatgtggttgtgtgctagaatgagtcaattggtcctcacgcatcctctccatgatctttatcactggggcccctttttccccagcttgtttctatgccataagaataaaattcgtgccccagctctttccttcaaagcc

SEQ ID NO: 243779 - DNA, 120 bp, Homo sapiens
cttcagagttgatattaatagaaattattccaaaattattcttaggtcacaaattactagtatgccacataaaaagggaaaaatcccacctcatcaaagaaaaggtgtcctgtgtatgtt

SEQ ID NO: 243780 - DNA, 644 bp, Homo sapiens
atgccccgtcccttcacccatcctgccattcatcctttcatggtgcactgttgaggtacatttctgagtaaactggcaacatcaatgcatttccttctaaatacatgggcatacaactgttcattataggtcaatgtttgtgtttttaatgtaaactttattttaaacgtgcacactgtaatgcacacatcttcagtgtgcattcttttgagttctgacaaatgcacacacctgtgtaacccagacccctctcaatatatggaacactactatcaacccagaaagtcccctcctgctccttcctcctagtcagtccccacgtcctccatcctcagacatagccaatgctgatggtttttttcattttggattagttttccatattctagaatttcatataaatggtgtcctataatttctactcttgtgtgtgtccgtcttctacacacccagcataacgttttggagatgcatccatcgttgctgaatagattggtgattagttactttttattgcttagtattcccttgtatgaattgagtaaaatctgtccgttctattatataggtactggggctttttccagtttttggatattatgaataaagtttctgtgaacattcatgtgcaagtctttctgtgg

SEQ ID NO: 243781 - DNA, 285 bp, Homo sapiens
ttgtttaggaactgtgactaggcaaacaccctttaaaaaggacaaagagttattacattttctgatttaaaatcatgatacaaagctacaaaaataaaaacaatatggtattgccacaaaaacggatacatagatgatgaaacagaatagacatcctggaaataaaccctcgcatacgtgataaaataatcttccatatgctttccatgaccatgcaatagaaaaataagaatctctttaacaaagaattttcaaaattgaatgtttacagagcaaaaataaagt

SEQ ID NO: 243782 - DNA, 497 bp, Homo sapiens
atgagtgaaaggaaagaaatttgttattgcttaaattctgtagtaataaagcatatttcaacaatgagtaaaatcaccatattgaccatcgatacatgtagatttcttaataaaaaagattttcaagattctgacaggtatttgattgtgtttgttttatttgttatacctcattattcacataacaaaatatataagttgagaccttctttgttacaaataaatgatgttatttgtatcaaagaaggttatgttatttgtatcaaagatcttatgtgaataatgaggtataataaatataaccactttatatatgtaatgtacacatattatatataaaggactccaataactcaacgaaaagtcaaaaatagcaaagcacttgagtcttaacttatatattttgctatatgaataatgaggtatgataaataaataacaaatatatgtgtatattatatgtatgtgtgtgtgtgtgtagaactccagtaatctac

SEQ ID NO: 243783 - DNA, 427 bp, Homo sapiens
accccggaaatgagggaggtcaccagagttccaacatcaagtattccttggatttttgttaagcccagtctacatgctgacacataaatactttaccatgggacccactaaatgcactagggaacgtatggataggaagaccaatattgttaagatgtcaataccaccgaaagtgatctacagatccaatgcaattcctatcaaaataccaatgatgtcttttgcagaaataggaaaatccaccctaaaattcatatggaaactcaaggaacacccaacagccaaatcaccttgaaaaagctgtaaaagtcacgcttcctgacttcagaacttaccacaaagctacggtcatcaaaacagtgcggtgctgacgaaaggacacacatatagaccatgggaatagcagagaaccctgaagcgaaccctc

SEQ ID NO: 243784 - DNA, 295 bp, Homo sapiens
gtgacagagcgagactcttcctcaaaaaaaaaaaagagagagcgagagagaaagaagagaaggaggcttgcaaaggactacagaaagaatgctgggagagggtaataggcccagagtagaggagcttatggagagaatgaagtggtcattcgtgtcctgggcagccaacagttgaagcagatgaggggaaaaaagtctggtgggtttgacaattttcatgggctggggcaggtgaatcatagcccaccagggtttgacactaagctggcgagaggacagagacaggataagaagg

SEQ ID NO: 243785 - DNA, 589 bp, Homo sapiens
ttttctactttctgttttcacatgagttttaatgaggttctgttgaagcaaagacccctagacacaaagtaatgacttgttagtagtggaattataagcaacagggcaggcctttgctggaggtattttgagagaaagggagaacaatggaaactatttcttcagatgtagccctgtcttttggtaagaattgtgcctactaattttgcaatttaaaggatttcaggaagctttttggttgaaaaatcttgttttttttttttagacgtagtctcgccattgcactccagcctgggctacaaaagcgaaactgtctaaaaaaaaaaaaagaaaataaataaagttatgctttttcctctattcctagttaaatcacaacaagttagtaatccataaatgatgtgtcctgtttctctttagtagaaattatatttttggctaccagttaagaaacttgtactcctttgtcccttatgttactataaactcaagatgatgagttttgtggtatttgacttcataggcaaaatcaaaatttttactttgttgctattctgttttatgaaataaacttctgtctatgcatttg

SEQ ID NO: 243786 - DNA, 1017 bp, Homo sapiens
ttttctactttctgttttcacatgagttttaatgaggttctgttgaagcaaagacccctagacacaaagtaatgacttgttagtagtggaattataagcaacagggcaggcctttgctggaggtattttgagagaaagggagaacaatggaaactatttcttcagatgtagccctgtcttttggtaagaattgtgcctactaattttgcaatttaaaggatttcaggaagctttttggttgaaaaatcttgttttttttttttagacgtagtctcgccattgcactccagcctgggctacaaaagcgaaactgtctaaaaaaaaaaaaagaaaataaataaagttatgctttttcctctattcctagttaaatcacaacaagttagtaatccataaatgatgtgtcctgtttctctttagtagaaattatatttttggctaccagttaagaaacttgtactcctttgtcccttatgttactataaactcaagatgatgagttttgtggtatttgacttcataggcaaaatcaaaatttttactttgttgctattctgttttatgaaataaacttctgtctatgcatttgaactaagtttcagcaaattcaatctaaattgaataattccagctcccagttttatcctatgttgctcataaaacagttccaagtatactgcattatcttgagatttgaagatatggtgcccacggggattatactaggcaaatgcgttaagcagctctggcctaggtgttgtattttaagagactctatcttaggagagcttaagtgattgggctgcaggaagaagacattgtaacccaggaattaaaaatggattcagattgcctgattttaacactttagtttcaccataggctaattatgtgacattgggcaagagacataattcttctgtaccttagtttctacatttgtaaaatagagatgatttggtaacttattaataagatttttgtgagagataaataaaacaaatacattttgtaaag

SEQ ID NO: 243787 - DNA, 516 bp, Homo sapiens
gtcatgcagacaactctcctgggagctgaggaagctggtttctggggcaggtgggcctagtgcctttgacatgaacttgggccagctcccagcttgaagcctctgtgccctctttcatccccagcacacatagcactgctgctggcctggtcttcctgggtcctccctgtagtgtcctcacatctgtcccttcctcttcatttttcttcagagtccccactcctttcttacaacttcttgccactttcttttaacatttctgacctgtgctacagcttccccagcacttgctatatcctcctgcttggcctgagtgtttggtcggggctgggtctgcgtgtggggtctctctgcttccctctcagggcccagagcatcactcctcacttcttccacagagatcatctcagtgccccacatacaaagcactgttctgtgggctgcattcagaggtggccagactgggaggcccctgccctcatggagctcccattcctcggggaacatagtcactat

SEQ ID NO: 243788 - DNA, 339 bp, Homo sapiens
gatcaactaatctaaccttcttcttttgcatataacaaaaatgaaaggcagactcatccctccacccattcaagttggggtagagcatggactgaaactgactacttcacagtgtcatggaggtcagatgttcggagactacagaggggacacaaactacccccaaaatctttgtcactgagatgacaatttccacaagagatgaaataaacagaaatgctaatagtaatatggtattttagtaaaagtaactgaaagtatttgaaattacctatgttttatgggtatgtatatatgccatggaaattttacataaaactctaaaatcacactttgctg

SEQ ID NO: 243789 - DNA, 584 bp, Homo sapiens
aacagttttgctgtgttggccaggctggtctcgaactcctgacctcaggtgatccacctgccttggcctcccaaagtgctgtgattacaggcatgagccactgcacctggcctctggcaccattttttaaagcccagttcaaatcttcattactttgacctgctttggtatcttctgaaattgtatagtaataaaaagtagtccttggatctagaaaaattactcaacatctctcacatccaaaaaaatcaaacagttatgggatgcagctttccacttcttgtattggttaagattttgaaagcactctatctctagttttggttatgtggagtaatcaacattcttatatgttctaagtgatcatataaatgggttaaaatagtctgagggtttgcttgacgacatttttaagaattcttaaaatggacatactgtttgatgcagtaaatatatgtctgaaatgtttccagataatttttcaacaaatgaactaaaatgtatgcaaaaggctgattacagcactctttttactagcacagattggaaacaaaacaaatgctgaatctgaagagttatacaat

SEQ ID NO: 243790 - DNA, 435 bp, Homo sapiens
tctccctttataacaagtattttataaagtccttatattatccagaaagaagatccatagatgagatgcatttgtacccataaaaatcaacatcatgtctaaagtagaccgatgtttacatttatgcaaataaatttgggttgaagagaagattggaagctattctatacaggaagtataagaaaatggagtgaagaaatagagtagatactaaataaaaactgatgtttaatgtttatcaaaactattaaaaatatacataaaactgctttaggttctgagtttgattattttaaataggttttaacttacatgtatgtctagcagtacatttgaaagttgtgcaggaagttggtcaatttttcatggtccagaactagagcactgcaggatatctatccctctacctccactccactgttagcaatgattaaa

SEQ ID NO: 243791 - DNA, 570 bp, Homo sapiens
tgtaattttctaaaaacagcttttggagagaacagaggcatcaatactgttacagtctattagttatctggccctatggacattagtaagtaacattctagagtatgagtgtcagagaccagtggtttgtctattaaaatagtagaattatcttacttgataattcttgagaaggctgtgactcagtttactaaatttactatatttattaaatataaagcaatgtttggctccttgattctgcacacctttatttgactctgcctgttttctttcacataaggactacagcattttttactgactcctccttgaccatcatttttttcataatataataaaaacctggcatttccgtgaagttgacttactggcttgtattgctatttacttctgggatgtagtaatatagggatatactatggaaagaaacttaacaaaaaacagagaaaattatctgtagttgtcaagggctcattaacctttctgtgccttaaatcgaagccacatttttgtgtctgtgtagcttgtcatcctcaataaaatctgcttgaatttgaaaaaaaaaat

SEQ ID NO: 243792 - DNA, 330 bp, Homo sapiens
ggctaatttttgtatccttagtagagacggggtttcaccatgttggccaggctggtcttgaactcctgacctcgtgatccacccgcctcagcctcccaaagtgctgggattacaggcgtgagccactgcacccagactggtttgggatttaaaaaacccaatatccactatggtggtgctgtgtggatgagagagcaaacactattgttctacttgcctgggctgtcctgtgtgaaaagagaaataaaacctgaacattttaatgacagcattgtgacattacagatgcttattgatgtctaataatgcaaccttcttcatacattaagt

SEQ ID NO: 243793 - DNA, 569 bp, Homo sapiens
tttttgagttaaaatttgcttttctttttcaaacttcttgaaatggatacttacatgattctatttccctaatgctttatttaagcctataaatttcccttgaatcatagactcggattcagcccacccattttgatatgttacatttttaatatattaaatataaaatgtcttctcattcctattgtgattttggtttgacctattgaatcatttagtagtacattattaacttctaaaactgggaggttttagtatggcatttttgttatttattgctcgtttaattatatgtggtcagaaagcatattccatattatttcagtttcttaatctttgttaaggcttcctttatggtcaagcatatggtcaaatttttaaataaaattctatagaacatgtacttgaaaaaaaattctagtctgctcttgttgggtatcagttttcaacatgcgtgtatcaattagatcaagtttgttaatcatgttcttcaaacccttatgtttttactattttttggtctattcattctatttatattctttactaaaagaggagtgccaaaatct

SEQ ID NO: 243794 - DNA, 783 bp, Homo sapiens
ccatttaaattttccatttaatttaaatgtattctctcatttgaccttcatactctgtggagaaatattcctattttggcttgtattgacaagttgttttcacacagcccccacatcacccaaccaaccagcagagatcctccttcccaagaaacagataaagaaactgaggcccaggaaggctaagagtcctgccaggattattcacctttcaagccaagcaagcactggctgtgagagatggctgtgagagaagattaaaacaattacaactcacccagttcacagatgctgagtaactgatctcctgccccactaaccttaacgacagctttctctggacaagggactgatttcagtaactttctcctgataagagaccatcctccatggactggttctggccagttttagaggctgtgcctttacgaggctgagtaccttcatgtccctgcttcactttttgatgtgtagggcctaattataatacatttaaatgtcaagtctccaccccagaatgaacatgcatgtttattgaatatgcatgtgttaggacctcttttatgagtattctcataaaatgatatagctcctctgatatcctattgagtatgtatatgtagccaactcatttggctcaaattcctgtcctctccctccctccctggaaatgcctgcctctggccttggctgtaggccacacttcccagcctgtcataatggccaccttgcagactgcaaacctttataagaaataaagctctcttttctaaatttataaaa

SEQ ID NO: 243795 - DNA, 418 bp, Homo sapiens
gtcacttctttgttcacagatgtcaggctaccttcttcctttctactcagtttccccttaaaaggtggtacttctgtggaactgtttgcagttagatggtatagattttcacttagctttctagccatcccacacttcttccactcatgtttttcactcaatgtgtgttgaaatttataacaaggaaagagtttcaaagattcatgtcccatgggagatgggctgaaatttcctggctatggtagtgagctattaataggagatagagttatgtcacgggggagaggttatcaggaaaataccattatataccatcagtgacccattctagaagccaaggatttggctctgggttctaagaggaacagatctcagtgacctttatataaggtcactggactttaatacaaggaccttt

SEQ ID NO: 243796 - DNA, 508 bp, Homo sapiens
taatctttattttcattcacatcttaattcattcagtagattcattgtgtttttcatatagaatacacacttcctatgaatattattaggtcatttaaatgctcccgtttcccactattgtgcctgtggtctctttttactatatatttttaacctcttgatgataaacagttgtggcttttcaaacggtgtatatcatttcgaggtattatatagtaaaattagcatgggatctaaactgctattagccaagtggcatttaggccaattcttaacccaagcccatgtcttcaactgtaaactgaagaggttctcagcttttgagatttcatggactagtcagaacaaagcaagaaagtgcttttctgcagaaataaagtggtaaggatattgtagattggaatgtaaaaagaaaagtaatgtctaggtaagacccattacttagtcttaatatttgaaatgtgaaatacccagtgtgatgtgaacatggtcatgatctcatattcat

SEQ ID NO: 243797 - DNA, 226 bp, Homo sapiens
  misc_feature (24)..(24): n is a, c, g, or t
  misc_feature (34)..(34): n is a, c, g, or t
gtgtttgtgctggaacctcatganagatatcccntgacccctattgatcatagctggaatatctttgaggtcgtccatgctctgatgatgtcactcttctttgcctgtctggaagacatctccccaagagcacaccaccaacatcaggggggtggaatccaactggtcactgcaagtttgctgcttacacaatgacaagcatagcaagatctgagactgggtaatt

SEQ ID NO: 243798 - DNA, 190 bp, Homo sapiens
tatttttcttacggttttcttgaccctgttttttccctaaacatgctcaaggtaccaactttgaatttcattgtttagttgtatgagaaaaacttgacagcttggcctcttcctattctctcattcacttctcaaaacttttttcttccatttttctcttttaacttcccattgctttacctttgacatt

SEQ ID NO: 243799 - DNA, 323 bp, Homo sapiens
caggtttttctgatcacttatagctaggatgatctattctagacaggtaggtctcacattattagaaaagctcatttttagcaggttgtaaagtatcatgttctacaaacagaaaatagggacagaaagaaagaaaacaacaaacaaatgaaaagatagagccatttttctctgaagttcatacatcagtaggctggcatataggttgctgttattttcttctgaagtttaagttgtgtagcttcagttcacagggttttaagaaagcacagcataacttttagtgatttcaaatcacaaaaaatggaaaaaaaggaaggaaa

SEQ ID NO: 243800 - DNA, 393 bp, Homo sapiens
gagatgtcactaggggatgaatgctgtaatacttcatatgctgcgagagagtcacatagcttgtgttgtctgcacgtggcaactagtagtctgtgaaacctttcattgccattttcacatcacatgacctggcagtgggaataagacatcagaatcagccactgttaagctactaaatcagtcggtgaggtgggggagggagaagacatcagcagaaagccgggaagagagcaagaacattcacattccactccaccaacaatacggcagttggtaaaaatcagcaggaaacgtgaaaaaaatcagaacccttgtacactgctagtgagattgtaaaatagggcagccactttggacaacagtctggcagttcatcaaacaaagagagttagc

SEQ ID NO: 243801 - DNA, 270 bp, Homo sapiens
gtgtggcatttagtggtgtcttcgcagttactaaaggtttaaaaacatcactatcttttttttaagcataatatagcaaatttttatttgacattcaagtgttgaaattaagcattttatgtaccatcatttggacactcaaatatattttcttaggtttataatttaggcattaaaaatacgtcctagtaaaagtttcaccatacaaagcctaggataggggcatcacagggctaattttaccaatcaaattaaaatatatatatattt

SEQ ID NO: 243802 - DNA, 270 bp, Homo sapiens
atcaagtttatcattactgtgtatgatccaaagaaccacaacaaattccaattattatcacttcatctatgtgtttcccctacatgctgagggtacagagcatgccttccttcctgaaaaaaatatgaatatgaatatttagttattttattttattgagtcaggaggctgaggcacgagagtcgcttgaacccgggaggtggaggttacagtaagctgagatcttcccactgcactccagcctgagcgacagagtgagactccatctca

SEQ ID NO: 243803 - DNA, 615 bp, Homo sapiens
tggactgagacgcggggagtctgcattttaacaagcttctcaaagtgattctgatatagatgagccaagatccacttactgactaatgcatagtatctaaacttgactaatgcttggtatccaaacattttctgcacgtcagtgtagcacacttagatttttacctaaagttttcttataaattgaatcatttagctcatgttaactgggtaagttagtggggcctgacttctgccttttgccactaggcaccatgatagtttggaatggattagtatttgtttatttttattttttatttatttatttattattttttgagatggagttttgctctgtcacccaggttggagtgcagtggcatggtctcagctcactgcaacatctgcctcctgggttcaaacaattctcttgcctcagcctctgggtagctgggactacaggcatgcaccaccacacccagctaatttttgtatttttagtagagacagggttttaccatgttgcccaggctggtcccaagctcctgacctcaggtgatctgcccgcctcggcctcccagagtgctgggattacaggcgtgagccaacgcacttggccaggaatggattagta

SEQ ID NO: 243804 - DNA, 525 bp, Homo sapiens
tataaaagaaacgagagtacctagatattaaagatattggcaaggcatagctcttgtaaaacaaaagctggttggccagatattctcattcgtttcaatctattctttgtcaaacaaaagtgatttcactttacaggaataggggttctcaaatgtgtacattttatcccaaactgctatgagacaaaaattaaagtatttgtctttccaatgaccatatttaaggagaaaaacgtcattcagccttatacaaaattttgaactagttcctaatacatacatcaagaggtgacaaaatatgattatacctataacattcctattctgtaaataattcatataaatcctcaggctcaagatgaccagttattataattcctaaacctatgcagtaaacattatgtgatttatatttcatattctgagtaaaatgaagttaagagagagatgagaattagaagaggagactaggaaagaattagcggaaaaaaaagtaaaaaggacagatagtggcaagaaaatagt

SEQ ID NO: 243805 - DNA, 420 bp, Homo sapiens
aaatggtagggtttatcttgaagagatttgtgagtttggcttttcttggaaaaagtatgtattagggttctctgcagaaacagaatcaacagagagagagagagaatgaatgagtgcgtgtgtgtgtgtgtgtgtatgtgtgtgtttaaaaatgtgtttattttaaggaattatctcttgcaattgtggaggcttggcaaatccagaatctgatggggtaagctggcaggctggagacccagggaagggttgcagtttgaatctaaaggccatgtctgctagcagaattccttcttgcttgggggaggtccatttttgttctattaaggccttcaactgattggatgagactcacccacactatggaagataatctgctttactcaaagtgtcgctattaaaatgtttacctcatcaaag

SEQ ID NO: 243806 - DNA, 479 bp, Homo sapiens
gtaaataaaatatcagactacagccatgcccattaatttacatattttacattaaacataatttacatttgtgtttcatctatggctgcttcacactaaaatggcagttgggtagttatagcagcaatcatatggcccacaagcctaaaatatttgttacttggccctttaagaaaaagtttgtcagctgggcatggtgactcactcctgtaatcctagcagtttggaaagctaaaatgaaagggtagcttgagcccaggagttcaagaacagtctgggcaacataatgagacttggtctctaaaaaaatttgttttaattagctgggtgtggtggcatgcacctatagccccagctacttaggaggctgaggcgggaggatcgctcgagctcaggagttcaaggatgcagtgagctgtgattgcaccagtgtactctaccctcggcaacagagtgagaccctgtcaaaaaaagaaaaa

SEQ ID NO: 243807 - DNA, 354 bp, Homo sapiens
acggggtgtccagaagctgctgcatggaccatgcatcgatcccggtcgcggggagaatgtgcccagctctccacacaacgcttctcaaatccactaaaatcaacacaataattgaaatattttcaagctgattacaccgcagcccgaggctagcctggttgctaagggtgagctccgcggttgctagggggagtaaatcatcttgcattatttgatttttgttatagatatgaaaccgctactcccgcgattaaatgtctctcagcctaacacctatgggacctggggagagggaagagaaaggctccaaccttgaccctgtcaaataaatatctctaactttttctgtcctca

SEQ ID NO: 243808 - DNA, 727 bp, Homo sapiens
acaggttgagttacttgcccaggattccagagctgggaggtaggcagcgaattgtggtggttaggaatatagacagtggagcagggtggctgtggtgaggattgaatgggttcgtacacaatgtgcttacaaagatgctgggcaattagcatccttgatggatgaaactcctgctttcacactcagttaacagtacaatatccttcaaagcaggctatccttttatgaagcgattgtttctgatgttagcctttcttatagtgaacagacatttccctctaacttccaccattcaattcaagtccacctttggcaaatgcaaaacaagccttattcttctttttataggtgatagcccccttctagaaatcagaaatactgatccttctctaatgactacttcttccttccagattttagaaatcttgagctgtgtcttcagtatgctgtctgtgaaataaggctatcattgcgtggcagccaagattttcaccagattgtgattcccttatgaccatttgccttcctgggtaggaagtgataaatggcctgataacgtgagtttttgccagtaataataataatgatgtgttaatatttcttgagcattcactattggtccagacactatttttagtgctttacatttatgagggtttaaaatcctcatgacaaccctgtgaggcaggtgctattgattcccattgaagagatgagaaaaccaagg

SEQ ID NO: 243809 - DNA, 673 bp, Homo sapiens
acaggttgagttacttgcccaggattccagagctgggaggtaggcagcgaattgtggtggttaggaatatagacagtggagcagggtggctgtggtgaggattgaatgggttcgtacacaatgtgcttacaaagatgctgggcaattagcatccttgatggatgaaactcctgctttcacactcagttaacagtacaatatccttcaaagcaggctatccttttatgaagcgattgtttctgatgttagcctttcttatagtgaacagacatttccctctaacttccaccattcaattcaagtccacctttggcaaatgcaatactgatccttctctaatgactacttcttccttccagattttagaaatcttgagctgtgtcttcagtatgctgtctgtgaaataaggctatcattgcgtggcagccaagattttcaccagattgtgattcccttatgaccatttgccttcctgggtaggaagtgataaatggcctgataacgtgagtttttgccagtaataataataatgatgtgttaatatttcttgagcattcactattggtccagacactatttttagtgctttacatttatgagggtttaaaatcctcatgacaaccctgtgaggcaggtgctattgattcccattgaagagatgagaaaaccaagg

SEQ ID NO: 243810 - DNA, 1093 bp, Homo sapiens
agtggaatctgagagatcacagtgtggggtttcattagagttgtctaggccattgtgaggaatctggattctattctttgtgaggtagaaagtcgctggagaagttaaaggagaccagaacatgatctgacttaaggttttataaaattaatctacctgatatgttaagaatacatgactataaaaaagtgacagaatgagttaacaagttgttgaagtaatccacgtggaaaatgatggtgtcaatcatcaaatggccaaataaaaagaggttcaaggatggggggttcatcagcaacctcacatcttggtaaagatttaggtagaagaaggactaattgatcctttaatttagcatcatggacaacttttggtgacatttataagagcaatttcaatggtggcgttagaggcccagtgtgttcaaggaaaaatgttatcaaggagccacagacaaagaacaaagactactctttttaggatcttttctgaaatggggaacagagaaatgggggagttgtttaaagagtatgcatgacttagagtaacagtgtttttaaattaagggaaattccagaacatttttattattctagaatgatttaagagagtaggaaaattatgtggaagacaatgctcataattattagagcagacaatgctcataattattacagcagacaatgctcataattattagagctacaccctgagcaagtaagcaaagcagtgagaaaagtgagcctcagatgagtggttgcccttcagcaggaacatggacagctcatccacagtaatgggagggggcagggggatgattgtcctgttgggaaatgtggaacttcttcctgacccatcctggtttactcattaaatgtgcctcaaggtcatcggatgaaagagaagattggaagaagctactgaaggtaaagcagaaatataagggataattcctcaactacagtggacagagctggaatctgagccaagcggagcagtcatgctgagttcaggaagcctcactgctaaatgccacctatcaaagtggcctcccctgaccatcctgtgtaaaataatccctccttcctctcta

SEQ ID NO: 243811 - DNA, 496 bp, Homo sapiens
aataagatattgaaggtgttctgtgatagaatctgcagaagatgataacagttcctcctatctttgtatgagcacggtgctcctctcatcaagagttggagtctatttccccttcccttgaatcatgtgacttgctttgacagaaagaatgtagcagaagtgacgtggcaccagtccaggcctgggccttaaaaggtaccttagtttctgcttttgctcttagaagtcagctcccatgtaaaggatctcaggctagattactgaattatgagaggccacatggaggacaaccaagcgtccccactgagagccagcaccatggccccggacacacgtggccaccttggaccctagagccccaatcaagcccaatcaacaccttgtagagtagaaacaaatcacccctggagagccctgcccaaattgtaaaatcgtgagcaaataaatagtggctgttgtttcaagccactaaattttgaagtggtttgctatataa

SEQ ID NO: 243812 - DNA, 442 bp, Homo sapiens
ttgagggcctttttactagctacttgcttcccaatttagggttgcctagcagggttaatttcaacataacgaaaggtgttaactggctggccgcatcattcactggtgacaggggcaagtttaatgagttttgtgctcagatcgctgggcctcctggctgctcttgtccatctctgcactttggtcctaagcattctgagactcagtcagttgagggtgaaagggacctaccagccagttgaggggcatgttgttaacaagaaatccatcaagtcatctaaagattccttcattttctgcagctgccccttgctagaagtggaggctgtcagacacttcctcaaaggaggcagcattgcagaacactgagtagatgtcgcctgccatcaccctcatatgcttggcctgaccttggatgttctgtggtcatcatggatgttgg

SEQ ID NO: 243813 - DNA, 283 bp, Homo sapiens
gaggctgaagactgagttcgcagggctggcctgagtcctggggctgcaggatttaggttggggtcagagtgagcttggaggttcagaccatgggtactggctagagtctggggctttgggagctgggttttactgaagtcggttctgtggtttgggtgtaaggcaaagtctggtgctcacttccttctcctttccccaagcatattgtatcttgctcaatgctgtgcttcctggagttggggaagatgacacagtgaaacttttcttcctgcccttttcaatg

SEQ ID NO: 243814 - DNA, 405 bp, Homo sapiens
ttttctaggcagtatcactctgagaggactatggaggatgaatcggagagaagtgaggctagtatcagggagttccatttaatagacaatttaatgaggccaggcagagatgatgaaggcctgagttaagaaaatgacaaaatggcctgaatcccaggactttggagccccaggtgggaggattgcttgaaaccaggagttcaagaccagcttgggcaacatagtgagaccctgtctctacaaaatagaaatttttaaaaagggaaaagaaaatgacaaaatgaagaggagggggtgggtttaggagatgtttgggagggaagatcaataggatgtgagaactgattggattggagtagaagagaaagaggaatatagggcatgtgtcaaggtttggtgaatgca

SEQ ID NO: 243815 - DNA, 540 bp, Homo sapiens
ttgtcaaataaaacaaattcagatttagggaagatttagatacacatgtaaccttaatattatatacctatttttgtaatactttatagtttataatgtgttttactggcaatctaagttgaaatctagtttacttttagctacaaataccctccaggaaggcaagttttataactacatatttttgttaagttgtatgtggtactataaggcacaacatgcctctactttgaaaagaatagccaccaagtcctgaatggaaatgcaagaattgtgaaagaattcagtcacctaatttgttgattggagaggatttcttttttttttttttttttgaaactccatctcaaaaacaaaacaaaacaaaacaaaacaaaactccttttgttgctttacaccttctctcacatggtatgatatactgataacacctacacttttttggaagtgttttcatatacttcctttggaccaataaaaatgaaccttctgagatgtggaggatatgggctattaccccaattttaaaggaaaaaaaaa

SEQ ID NO: 243816 - DNA, 486 bp, Homo sapiens
cattgtcaagattcagttaagattcagaaggctagcatcatcacaaggatcactgctgttgcttttttatagccacctcctcttcctgcctcttcaaactgtggcaaccactaatctgttctacatttctataagtttgtcatttccacgctgctatacaaatgaaatcatatagtatgtaacttttgaagattgaccttttcactcagcaccatactctggtgattaattctggttattgtgtgtaacaatagttcatcccttcttatttctgagcagtgtcgtggtataagaatatcacagtcgaaccactcacctgttgaggggagtctgggctgtttccactttttgatgactatgagaaaagccactataaatattcatgcacagattttaatgcaaacataagtctatttctctgggataaatgtacaggaccccaatcactgaaccatatagtaactgcctatttagttttggaccaaa

SEQ ID NO: 243817 - DNA, 444 bp, Homo sapiens
ccttcagcttgggctatcatgctgatctgtttgtacaaaagacagagaggggaactttccccacagtgtgcaaggcccactaggaggtacgacccaaacttctataaaatctgtcagaccaaggtcctgtcaaactcagttctccacactcacaaagaaggcctgctggccgggcatagtggctcacacctataatcccagcattttgggaggccaaggtgggcggatcacgaggtcaggagttcgagaccagcctggccaacatggtgaaaccccatctctactaaaatacaaaaattagctgggtgtggtgatgcgtgcctgtaatcccagctacttaggaggctgaggcagcagaatggcttgaacctgggaggtggaggttgcagagagccgagatcgtgccactgcactccagcctgggcaatagagtaagactctgtc

SEQ ID NO: 243818 - DNA, 448 bp, Homo sapiens
ccattggaatgaccgagaagcccatgtctcattctcagacgggggattttgattctaatgacagtcatggttgagagtccactgtgttaaagtctcttcatttgaagcatctgatgtgaattctattttctgcttaaaccccagacatagatgttaagtttcaaaattatgtcgtacattcactcccactacatactcattgaatgcttaccatgtacagactctgtgatagactatggaaatacatagaaagaaattccctgtttttaagaactttacctagtgtttagaaattgcatttaaaactgataattaaaatactatagaccttggcttaaaggatgcaccttgtaatctgtaatcatatttgtagttatatattgctttgaaaatacactgtagacagtaagacaaaaaaggaaataaaaagtacatgaattgcgaagga

SEQ ID NO: 243819 - DNA, 469 bp, Homo sapiens
agagtgtagtgtttcttttatttactaatttactgtagaggttctggaactggggactcagtatcacatctatcagtgtaattgttataactgcatttgtaacaacagttttggtcacagaatttattaatgggattgtatgtgtggtaaaatcatgccaagcttaagtggaacaatacataagatgctacatttaagaactccagtgccttggtcaaatccgtccaaggatttgaatgactaccacatgttcagtattcaaccagggtctttgggatattcaaaagatatacaaaagaagactggaattgaatgtaattgtaagtagaagtttagagaaggaagaggtaaatgtagactagagtgtttggggattttaaagtagtggttacaagttaaagaaaaataaaatgttcatcattttttacctctgtttcttgctattaaaaagttcacttgaaaagtaaaa

SEQ ID NO: 243820 - DNA, 496 bp, Homo sapiens
ttttttgcctttacttacaaagaaatacacacacagagagagaaagaagaagccctaaattaggataggaatgaaaaaaagtaaattttttagtaaggagtaaagctctactatttactgtaaacagcaactatgtaagaacaagtgaataacaattctcctgatttttgatgttttaaaattacaaaaaaaaaggcccatctgtaatatacgccaacatttagcatgtactgaaccagcattccttaactaaaacgacgtatcagaatcaacacggaaagtttttaaaaataggcctatcctctcacagacgtctttgaaggacttcaggggaaatgagagctacatattttggaaagaaaaaaaattccccaataattttgacgttgccccaccaattttgaaactcccctgaaggaagaaaagcaagatattccctctcaagtacttcatttcttcagaaaataaaatacagatgtgtccattaaaattataa

SEQ ID NO: 243821 - DNA, 251 bp, Homo sapiens
agctggcatcttgaccttggacttcccagcctccaggactgtaagaaaataaatatctattgtttaagccccctagtctgtgggattttgttatggcaacctgagcagactaatccacatgtctaatgtggaatctcaatgctctttttgccaattctgccccactgaggaactaggaaagcagtcccactcaaaattataaaagcacaagcatgaatgatgattacaaataaaaaagactgttttggaga

SEQ ID NO: 243822 - DNA, 388 bp, Homo sapiens
gagacacggtctcactctgttgcccaggctggagtgcattggcaccatctcagctcactgcaacctctgcctccccagttcaagcggttctcccacctcagcctcctgaccagctgagactacaggcacgtaccaccacacccaactaatttttgtattttttggtagagatggggtttcaccatgttgggcaggctggtctcgaactcctgtcaagtaatccacccgcctcagtctcccaaagtgctgggattacaggcatgagccaccgcgccaggccaattaagtgaccttttcaatatacaagatagtttattttttcattattctgtgggaatatataatcacctcagttttcagtaacaaaatgtgccaggcacattataga

SEQ ID NO: 243823 - DNA, 415 bp, Homo sapiens
ggtgatccaggagctcagattagacagtgccagcctctaccattctccatgtacagagagcattctgttcccagtgaagccacagtgcctgatccctgggaagctggcctggcctttgcccccttccagaatgaaggacggctcggaccaattgccagggccatctgaactgtgctttacagggcatggcactgccctctgataaggggcaggcatccagtaccccaggacagggtcagggcaggaatccagtgggcacattcagagaggctattttcccatgagtagattcaatcctgatacaccccaccctctccaacctcaaccttcgaaagcgaggtgaggcctttctcagaaaccaccctgcttgctgttggctccagcagatctgctttctggtccacatttaacaatc

SEQ ID NO: 243824 - DNA, 315 bp, Homo sapiens
aggcatgaagtttaaaataatgtaatgttaattttgtgctctgtaatgtatatcgtaagattgaggtcttaatgtttgtattaagtaagtgaaaatattcaaatgaaacttgtgtagaaaaggaactgcctgtgttcagaaagattctgaacaaaaacaagtgaattttcagaactgaactaacagttgccagagggtgtgggttctgacgatgtcctacctgaggcaggctttgtgactttggaaagccttggttttcttatttttaaagaggatctagtccaacactggtctactcagacttcctcatttgta

SEQ ID NO: 243825 - DNA, 460 bp, Homo sapiens
gagaaaattttcctgttgctgaaggaaaacctggtatgtggattgaagtagttcacattctataagaagcaacataaggaacaggcaccaacacctaggcataacctggagatgtaagacgtgtaaggacaaaggtgggacacccagattgcttaaaaggaaaagcactcgggctaggtctaatatctgtcagttcctgtgggccttagttcctgctattttctcttcctgtaactctccctcctgtcacatgccacctgattctcttggcttgatgaactcttgttcattttcccaaaattccaaggggatcttcctgattccatataccagttaagtgtcttctgtgcatttttctgtatcaccctctactaaccctctgctggcactcaccactgcataatgtctatttaatttaattattcttactattaaaatgtgcacattttgaaggcaaaga

SEQ ID NO: 243826 - DNA, 356 bp, Homo sapiens
tcttctcaactccagatacaggataagcaaacaaaccaccaaaagactccaacctggaaaatttcggccttcatcccaccatcccaacatagtgtgcattagaagaaggagctatgttcctcaatcctgaaatcttttctttttagcagtcaccctttgtgggattgtgtccagatacccaggactgcattttgagaccacagcactttctagaggaaaactccagactgctactagattccttgttgtactccatggccagcttcttttggagatgaagcatctaagctttaagtcaagtctgcaagtttgagcatgattcaaatgttgaataaaacctggagatgacaacttta

SEQ ID NO: 243827 - DNA, 405 bp, Homo sapiens
atatgcaaaatccctttctctagctctcctctctcccaaatcgtacccctactctctagttgagaagggaaacaacttcacctgccaccactggatgctggccactgggagtggaagtctaggttcctccctgggcctctactgacaccactttggcgggagaatcgagcactgtttcactgctgctggcctgagggtggaagttcatacttctcacttattccactggccccgccccagagagggaagcagaatgctgcctcacactgtctcactgcctccaagttgggggtggaagtacagactcttcattcaccccaacagacaccatgttatcagggaaaagtaaaaaaccatgttggtgctaccaggcagaggacagatattcaagttccctgcttagcc

SEQ ID NO: 243828 - DNA, 439 bp, Homo sapiens
ctgcgcctggctgtgccccgccctcctgggtccgtgtacccgtctgtcctgcaactccccatttgacccagaccctattcaggtatagcctctcttctgggtcagagctttccaccaggctttgattcctgtgattgggatttggagacagaagtgatagggggaggccgggcgcggtggctaacgcctgtaatcccagcattttgggaggctgaagcagacagatcgcttgaagtcaggagtttgagaccagcctggccaacatggtgaaacctcgtctgtactaaaaatacaaaaattagccaggcatggtggcaagtgcctgtaatcccagctactcaggaggctgaggcacgagaatcttttgaacccgggaggtggaggctgcagtgagccgagatgacaccagtgtactctagcctaggtgacagagcaagac

SEQ ID NO: 243829 - DNA, 407 bp, Homo sapiens
atttgggccagtgaagccaaatccttacagcaagcagcatgcagcatacctggctctttgctgattgcaaataggcatttaaagtatgaatttgagccgggcgcggcggctcacacctctaatcccagcactttgggaggctgagacaggtggatcccctgaggtcaggagttcaagaccagcctggccaacatggtaaaaccccatctctactaaaaatacaaaaatgagttaggtgtggtggtgtgtgcctgtaatcccagctacctgggaggttgaggctggagaatctctggaacctgggaggcagaggctgtagtgagctgagatcacgcaactgcattccagcccgggcgacagagtgagactctgtctcaaaataataataataataataaataataaag

SEQ ID NO: 243830 - DNA, 515 bp, Homo sapiens
  misc_feature (16)..(16): n is a, c, g, or t
cgcctactactactanatttcggccgcgtcgacctctgaccaaaaacagtttctgccctcacttgaatttaaaagcctgccagaattgcagtggggagcagaggcagaatgtatttatctctgtaagcacagccattaagatgtgagcatgaatagctaagagaaagaacattaagggagaaacaggaagaaatagaaggtgaggctatgatggaaggaaatgatgacgcatcaacccccaccaaaagctttttacagtgccgggggagtggggcacagggaaaggcatctgcagcgattgggagaaagaacccgggagtgggctgaggggaaggctttgcagtgggagggctgtgatcagcgtgtgcttcatgcaaagagaattttgagagtggacataacaaacaggaaaattgtgcttgcatttctgtttgtctgtagaatcactgtggctctgaaatccaccccctctgctctccaaacactaaagaaagtctccagatggaaaaatctga

SEQ ID NO: 243831 - DNA, 351 bp, Homo sapiens
gcaagcgaaaccaattctctgttctcacagagcttttccctcaagtagagagcaagcgaatacgaaaataaccatgatcaccgtaaatagttgtataagctttgcggaaaataaaacacggcgcgacagaaatgcccagggccatgcagcttgggatggtctccgaaggggactctgtcaagatgatcttcggagactccataaacaggctgaacacacataaaccagccctgtagatgtttgaggagacattgttgccagtggagcaaacgctccacaaaaacggttgtttttcacttaagaagtcatatccatccttcacccacccagataaggatatttccatttaaa

SEQ ID NO: 243832 - DNA, 583 bp, Homo sapiens
tagatccctgaggaatcaccacactgacctccacaaggattgaactagtttacagtcccaccaacagtgtaaaagtgttcctatttctccacatcctctccagcacctgttgtttcctgactttttaatgattgccattctaactggtgtgagatggtatctcactgtgattttgatttgcatttctctgatggccagtgatggtgagcattttttcatgtgttttttggctgcataaatgtcttcttttgagaagtgtctgttcatgtccttcagtgtggttgcccttatttaaatctcactcatcatgggctaatctttcaaatttaaaatatctcatgtacccagtgttttataagcactaacatattgtgtaacataacattttgttgtcattacaaatacagaaattgataagattgtttggtatgtgtcaacagctatggtagtagaaaattccatgctattgtaagctttctgttaaaatatccaatttgtagcacaccacattatggtaataaaagcttcctaggcaacaagcatacttaccagtcatcaaccaaggtcatatcttgtacttccc

SEQ ID NO: 243833 - DNA, 189 bp, Homo sapiens
cccatcaaattgtaagtcactgcaatgtaaccccttatccccttgttgctaattatagataatccccaaacaatggcccaagaaccctccatattcgaatggtatgggttaggagcagatgttataggacgggaccccataagaatcttctctctgagtcggttgaaaacaataaagaaatccagaccc

SEQ ID NO: 243834 - DNA, 1104 bp, Homo sapiens
ggaaatacaggtttggtttttggggttttttgtttgtctgtttgttttgagacaagatctcactctgttgcaccagctggaatgtagtggcatcatcatagctcactgcagcctcttaactcctgggctcaaacaatcttcctgcctcggactccggagcagttggaactacaggcatgcaccaccacacctggctaatttttaaattttttaatgtagaaatggggtctcacgatgttgctcaggctggtctcaaactcctgacctcaagtgatcctcccacctcgacctcatgaagtgttgggattataggtgagccactgcacccggcctacaagtatttgtataccaatagcttaatattccatagtccacttaggtaaaataagataaaagacaattcagtttacatttctgaacttctaccaatatcttttactcaagacaatgtgctttaacttcaagcccccaattttttttttttttttttttaagcagagtctcactttgtcgcccaggctggagtgcaatggcttggctcattgcaagctccgcctcctgggttcacgccattctcctgcctcagcctcccaagtagctgggactacaggcgcccgccactacgcccggctaatttttcgtatttttagtacagacggggtttcaccctgtcaatcaggatggtctcgatctcctgaccttgtgatccgcccgcctcggcctcccaaagtgctgggattacagacgtgagccaccgcgcccagccccaaatttttaacttatgaaagtttttcataaaaccattttagcaaaaatactagcccagaaacagcatctctcttcacctcttataagagaccaaagagtcattcttactatctaaggtaaatacatctcaatttaagagatctattacttgatctaaaagaccatttgcttttgaatcatttagtagtatgtactgactattactggacttagctaagttgtaacacataccaataagtggctggatttcacatcacccctgccacaataaatgacaacttttcatcaatttaaaaacttgaaatttcaagtcaaaataaagaaatgattcttttt

SEQ ID NO: 243835 - DNA, 561 bp, Homo sapiens
gctaattatttatcttctttaagcctcagctacctcctttttcaaatggagaaattaattcattcagcaaatatcttactgtgcatctgtcatatagcaggtgctgtatgaacaaagtgtagattctctgctggtgaacaaaatacataatacctgccctcacagagcttccagtctagtgattgtacagcatcaacctcagagggtagtgtgggaattaataagagtatctggtacatagcaataccttaatacatttcagatgattttgattttattcataattttttttcagcgttgtatagctcagttctttttagttcatttatattaatgcctttgtctctgaaagtctgtcccatagggaagtcatctttttattccttgatggctctatgcaacatcctgaagagctgggagaatggaaaaatgcatatacaggattcttttttttttttcccaagacagagtttcactcttgttgcccagtctggagttgcagtgagccaagatcgtgccactgcactcaaacctgggcaacaagagcgaaactctgtctca

SEQ ID NO: 243836 - DNA, 641 bp, Homo sapiens
gaatgacagttcctctatcaaaatacatgtttctgtttgtcctgaacactcaggaacaaagggcagtagaacctactagcagcaaatgaaatcaagtaccaagaatgagattatgttttttaaagtggacttagatttgtagtccaagatagcacgctaaacacttgcctttatatctttgttcctttccagaaatttcattgaaatgatagtaaagatatgtaaaaagaataataaaacaggataggattctgtcagagaactagaaatttttaagaattcctggaagatggaaaatatatgaatggttacgtaaataagccaaaatagaaaaccaaacaaaatactaggagctagattcttacatgaagggagccattcttagcaaaatcctgatgaagcagatagcatagtcagcagattacaaagaagtggatttgcctcttgggtagtcgtcagagtaattagtcgaaggtcttgctctggcaggaagacaaagtcatgtgtcttcataaatcgagctggtgatataaatatgaatattttgaaggtgtgtgttagttgtgagtcctgtggagaaccaaaacaaacctcaactaaaaacattgaaattctgaattcaaaaaaaattttttaaaggt

SEQ ID NO: 243837 - DNA, 486 bp, Homo sapiens
agactattctgtttactgatcattatggtaaccatattcaccttgtctttggtggttaagtgcctcctcttggcccctgtcaccttaggatcaaatcatcccattgtgtttagggattccatctaagagggaagatccaccacagagctctggtgctggggctatcctcatgaattcgtcacagctgtagtctcctggtttggatgagcagattttacaccataaattatctttagcatttcaatcactcatagactttggagaagtccctctacagtatcctaagtaggttctgaagttttggcttcatttattgcaggccaatttgggtccctttttcagacaactagcctagcaaaatttagagccattcctaacccctcaagctaaattgaattcataatctctgcttaatgttcccgtatcaataaatctgacctggtccaactttatattttagcttgatcctacacctttaaaatccac

SEQ ID NO: 243838 - DNA, 355 bp, Homo sapiens
gcatggtaacacctcaaaatcaagcatccagcagctgaatccgaaaaacacaaggaacaaggtggtctcaaaaatttggagtgaagccagaggtgaagtgagactttctgaagctgcaacaatacctctactctacttaaagcaatttctggtgtcatcaccatgagaaggacataccaccccagaataaggagaggcaaatggattagacttgaaatgaacccagagcctggattcaagcacagccaaacccagcttggatctcataattcccagtcctgtgcagaagaaccgtgagacctacaatatatttccataccttctttcaagaaataaatgctcaattttgtaagac

SEQ ID NO: 243839 - DNA, 324 bp, Homo sapiens
gaagatgctttcatgatctacacatctgtcattgctgttgcttatcaccgttcctgggaatctggcacttcatcagccgtctttctttccatgtaatgaacactgttctccctgactcaggtgtcatcaccatgagaaggacataccaccccagaataaggagaggcaaatggattagacttgaaatgaacccagagcctggattcaagcacagccaaacccagcttggatctcataattcccagtcctgtgcagaagaaccgtgagacctacaatatatttccataccttctttcaagaaataaatgctcaattttgtaagac

SEQ ID NO: 243840 - DNA, 584 bp, Homo sapiens
  misc_feature (6)..(6): n is a, c, g, or t
  misc_feature (15)..(15): n is a, c, g, or t
tctgantcctttgcncctcctactactttgctgcgagaagacgacagaatgggattgatttacagttttaagaaataatattggctgggtgcagtggctcacacctgtgatcccaccacttgggagaccgaggtgggcaaatcattggagcccaggagtttgagaccagcctgggtaacatggtgagaccctatctctacaaaaaatacaaaaattaggcaggtgtggtggcacatacctgtagtcccagctacttgagaggctgaggtaggaggatcgcctgagcccacgaggtggaggttgcattgagccaagatcatgccactgcactcttgcctgggtgacagagcaagactctgtcttaaagaaaaaaaaaaaaagagagaagggaaggaaataatactgagagatccatatacccttccccaggcaatttcttggaatgataacatcctgttactattgtacaataacacaactaggaaattgacattgatacaatccagtgaccttactcagatttcatcagttttacacatactcgtgtgtgtgtgtgtgtgtgtgtgtgtgtatcatattctgta

SEQ ID NO: 243841 - DNA, 809 bp, Homo sapiens
agtgagcctaacagtacatagctttcttttcctatgttagtgagttacattatgtaaagcatattcatgaacttatatagattctgggtagttctgatgatatgaaactaaattttttaaataatttaactgaatattttgatattgcttgtatcaggaatttcttcactaaaagagcatatatgcaacagtgtgacctctttgggctcaatacaaaagtgatttgtacagtgattctgtgattttccaccataataaattgagaaaggcaggtcttggtaaaactttatagtcatgtatgaatacccatattcaggtcttcacctccaagagacattcattttaatttatgtcgttgtttatcatcaaggaagattttgaacttttgagaattggcctttatctgtcctaaacctctaacattccactgtatcttaatgaaacggaggttctgttctttctgcccagggcttctgataagtgtttgcagactatgtaaacttctgaataataactttcagtaaggcaggagtcttaaacctcttagtatcattttgtgcagtattattctgctctgtaagataatgtgttatcaatacttcataagataactttggccagagaatgaataaaatttatagtcactttcaaactgctccctttttttagggtgtgggtcatagatcatgcagctgtctgccaacagataatcttgatgagtaaaaagaagctaacagagaaaaaggtggcttagtctaaaacacttaggaaggacttaaaaaattatttcccaaagaattagggagtaa

SEQ ID NO: 243842 - DNA, 452 bp, Homo sapiens
tgctcagtcgccaggctggagtgcagcggcgtgatcttggctcactgcaagctccgcctcccaggttcacgccattctcctgcctcagcctcctgagtagctgggactacaggcgccaaccgccacgcccggctaattttttttgtatttttagtagagacggggtttcaccatgttagccagaatggtctctatcttctgacccgtgatccacccgccttggcctcccaaagtgctgggattacaggcgagagccaccacgcccggccaggcatacaactttgatgtcgctggggtcaaacttcagcagtttgcccagtttgtaatggggttgtttttttcttgtaaatttgttcaagtttcttacagatgctggatatcagacctttgttggatgcatagtttgcaaaaattttctcccattctgtaggttgtttattgatagtttcttt

SEQ ID NO: 243843 - DNA, 414 bp, Homo sapiens
ctttttattttcctacttctgaacatttgcagagttcctttctgttcaggaccttcaccctaaacatgtactctcctctgcctggaatgttcccttctccctctctacctagctgggtgctcatcagcttgcaggtatcaatttttgctgcctgctcctctgtaatactcctatgtacttgtctaaatattcataaaattagaaataagttctattaataatcataacacatatagaagcaagcaaattgccttgctcctagtagatgctcaaatatttattgaatacatgaatgttaaggaaggtcatcaattaggacagtgtttacatataagtaataaaaatgaattgtggcttaaacagtttactcttatcgcataaaaatgtctggggttaggcaatgctgtacacggt

SEQ ID NO: 243844 - DNA, 361 bp, Homo sapiens
tgtaaatttgcatgagcatatgcagatgaactgatttactacaaaatgttaatggtacttatctctaatttgcaacaaatgtgtataattttaaaattggggaaagtattttcagtttaaaaataagggagcaaaacctaatcattcactcaggcatagtaagataaagttaccacatatgtaaaaggtggtctgaaaggataatgcatagtgccatgtccaaaactatcttcttaacctgtacaatattaagctactaaagagttcagtgaagaaaaaaataaatgcattgcagtcaaaagacataaatgaggagcaaaacaatggaggaaactaataaattaatacatctgcggtgctg

SEQ ID NO: 243845 - DNA, 682 bp, Homo sapiens
gttccttagatcctgggatgaggaggtggaccagcagaaggtgggcttgtgaaggcagcccggggtccaaatcctcctggctcttcagcttagcgggttagttaacattcagaagccttcatctcccatctgcaaaatgggcatgtccaactcagaagctgccttgaagaaagggtctacccagcatggtgcgtggagcctaagcagtcagtacttcaggacttcacccggcccctttccaataactgctgctgtcgccctcacaggatgtcaccttcagcgtctgaaagctgggtttgatgcgtctggaaaggcgtccctgacaggcgtcgttgccaggagcccctagtgccaccagcagccagcaggggagggcgtcctctgcccgctcacttctgacccttctctcgttgcacccggaacatggtgcagctgggagcagcctgggctgcgcggaaggctcagatttggggacggcccttgccagtgactgtgagctggggtgtcttggaaactcccagtctcagcttctccatttataagatgagaatgatcataccagactcaggcaaggttgtttgtgcattagtgaaatcagacgtattaaataaagtaccacattgatcgtggagttgttgaataaccaagaacacgcctatctgtctccaaaaaataaatgttg

SEQ ID NO: 243846 - DNA, 512 bp, Homo sapiens
gttccttagatcctgggatgaggaggtggaccagcagaaggtgggcttgtgaaggcagcccggggtccaaatcctcctggctcttcagcttagcgggatgtcaccttcagcgtctgaaagctgggtttgatgcgtctggaaaggcgtccctgacaggcgtcgttgccaggagcccctagtgccaccagcagccagcaggggagggcgtcctctgcccgctcacttctgacccttctctcgttgcacccggaacatggtgcagctgggagcagcctgggctgcgcggaaggctcagatttggggacggcccttgccagtgactgtgagctggggtgtcttggaaactcccagtctcagcttctccatttataagatgagaatgatcataccagactcaggcaaggttgtttgtgcattagtgaaatcagacgtattaaataaagtaccacattgatcgtggagttgttgaataaccaagaacacgcctatctgtctccaaaaaataaatgttg

SEQ ID NO: 243847 - DNA, 631 bp, Homo sapiens
gttccttagatcctgggatgaggaggtggaccagcagaaggtgggcttgtgaaggcagcccggggtccaaatcctcctggctcttcagcttagcgggttagttaacattcagaagccttcatctcccatctgcaaaatgggcatgtccaactcagaagctgccttgaagaaagggtctacccagcatggtgcgtggagcctaagcagtcagtacttcaggacttcacccggcccctttccaataactgctgctgtcgccctcacaggatgtcaccttcagcgtctgaaagctgggtttgatgcgtctggaaaggcgtccctgacaggcgtcgttgccaggagcccctagtgccaccagcagccagcaggggagggcgtcctctgcccgctcacttctgacccttctctcgttgcacccggaacatggtgcagctgggagcagcctgggctgcgcggaaggctcagatttggggacggcccttgccagtgactgtgagctggggtgtcttggaaactcccagtctcagcttctccatttataagatgagaatgatcataccagactcaggcaaggttgtttgtgcattagtgaaatcagacgtattaaataaagtaccacattgatcgtgga

SEQ ID NO: 243848 - DNA, 157 bp, Homo sapiens
ctcatctgaaggatctttgatggaggaagaagacccagactcatctgaaggatcgtcagaggagggtgaggaagactaattaaacatggagaaaccaaattggacaaatcctcaccaccaacggtgatgattacaataaaatcaagtttgagaagct

SEQ ID NO: 243849 - DNA, 346 bp, Homo sapiens
ggctaaggggagtggattgcttgagctcaggagttcaagaccagcctgggcaacatgatgaaaccctgtttctacaaaaaaaaaaaaaaaaaaaaaaaaaagtcaggcacgatgatggcacaagcctgtggtgctgaggcaggagaatcacttgagcccaggaggctgaggcttcagtgagtctaaatcatgccactgcgctccagtctgggtaacacagtgagatcctgtcatacacacacacatacacacacacacacacacacacacacacacacacactggtacaaagatgaagggtatatgcttacttatgagtaaaacattaggtggtactggaaatata

SEQ ID NO: 243850 - DNA, 281 bp, Homo sapiens
gatatttaaaattacactcagcttgggagaaaagaacattgagtagtgggaaaaagtctcacccacagctgttatacaaatgtacagacaaatgtctggagaagatagcatgttttcaaatattttcgtctctttgtcagtctctgccaaatagaccctcaggggctctctctgtctcttggatgaacactctcctgagggcttggagacatccacagtatgagttaaccacccactgcagatttaataaatgttcaaataaatgagattgaatgaaaaat

SEQ ID NO: 243851 - DNA, 409 bp, Homo sapiens
ttttctttatatcttgaggataggaggagtgcctgttttgttcaccactgtttccttggcactctatatagtagttggcaaatagtaaatactcaactaatattcaattaatatacatataagttgtttttgttaagtccacatttatctaaactattgggatccaaatgttatttaatggatttttatttaggtaataattttgctcttcagtttaccatgggcctgtagggttatacattaaatttgataattctgtcatttaatatagctatattgctgtaaaataaaatgccaaaataagccactaggaagtaggtcaaatccaaaggtgataactcttatttttgctggtttatattcatggattcattgaataaatatttatcgatttctgataagtggtgtg

SEQ ID NO: 243852 - DNA, 821 bp, Homo sapiens
ctgccactctctgccatacctcttttctttcagaagtatatagtatccaaatcaggtgccttttcccaaaaggctccacagacacttcatccacagtacagaatatagtagctattaagttgcacagcaggtctctcaccagtaggtttataggagattcaggagaaatgaagaacacatgttcctcagtcaaaggacctatctctatgggaattacagaggaaaggggacaagtagaaggctgacccaaaatatccataacctgaattaacctgtcaccagatgggaaaagttactgacacattacagtccactagttctcacctttgtgattccctcaatttgtcaattttgaaccacttgacaagtatttcctagctgaaagttttgttctaggctctcctaattctcttatctttgcagtctctgcatcatccagagtgtccttctgcaatccctcttccaacaccctggcttattgcaataacaacatacagcctcccatctttctttcttccccttctggattggtcattgtaggattattcccttcagtaaagagttctaactaagcagagaacacagcaaactttaatctcttcttttctttttttgttcttagattatcccaaaactgagtagctgctgctaagatttgggtaatagtttgcctttgccatcctactaccttttccttaacttgggtttggatagtcagtgagagagctaaaataaaggtggttagagccagagggcaatttttatatgaccttggatccatgccaataaacttttagaatgtctgaacaagtcacgtcgac

SEQ ID NO: 243853 - DNA, 370 bp, Homo sapiens
ttccacactcagtatataattcttgaatgaaaaagagaaatgaatcaagggcctctgattccatgaagccctccccaactgcccaccacccatgacatacatcacttaagcagattgatcattcctctcctatcccattaacagtttacatttcttgggcaggcagtgtctaagacctttatatatgttgtctgatattatttgtcagggtctcacgagggtctttagaacatatattaaccatgcattcatgtaagcatttataaacagccttacaagtagaagaattccaagagtactcttttggaatttagacataaaacattataatgccttttggaacagctaaagtcaggtaacacccaattcc

SEQ ID NO: 243854 - DNA, 409 bp, Homo sapiens
cacaaatttttcatttaacacagttgaatatgatttcatgactaaggttctcattgctgagttatcattcttcagctggagaaggggagagggaaggtgcactgattcccaaagatcccctggcatattgtgaagcaagattgaaagatgtatcctggaaaaaattcattagtttgactctctttttaactgcattcctataaattgagactctactcatttaaggtggttatgagaattgagtggatataatgggatacagagggtggcacattgcaagctttgatgataaattatggatgttatgatatgtatgtactttcatttgtaagtaatgatttttataaaatattatgatacatttctaggctgaccttgaaggagaatactaacataactttggaaaacc

SEQ ID NO: 243855 - DNA, 593 bp, Homo sapiens
aagcaagtcaagatgttccaaacagaaggacctgccagaggcatggaggccaggaagcccagcatccattcgggaaggtcatctcaaatgtaaacacttagaataaggtaatgaggggaatgatgacagccagccctcccgtctccccagaacctccactccaggaaaagccagtcctccccatccgcaggctctgccgggcctggactcgactgtttgctgggcttctctctcaccagcacctcccacgagttggtcccagggagtccctccaaccgtcccctgcacaggcttcagaccgagagatgcagaatctctcagtaaccattagggctgcctgtgccctgccggtgctgcagggttggcattggaaaaaacaccttcctccggctgggtgcagtggctcacgcctgcaatcccagcactttgggaggccaaggtgggcggatcacgaggtcaggaaatccagtgtggacttgagcctgtagtcttagctacttgggaggcagaagtgggaggatcgtttgaggccaggaattagaatctgcactgagttatgatcttgccctcactccagcctggacaacaagcgg

SEQ ID NO: 243856 - DNA, 452 bp, Homo sapiens
aatagaatccccacaaacaatgttacaccacagaaaatgttaccttcagccatcctcaaataaaatgctctgtttatccactgtcctaaaatactctcagctgctaatatgcctctgcagaagtggctgattttgagaaattttttattatagaaaattcacgaggagctgaaaaactgacgtgaaataacctagaacagtatgattttggggtatatgtccttagataatttctcagtggagcaaactctattgatgacaacaaattctgctttttcatgcatcatttgggatattggcattgtatgtcccctggggaatatcaattacaccatcatattggcttaaggaaccaataccttcctcctacacaggcagaaggacaaacatgcattgtaccaagagcctaaaactgctattgcctgctaggtctgtgcatacaggaaggttgt

SEQ ID NO: 243857 - DNA, 426 bp, Homo sapiens
tgagaaaattcttttctattacttctttggctatttctttcctcccttttctctgttctgtttgtgataattttattagttggatattgaatctcttaaattgatcctgtattatatatttccctaaaaatcctctgtgctctgccaaccatctcttcctccccctaaccccctggcaactactgaactttttagtgtctccataattttatcttttccagaatgtcatatagctgtaatcatataataatttgtagccttttcagattggcttctttcacttagcaatatgcatttaagtttcctgcatgtcttctcacggtgtgttagcttacttcttttcaacactgaataatatgcaattgtctggatgtaccacagtttatttatccattcacttaataaaggacatgttggttgcttcca

SEQ ID NO: 243858 - DNA, 460 bp, Homo sapiens
ccagctggcatatccgaatgggctgagctaccggattaagagggacaccccaaagcccccattgctgggttattgctccagagccaatgttcttggggaaaggaagatatgccctttgtcaacattgccactgctggtctgtaaactcctagacggccagctggtggttcacaaaccaggactccttgctctggccctacccctacctaccagaatgaccgtgaacccttccccactcactcctacaaccaggtttccatctcctctctcagcttaggtttccctaactgtaaaataaaagggttggactaggttaaggacttcctgctatttctctctcccacactctaaggttccttaggaatgcttcagaaaacagcaggggttggggcaaggatgccacttgagtcccagagcaactccaatttcataggcacataaatttatgtgaaagtatata

SEQ ID NO: 243859 - DNA, 363 bp, Homo sapiens
cacaatctaaatgtatccacacacagaaaaagtacagtaaaaatatgatataatctcatgggaccactgtacattgtacaagcagtctgtcattgaaacttcattgtgcggtgaatgactaaacttgtgggcttaaatgtatacaataatgtaaacaactaaaatggcatgtaggtggagaacagggtaaaggaagttaaagtattctaagatgcagacattgtcagtactactttaagaaacccactaacaggactgtataactaacctccaaataactgaggagaaaacatgatttattttttaaaatgccccagtacaatgccacttcctttcaaagtaggaagaaataacttgtcaaaa

SEQ ID NO: 243860 - DNA, 412 bp, Homo sapiens
caaatattagaaagtagtggacatcattgctaagatttataaggatgtactgttaatgtattacccaccttagttttttttattatacttaaagtaagcctgatttaaatatcattaatatgtataatatgtatattagtatgcatgtgggatttctttagaatgtatcatctgtcgtattttaagccccacatgattgggaagatgaagtggagatatgctgtgataagcacacaaaaagtacatttttgcctattttcttctttcctctgttctttgtttctgtcttttcctttcctactctactcagagtagaaagagaattgcttgaacccgggaggcagaggttgcagtaagccgagattgcaccactgtactccagcctgggagacaagagtgagactctgtctca

SEQ ID NO: 243861 - DNA, 444 bp, Homo sapiens
ccccagtccttgttcctttaagtttagatctctttgtaagaatataaacttctaactctgcccatagctccccatgtacttttcaggtaattctatctttagtcatgaaagttgatgttcccttaggattcacgcttcttttctcagcagtatctttagccaaatctgaattaatctgttcagaatgaacaagcagaatagtctttggatttgatccaaatccctgaagcactttgggaatgagaatggctatgccagacagagagaccctggcgacttatgatactgcagaacacaacaggcacttcagattggtcccaggtaaggcttctccaccactgtgtcacacacttctctttattctttcacttgtctgacaaataacagttgaatccaatatctacccccaaagcccccttttaaggacagactaaacccgtatga

SEQ ID NO: 243862 - DNA, 606 bp, Homo sapiens
ccccagtccttgttcctttaagtttagatctctttgtaagaatataaacttctaactctgcccatagctccccatgtacttttcaggtaattctatctttagtcatgaaagttgatgttcccttaggattcacgcttcttttctcagcagtatctttagccaaatctgaattaatctgttcagaatgaacaagcagaatagtctttggatttgatccaaatccctgaagcactttgggaatgagaatggctatgccagacagagagaccctggcgacttatgatactgcagaacacaacaggcacttcagattggtcccaggcaaaagaaagcagtatagagatttattctcccactggcatgaaagctgtgattctgaccaccttctacatcactgtctaccacccctacaccagctcttagaagacagagtaactacaggatgctgtggtacctggagtgatgccagactgcagaggccacctggtgacatgaggagagattcaacttaacatggtgaggatggcagagtagagctaaagtggaaaaagcatttccctgatgaatttaagaagctactgaataaatatgtctggaagtacctaa

SEQ ID NO: 243863 - DNA, 390 bp, Homo sapiens
aaccccattttctgatgaccactagggttccaggtatcagcccataaagtgagctttttctgagaagaacgaaagatggcaggtagaaatgattgagctggtaaagaagactgaggcttattgttaaggtctggggcctaaaaatgtcagggttcaaagtgatcaatttggaaaataaagagatttggaccctcctctgaaatcagggagtagtgaatatgtggagtcagaaagtaactgcaaattctggagaaactgtggaagcagcattttgtaggagggtgggggaaacaacaccctcaactagtatttctaccttctggtaaatctattactttaactttacctctgccagtcaataaaactttttcatgttttggtacatttaaa

SEQ ID NO: 243864 - DNA, 629 bp, Homo sapiens
ggtgactttctttggtaactggaattgaagaaaatgagtggacttgtgtctgagcacttgggaactcagcaatccctgggtgttaccttgagaaggagccaaattccagacatacaagtggagacttgaaaatggaagctcaattccacacccaggctggtggagactatgacatataactcacatcttcaagaaagtagacacctcagaggtcactgggccactttaccttccactgtcaaaactatgtccatgatcagatacctctgttgctagggaatattcagtcagaatgggctagattaactgcagtaatgcagatctctcaacccatttatgacttacgcagcaaagttcctcgctcagactacctgtccactcccacgagcagagacttgctcatgggccctcctagacccaggctgaccgagtgtgttttatctaaatgcatctccacaatcactcaggtaggagtggctatgcattaggactgattgtgcattagttagagaagcacttaccaggaattgctataagaacttctatttacatttcatgggccaaagcaagtcatgtggcaacacttaatttcaaagaggacaggaaatgcaatattgttatgtccctga

SEQ ID NO: 243865 - DNA, 301 bp, Homo sapiens
acagagcgagactccagtaaaggcacaggctgggagtggtggctcattcttccagcactttgggaggctgaggcaggaggatcacttgagcccaggagtttgagaccagccgggacaacatcttgagaccctgtgttaaccaaaaataaaaaattagccagttatgatggtgcatgcctgtagtcccagctactcgggtggctgaggctggaggatcgcttaagctcaggaattcaaggctgcagtgagccatgattgtgccacttcactccagcctgggtgacagagtgagactgtctca

SEQ ID NO: 243866 - DNA, 650 bp, Homo sapiens
gggaccagtaacaaacactagcttattttattgccttctaattgaattaaacttcagcctttttgtcattgaaagtaagaacaaatataaaaataatattttcctgggatgttttaaatttctacctgaataatggaacctccagatgcaaaataggaaagagtggtgcaactgatattgacaaataattggatagttatttcttgttttgctaaaatatttttttcctgatctgtttaattaactagaaggttccctgtaagaagtaaataagacattactatttcaactgatagtcagtgagaactgaatttaattaagcagcttttgaatttgtagttgaatctttttccagagcccattattactttatgttaatggacactaatacttttagaatactagaaatttcccttgtagaaaagttatgaaatacattattattggcacttgcatagtctattgcatttccaaaccatctactatcataggtctcgtataaagaatggtaacagctatggttaccactggttttaagaatatgtttcgtagataagtgatattattttgaaaatatgagactaggtttaaaagtttaaaacttcaaatcttgaaagagttcggattttctcttagaagacatttgaaaa

SEQ ID NO: 243867 - DNA, 1010 bp, Homo sapiens
tggcacatctggcagtgtctacagacagttttggtggttgcaattgggaagatcttacaggcatctattgagtagaagttgaagatgctgcaaaatactctaggacagactcccttcctacccaaacaaaaaattacctggccccaaataccactattacagagtttgagaaatcctgctttataataaagctcacactttgcaagcctcactaaggcactcagaacttccattcagcttttaagtcccactcttatatatgagtagaccagcaaggattaccaagctgaggagagcctttaacacaatgtatagaggtcaaaacaaatagagcagcaaaagcagcttggaggaaactaactgcaaggagaataaaacttttaaaaagtgaacatatccgcagagagataggaagagatattgtaaccatgaaataatatcaggatgttattattttcaaagaaaggtattcttagcagaacaaaagagagctattggaattttaaagctattaccagaaatgaaaaacccagtagaagtgtcggaagataaaggtgaagaaatctctcagaaagaaaaacaaaaagaccaaggatggaaaattgaggagaaactaaaactagaggactagttcaaaaagccctctatcacacacactgttatatcatgcacactaatacaataatttcagaaagagtatagagaaaaatctgtcctttaaagtccttcaagatttggtctcttcctattatttgttcattcagagtttattgagtcctactatgtacttggtactattctgagtgctaaacaaaaaaggtatggtttgtgcctttgagaacttacagttgagtgagggaaaaccagatattgagttaatagtacacttgtgggccaagtgcagtggctcatacttgtaatcccagcactttgggggaccaaggcggcagagtcactgagctggggagattgagaccagcctgggtaatatagggagaccccatctctac

SEQ ID NO: 243868 - DNA, 369 bp, Homo sapiens
gaaattctaagaaccagtcaaaaagaaatgctagaatccaaaaacactttaacagaagtaaagaatgcctttgacagactccatagtagtctggacacagctaaggaaatagtctcttaacctgaggatacctcaacagaaatgtccaaaattgaaaagcaaagagaaaaaaaactggaaaaaaacagaacagagtatctgagaacagagagacaacaacaaaaggcgtacatgtaacaggaaaaccaggagaagagggaacagaaagaaatatttaaagcaataatgactgtgaatttcctctaaatcaatgtcggataccaaccacaaattcgagaagctaagaaaataccaagcagaataaatgct

SEQ ID NO: 243869 - DNA, 413 bp, Homo sapiens
tcggggcacggcgggcacgaggccggaggagctttcggtggcgcgaccccgctggcatgctcccggcctcggcctcggcctcggccttggcctccgggcctccagcgcacgcggggcgtccagggcctcatcttcccctggggaccgcccggccgtgtcccgctgccctcggcgcaggggtgggagttgcagagaggaagagtcgctaacccggagtgtttcttaaaacttggctgacctgtgacctgcggatttggaggctgaattctccgagcacctgtgcggtgtgcacttgcttcttgcaagacagcttttgtacctaaccacattcattttgatttggtttaattttggatggcactatggaaagtagctaaaataaacaggaagctactgcaggatataatctaaga

SEQ ID NO: 243870 - DNA, 351 bp, Homo sapiens
tcggggcacggcgggcacgaggccggaggagctttcggtggcgcgaccccgctggcatgctcccggcctcggcctcggcctcggccttggcctccgggcctccagcgcacgcggggcgtccagggcctcatcttcccctggggaccgcccggccgtgtcccgctgccctcggcgcaggggtgggagttgcagagaggaagagtcgctaacccggagtgtttcttaaaacttggctgacctgtgacctgcggatttggaggctgaattctccgagcacctgtgagtgacagcccgtgaatgggaaggtccttcggcaaacgccctttttgtgaataaaatacataaaagcca

SEQ ID NO: 243871 - DNA, 403 bp, Homo sapiens
gcccagggatctggggagaataaatctcaatgaaatgttttttatcagggttctgctgctctacaaggaagatgtgcaggttaagctggacaaatagcaggctgagtgcggctgggcttttcccagtctccagggaggactcaggattgagctgcagggcctggtgatcatcccagcctcaaggcaagggcacagctgcgatcctgcttgatctcaccctgctttgtctgcttcctgtggagagctcccgccttgagagtgggaaggaatgtgtgatcatccccattgtacagaagggaagagtgagacccacagtgactaagtgagtacagagagaatgaggaagcagaaaaggaattggattggggtctgggcttctggtccaggctccaccctaacctgc

SEQ ID NO: 243872 - DNA, 352 bp, Homo sapiens
ttcatatcaatcaatgaagaaaaagcatttgatgaaattcctactcatttatgataaaaactctcaaaatcaaagattaaagactgccggaaggaagcttatctaaagtttgttctctccataaggcacatcacatcacaatgttgtgctaaggaacaccagatggcacttcagtaatgtgcttagggtccagtttgaacagagaaatcaaaaacaaaaagcacaaatatgtggaaatgtggcactaaatagaccctggaaagcacacttgtttacattgagaactgaaacagggcagaccattgctttgttcaactttggttgggaaggtgtatgtcggatgactcaactt

SEQ ID NO: 243873 - DNA, 325 bp, Homo sapiens
tgtatttttattagagacagggtttcaccatgctggccaggctggtctcgaactcctgacctcgtaatctgcctgcctcggcctcccaaagtgctgggattacaggtatgagccaccatgcccggccagtagataacttttaaaaatgtttttttaaaaagactatgagatatttaattggaataaaactatcttgtgtaaaatgaatataattcgtgacacactgacctttatctttcataacacaaatgatttgaaacggtcatgtatttttcaccacgcctaaataaagcaatagattaacaaccatggttctctagcctac

SEQ ID NO: 243874 - DNA, 405 bp, Homo sapiens
aatagctgtcacaattaatactgagtatgtgctgttctatcatttttggcaaggattggtgtttcatcatttagacacatcaggtacttacattgcagtgtcatataatttaaattggcattgtttaaaatgatgaaaaaataacaaagtaccaatcagaaactaaattttagtacagtgggaaggattcatccattgaattggattgatagaagatgagacagcaatttaatagagttttgttcatcttttcctttcttggttgactaacactgacatttttgaggtcttttatttctacagaacgttctctgcagtctcctcttcaaatacggctcttggctatgcttgtgaattttgtgaatatacaattatttcaaattaaatactaactgaatgtggcta

SEQ ID NO: 243875 - DNA, 440 bp, Homo sapiens
tgttattaccattcaatcattttaaaaacattttatatttttagagccccatatgttatttatgggctcctccctgcattccacctcttaagactccattaactctcctgtgaatgcgaggacaaagagaggaggatgttgtttagtgtcacaaactggaaaaccactaagtctccaatctcatttgcattgcctggatgtttagcaatgccaaaataagcactggactgtaagacaaagacctggcttttagtgccagcagaactaattactaatcctttgactttcggcaagttattaacctaatgtgaagtgaggatagtaattatttgccctgcctgcttcacaggtagttgaacactaagagaaaatatatatgtgagattgttttgtaaactgtttaagcactttgcaagtataaggcatcatctaggactggt

SEQ ID NO: 243876 - DNA, 322 bp, Homo sapiens
tcatcatcatcatcatcctcttgcttgtatgcttttcttaagtaaagtaaaacctactcacaggcccatgttctgccagggctgtaagccttgtgagccaggatggtgcccagagccttgtggaagctgcttcctatcctgggctatctgcagcccgacttgggagttgtggttacttcaactgccataaggcatcctcctcaaagtgcagagcagaccctcttgcctctaaagttctttgacaccacattcacaaattcacaaaggaaagttgctcctgacacagaggcaaggctttggagtgacaagaaacctagagaca

SEQ ID NO: 243877 - DNA, 366 bp, Homo sapiens
gaagctgaggtggaagaatcacgagcccaggaggttgaggttgcagtgagctgagaagataccactgcattccagcttcggtgacagagtgagatcctgtcactcacacaaataagaaaattattgaaaacatatttgctaagcaatgtcctaatgtgctgggaaataaaatgatgaacaaaccctcagtccaggaggagaaaacttagaatccagaaggagaaaaaaacacattaaacaagaaaataattgcaagtgtgaaaggacagtacggggatctacattgaggctcccttattgggaatctctcaaagacagaactggtgttatattgaatccaaggatttttcttattcaccttatctc

SEQ ID NO: 243878 - DNA, 506 bp, Homo sapiens
ggagtgataaaaaatgttaattaatatttacagaataaatggaagactaattttcttcaggttaatatcttttaagaaagaaaaaggataaattatacaacgatcaaaagtatggatcaagaaacatagtttctgttttgttttaagtgaaatttcaccttcatttagccatcataattaattaatcctaacaaaatttatccacttaatcaaaacaaaataatttggtcactgcaattaattttaaaaaatcctctgttacataacactatttttctttgttgttgttgttcaaattagcacatttttttcacattaacatttgaaagaggcaaatctaaccaaaggaaataaaaatattcaccaaaattgctaatatcactgctgctttaaaaaaccacaacagtcattgaattattttcttctttttatcattgtttttttcaatataaaaagaatcactttagacaaaagacagagaccataaaggcaattcgtcttcaaaa

SEQ ID NO: 243879 - DNA, 847 bp, Homo sapiens
aaggcattgatgtcttcattcatgggaagaggatggtagacatcgagatgagtgaggatcagagatgatactctctaggacattttctagatgttgattcttccctcttctgtaggtgtagacgaggtcagccctgtggtcaggactgggggagaggacagttctaactgaccttggggggtttagaaggtcattctcgaagttaggctcactccttacacttgtgcaagaatgcaacagagatagagcacagaagtgagcaagagaccagcctgaccaagcaggaatactcactcattcagcacgtctattgagcacctactatgtgcaaacatcggtgaataaaacagacgtggttctctctcatggagcttcttctagtctaggactgagacaaaataattaaacaaactatcaggtagctattgctgtgtgacaatcaaccagaaaaatagagcaacattcagcaagtgttcattgttcatgcatgtggggtcatctgtgtggctctgtggatcttggctgggtccactcatctgtctaggagtgttgcagtggcctaggctgagatgagtgagatgagttttctctgcttcatgtacctctcttctcccagcagtcttgcctaggcagaatcccatgctgaagactgaattgcaagggagcaagtagaaacacacaaggcttcacatagtctcttctactttattttattggccaaagaaagtcataaagccagcctagattcaaggggcaaggaaatagactctacctctttagtgagagaaatttcaaagtctcatggcgaaagatggatgaaatttcaaagtctcgttgcaaaaaaaaa

SEQ ID NO: 243880 - DNA, 672 bp, Homo sapiens
ggcagcttctgcatgctgattatgaagagtcactgagtggcaagaatatgttcccccagccatcttttggacccaatccattcttaggcccagttcctattgcacctcctttctttcctcatgtttggcatgggtacccttttcagggattcatagaaaatccagtaatgaggcagaatattgtcctgccctctgatgagaaaggagaattggatctgtctctggaaaatctggatctgtctaaagattgtggttcagtttccacagtagatgagtttccagcagccaggagtgaacatgtacattctctccctgaagcaagtgtgagcagtaagccagacgaaggccggacagagcaatcttcccagacacgaaaggcagatatggcattggcttccatccctcctgtagcagagggaaaggctcaccctcccactcagattctaaacagagagagagagaaattgtgcctgttgaacttgaacctaaaaggaccattcaaagtctgaaagaaaaaacagaaaaagtaaaagatcctaagactgctgctgatgtggtcagccctggggccaactctgtggatagcagagtgcaaagaccaaaagaagagagttcagaaaatgaaaatgaagtgtcatattttgagaagtggtagatccaagcagttctata

SEQ ID NO: 243881 - DNA, 314 bp, Homo sapiens
ctgaccgggaaattgaaggagccagcagggtacctccacatgatggaactcttggaaacattcgaaaaaccccactcccattctcaagatgaaaaatacaccaacctggccccgcggtttccatacctagtgaggacacaccggggaggtggtcaggggactgcggtgattatccaccttcacacatacagaggaaatacggcctcagatgcaggccatatgcccctctccttcttgatgtaaatgtttttcattattcctttcaactacagtcacatcagtcagaattaaaatagccttcaaaagtttgaaaa

SEQ ID NO: 243882 - DNA, 434 bp, Homo sapiens
caaaaagatataattctagtaaaattattagactttaaagaaaattttggggggttctagagaaaaggaaccttgtgacttaaaggggaaagacaattagattattgtcagactcttcaatagtaaggattggtgcagaagaaaaaagaataacatgtttaaaatactccaggaaagaaagtgtgagccaaggatttataaccaggaaaattgactttgaagttcacacaaagacttatacacaaaaggttatagcagctttaatagccaaaaactggaaatagtccacatgtccatcaacaggtaaatgataagttgtgatatatccatactttggaaatactgcgagcaataaaaagaaatgactgcaataaaaagaaatgacttaacaaaataagatgaagaataaatttcaaaataattatgctgagtga

SEQ ID NO: 243883 - DNA, 388 bp, Homo sapiens
caaagttttctatatttcctcaaaaagtataattttaaagctcttaacacctaacttgcaaatctcaatacatttacatttggtttatatcacagttggttttattcattatcctattctggcttactagccttaacaccttgagagtagaacctattcttttttttttttttttaaatcccctctcacatctactaccatagagctttgtacatagtggccacccaataaacctttaataaaggatgactataaattatgagggcattttataagtattctccaaactctcataaattttctatccttctcttgagaacagagaggattttgtgtttccttttttccctttgtttttctcttttccttttctgacaactgctagcat

SEQ ID NO: 243884 - DNA, 224 bp, Homo sapiens
tcaaaaaaaaaaaaaaaaaaaattgcctgtggctttaaaaatagacacatattgtcttttttttttttaaaggggtgcatagcattctggtttttgtaactataagtttttttttccacaaatctcctattgaaggacgtttaaattgctttcagttctttgccattataaacatccgggtctttgttattacgaacaatactagtaaacatttttataaacat

SEQ ID NO: 243885 - DNA, 407 bp, Homo sapiens
cagtgatagaaagcagattagtgattgccagggagtaggaaaagaagtatgactggggatagcataagggagatcttcctggtgatgaaactaaaggcatcctgatatatatatatatatatgtgtgtgtgtatatatatatatatatatatatatatatatgtgtgtgtgtgtgtgtatatatatatatgtgtgtatatatatatgtatatatgtgtatatatatgtatcttatatatgttacatatatatgtaaaaattatataaaaatatgttaaaaatgtataaactgtacaccaaatttttaaaagtcagttttactgtataatgtttttagtttaaaaattagaaaaaatacttaaagaggaaaaggcatcaatggattaaattcacaaaatggaaacaaa

SEQ ID NO: 243886 - DNA, 430 bp, Homo sapiens
gagaactagtcacgtgcctctcctagattcaaggagagctgggaaaagcagtcagcctaggaagaaggagacagaggctctaaggcagttgtcaagaattactgcagcccagagaaaggacggggagaatgacagtgattcatcaagaagacttataagctgattgggcaactcatgatcaaagctgtttagctacccaaagggatagcaggataaattacagccagaagaattaacaattttgtaattggcatcttacattgtgaaggctcattccagtcacctgtcactgagcttttaaagtttaggggaaagcatttggcggtgcctgactctgtgtgttcatatcttgctttcaacaactgaaggatgggtttctgagaacaagggtgagatacgtatttataaatgaaatcttttccatgggttc

SEQ ID NO: 243887 - DNA, 928 bp, Homo sapiens
tattgaatggcaatatcaaaaatgagatcagcagcaagatgataaggcagaataaaagttgctgagagcctaaaatgattattcagttctgttgcagggttttaacctgcccaaaggatggaaaaagaagaacataagcataatttctgaatgcatcacggcaaagatgcatgtactcatgaagcataaaattaaaaatatgatacattcactacatgaaaatatgatatacggtttttcttcagtatccgcgggagattggctcgaggaaccccatggataccaacatccttgaatgctcaagtcccttatataaaacggcatagtatttgcataaaacctataccattctcctgtatactctaagtcatctctgcgttacttataatacctaatacagtgtaaacgctgtgtaaacagttgttatactatattggttttttaatttgcattacttttgtattgttgtattattttattgtttttccccaaatagttttgatccgcagatgtagaacccacagatatgataaatcaactgtatctagtacccaaaacagatgagtaacttagaaattaatatgtaatacatacagctaatgttatagctacttaaggaattcctttcactgaaaagaaactcttacaaatcaatgagtcaacaacccaatggaaaaatggccaaaagacatgaatagaagttcacagaaaagaatgaaaatgaccagtaaataatgaaaagatgttctaagacactcttaattaaataaattcacaataaaataatcatacttttatctatctaccagattagcaaatgttaaaatattaaaatgttagtggtcatcaaaatgtagggttacaggttcacccatacactgttaatagatgtataaactggtcaaaactttttgatccatagcacagt

SEQ ID NO: 243888 - DNA, 1138 bp, Homo sapiens
gtggaatgaaaaaactaaagagacaactgacttaccacacaaatggactatggtagaagctgctgtcccttagtattgaatatctctattttcttttaatcatagaattcactgatattttagcagataatgtggccgtccaggcaggcatgagatttctcagccttacttcaacttgattatgaccatgtgacccaattctgacatttgcctaaaggaaaatttacctaaaaaggcgttttcttgctatggcagtgtaacctgtactaataaatatagtgctagtcctgcatgcaacaaaaatgatggttttaacctgcccaaaggatggaaaaagaagaacataagcataatttctgaatgcatcacggcaaagatgcatgtactcatgaagcataaaattaaaaatatgatacattcactacatgaaaatatgatatacggtttttcttcagtatccgcgggagattggctcgaggaaccccatggataccaacatccttgaatgctcaagtcccttatataaaacggcatagtatttgcataaaacctataccattctcctgtatactctaagtcatctctgcgttacttataatacctaatacagtgtaaacgctgtgtaaacagttgttatactatattggttttttaatttgcattacttttgtattgttgtattattttattgtttttccccaaatagttttgatccgcagatgtagaacccacagatatgataaatcaactgtatctagtacccaaaacagatgagtaacttagaaattaatatgtaatacatacagctaatgttatagctacttaaggaattcctttcactgaaaagaaactcttacaaatcaatgagtcaacaacccaatggaaaaatggccaaaagacatgaatagaagttcacagaaaagaatgaaaatgaccagtaaataatgaaaagatgttctaagacactcttaattaaataaattcacaataaaataatcatacttttatctatctaccagattagcaaatgttaaaatattaaaatgttagtggtcatcaaaatgtagggttacaggttcacccatacactgttaatagatgtataaactggtcaaaactttttgatccatagcacagt

SEQ ID NO: 243889 - DNA, 303 bp, Homo sapiens
gtttggtgcccgccgttttaagcattggctctcatttccgtccgcaagctatttcgctgaacttaacgctctgggttgttgaaacggcctatgaggcagaggagggaggggaatcagtgctctcaccacagtccgcggaagcactagcctgggcattgtggtatttagctgggtgtcggcagtctctaggttagatctcattttacccattttctggtagtagtcgtcagttctcttcatttagcgcctactgtatgctctcctaatactacctgctcttcccaaagctcactgattcaatag

SEQ ID NO: 243890 - DNA, 927 bp, Homo sapiens
taaagcctgtgaactactaaacagaggtgacctgaggtggccaagggttagtgcccactctgtcccagggggctactgtagttaaggaagatgccacacacaagaagatgcttgtgcactcatgaccccatctctcagtcttgtctttcccaaaccatctgtcagcactccccactgctgtgtgcacccagaaatgtgcacaggtaagctgtcagacaggcactctgagtaaggggaagctcagagttgggcacatcaaacccagcagacccagagcttgggggcctcacaggagagcaagtcagatgggaacatcagtatacgataccaggtggagaattcagaatcaggaaggagtagctgctgctgctgtgagagtcaggaaggaagagatgacttctagtgtttgcccacgtatgttctgatcctgtttttccaaggcactagcatggaaagcacaggagtgtccctgtcctccaggagccagttcacagcataggaagggagatgcattgttaagcttggcgtcatgggaaaggtggcatcaaactgacctggaaagattattgatacagatgtgaggaggtgtggggcaagattccaggcaaaataaatgaatgttagacgttgctgactgggcgcagtggctcacacctgtaatcccagcactttgggaggccaaggtgggtggatcacttgagcccaggagttcaagaccagcctgggcaacatagtaagaccccatctctacaaaaaataaaaaaattagctgggcatggtggcatgcacctgtggacccagctactcaggaggctgagacagggggattgcttaagcctcaggaggccaaggctatagtgagctgtgatctcaacactgcactccagcctgggtgacagagcaagaccctgtctcaaaaaaaaaaaa

SEQ ID NO: 243891 - DNA, 219 bp, Homo sapiens
tgaagaacaaaaattaccaattttgatgaagtgtaaactttagttagtaacatattggctcaccaattctgatcatcatcatatatgatatattggttcatcaattatatgatatatatgatatcatatttacgtactttgggaggccaggatgggagaatcacttgagccaggagttagagatcagcctggacaacatagtgagacccccatctacca

SEQ ID NO: 243892 - DNA, 273 bp, Homo sapiens
attcccctacctccagctaatatgagttatcactgacaactctagtcccactgtaatcttcctgccttatagataaaaattaccaagagatccagtcaccaggttgcctccacttcctgacagcactcaatcaaaaccagtccctttaggccaggcatggtggctcacacctgtaattccagcactttgggaggctgaggtgggtgaatttcttgaggccaagggttccagaccagcctggccaacatggcaaaaccccatctctgcttaaaa

SEQ ID NO: 243893 - DNA, 470 bp, Homo sapiens
atttttaattgtcactgcctatggagctttgtggtgtaagggggaagaatcaaagcagataagcacaacaaaccccaagcgttaaagtatgtaattgttgcatgttcaagttattcacattttgtgaataacattatcaagaataatgagagcaatccatatcaaagaacacaaggaaccagagagcttaaaacatgcccaggttctacttcttaggtataaggatataataaacctagtataaagcctagattatatgtaatcctgtatgagacccactagtctatattgtaaagcttcaatgtttttagcaccctctgtgtggaggaaaataatgcagattattctaattagtgtaatatctaaccacattaaaatatattacatagtaaactacactccataattttataaatttgactccccagggtaataaactagtctctagtctgctcaccttcaactgtaca

SEQ ID NO: 243894 - DNA, 748 bp, Homo sapiens
catatgtctgatgacagaaggagctatgtgaaagcctattcagagttctacagagtgaactaacttcctgtgacattctaaaccatgttactatttcaagtgacatggaagaggttctatgcaaatgaaaaataaaatttgccaaaatgtttctttaaaatttataaagtgttgctttatgaagtaaactagtacacatcttttaaattctataatcttctgatggaattgcagaagctgttggcagagacaagcctctgaccttaggcacacattacaaaagcatgttcctgattctgcttcccagctgtcataaaaatactacttcctcacccaaaatgtagtatagaatttttatcttggaatttttgttaataggatgtcttaaactaatacttcagtatctgttctagacctctctccttggcttgtagatgattgccttcttcctctctctcttccccaggtctcttcacattgtcttctctgtgcatgtctgtctttgtgtccagatttcaccttataaggatttcagtcatcttggattaaggcccaccctaatgaccttatttgaatttgattacctctttgaagaccatgtcttcaaataaagtcacattctgaggtacagaaggttaggacttcaacatttgaattttggtggggggggacacagttcagctcataacaccaggtgctaggacagtgcctagcacacagtgggcacccagaaatgttcagtgtggct

SEQ ID NO: 243895 - DNA, 349 bp, Homo sapiens
tgagaaatctttctctcccacctactctgtctgttgaattccattcctcccaatatgtatttaagtctctatcatcttaaacataaaagccctcttcttacatgatgccttatccttgcctcttttcacacagaagtttcttgacaaatagtctttattgtctcagtttcctcaacatctgtttagtttttatactctataatctaactttgagctaagtaattttattgaaactgcactgtccaagttaccactgagtttttaattgtcaaattctgagattctccttttcatttcatatcttaattgatctctggtcatgtatatgtttaatgtggttggtgactcc

SEQ ID NO: 243896 - DNA, 286 bp, Homo sapiens
gcatatgtaagagttttgtgaagataaatagtagaattgctgggctgtaaaatgtacatatcttaagctttactagatattattaggttgccttcctaagtgttataacagcttatttcctctcccccagccagggtaggtgtctgtttctattgtcattatatgtgcttttgtcagactttaagttttgccagtctttcagaaaaatttttcctgtgcaatttttctgcttaaatttttttattggtttctcgttacttataaaatgaattcttgcttatgatga

SEQ ID NO: 243897 - DNA, 591 bp, Homo sapiens
tgttttgagactactagtctataagtcatcattctttgggggctgagctacattgctggtgggattatagtgatctcctcccagaggccagcactgccaaatgcagcttgtttcatgcctttctctgatttattcaccatccgcggtgttggttgggagcagcccggaggagatgccgattgcccttggcttgttgtcctgaagagtctttagttaacggcctggcagtgatgcttagggctgataagaatgctgactcagctcgaggcggccttgccacatattctggctccaggctctctccaggagagatggatgataaaagaaggtgaggttcgaggccacatctatgggtgaagaaatgtttgatgccagactttggcaagtggtcagaagggctttacttcaaatcaagaaataaccatctgagaatgtattaaagtaccatcatatttgaaatatgcctacttcaaaatatttgcatttatgaaacttgaagtcatgagaaaataagccgaaatgcctgctgacaacctatagcaagttttagataacaactgagctaaattaaaaaaaggacaagctttaaaa

SEQ ID NO: 243898 - DNA, 859 bp, Homo sapiens
ctctgtcgcccaggctgaagtgcagtggcatgactcagcttactgcaacctccgcctaccaggttcaagagattctcctatctcagcctcctaagtagctgggattacaggcacgtgccaccacacctggctaatttttgtattttttagtagagacggggtttcaccatgttggtcaggctggtctcaaactcctgacctcgtgatccacctgccccagcctcccaaagtgctgggattataggcgtgagccaccccacctggacgatttctaaggatttttaagacattaaagtcaatgtctctttagtaacactggaaatagaatcccacccttttcatttgcctttacgttttctttatggtgtttttgatgtgtagaaaaatttgattccttaatgtatacacatctatcagacattttcttcatgctttctcgctctagtgatatgcttagaaatatcctccctatgttgaaatttaaatactcatttttattttattttagtaattttaactaaactactttttagttgttacattaataaaattatatattatatattaatgaaatctttatttaaataaatatttaataaaatatatatccaatgtatatttttatataaggtttaaagaaagaatctaactttatattattttcccaaacgatagctgttgctttcaacaccatttattgaataatcatcccttttctcattgaataaaatgctacttcagtcacacacacacacacacacacacaaatacataaatgagtcttatttgaaatctatagtctatccaaatcaactttatctaattcttcatttgagccaccgtcctaattcttacaata

SEQ ID NO: 243899 - DNA, 386 bp, Homo sapiens
tgttcttactttttttaagataaggtcttgctctatccttcacctcccaccctcaagcgatcctcccacctcagcctcctgagtagctgggactacctgtgtgctgccacacctggctcatttcattcattttttgtagagacgaggtcttactatgttgcccaggctagtcttgagctcgtgggctcaagggatcctcctacctcagcctcccaaagtgctgagattataggcatgaggcactgtatttgtcttcttgttatagttaaaaaaaattaaaacagccaggcatggtggctcacacagtttgcaaggctgaggcagggggattgcttgagaccaggagttcaagaccatcctggccaacacagtgaaaccctatctcc

SEQ ID NO: 243900 - DNA, 686 bp, Homo sapiens
ccacctaacttggactggacgtcctcttccagggaatccagccagggccaattagaaatgtgtcttaaattggtgtcagggtcaccaaaaacaaaaacaggatccatgggggcctgtgaaacttcgagtgccattcatgctcggttcagtcatctgacttgtcaggatgaccagcagtgctccctgtaactcgccattatctgaccaattactggagctactttataatgaggcttctggagctactttataatgaggcttctgtttgctgtcatggtggggagtttggaattgtggcttcttgcctaacaccaatgagaggactttgggacaaacccccagagccaggagtgttttgaggcctagtggggttgggaacaaagggtcaagtgtcgagggagtggggaaattatgggttggggacaggtgtgaacagtgggcttgggggtggcccaagagtactagaccagagaggtccagtgccacccgcagcctgcagtgatactagacagggggcggctgtgtggaaccacagatgacatcccttctcctcttgatggaagtggaggctgcatctgagagcttcccagcctagattctggtggctgcatctgagagcttcccagcctagattctggtgggattggatctgggagggggaagaccccaaaaagcaaaaaaaaaaa

SEQ ID NO: 243901 - DNA, 400 bp, Homo sapiens
taattttggtgacaattttctctccaggaagcaaatgtcctcaaggaccttcatgtctcaggaggaaacaggtgtacccagatacaaagctgcaaaggaaggcctggctgtatggttagctgcaaacagcaatagagaacaaactgtgccaagatatttattagtagagttgtttttatcagggctctacttaaaaacttcttaatgttttgagtggtctgcccttgaccctattttttccataaaacttgtgatgtatgattttgctgaacatgagattttttaaaaatagaaaattgtgccaggcgaggtggttcacacctataatcctagcactttgggaggctgaggcaggcagatcacgaggtcaggagatcgagaccatcctggttaacacggt

SEQ ID NO: 243902 - DNA, 308 bp, Homo sapiens
tatagaaatcaaagctaaggagaatttccagaaagggtagtatcatttaatatcatagaagtttaggagcccaagatggaaaaaaggcctctgggtaactgacattgaggcagtctttggggaagctccatttccgatagagaagtagactgaaagtcagcttgaagcagggactaggtgaagaagctgttggctggtcgcatggggaaataaataagggatggcatatgccgtatttctggatttctttctttcttgcccagcctctatatatgcacagagtttggcgaaaacttacaaaaaataaa

SEQ ID NO: 243903 - DNA, 1656 bp, Homo sapiens
tgctgcgtctatctagaggatcccggtttcgcatgttcccggggcgctggcgtttccgttgcttggatcagtctaggtgcagctgccggatccttcagcgtctgcatctcggcgtcgccccgcgtaccgtcgcccggctctccgccgctctcccggggtttcggggcacttgggtcccacagtctggtcctgcttcaccttcccctgacctgagtagtcgccatggcacaggttctcagaggcactgtgactgacttccctggatttgatgagcgggctgatgcagaaactcttcggaaggctatgaaaggcttgggcacagatgaggagagcatcctgactctgttgacatcccgaagtaatgctcagcgccaggaaatctctgcagcttttaagactctgtttggcagggatcttctggatgacctgaaatcagaactaactggaaaatttgaaaaattaattgtggctctgatgaaaccctctcggctttatgatgcttatgaactgaaacatgccttgaagggagctggaacaaatgaaaaagtactgacagaaattattgcttcaaggacacctgaagaactgagagccatcaaacaagtttatgaagaagaatatggctcaagcctggaagatgacgtggtgggggacacttcagggtactaccagcggatgttggtggttctccttcaggctaacagagaccctgatgctggaattgatgaagctcaagttgaacaagatgctcaggctttatttcaggctggagaacttaaatgggggacagatgaagaaaagtttatcaccatctttggaacacgaagtgtgtctcatttgagaaaggtgtttgacaagtacatgactatatcaggatttcaaattgaggaaaccattgaccgcgagacttctggcaatttagagcaactactccttgctgttgtgaaatctattcgaagtatacctgcctaccttgcagagaccctctattatgctatgaagggagctgggacagatgatcataccctcatcagagtcatggtttccaggagtgagattgatctgtttaacatcaggaaggagtttaggaagaattttgccacctctctttattccatgattaagggagatacatctggggactataagaaagctcttctgctgctctgtggagaagatgactaacgtgtcacggggaagagctccctgctgtgtgcctgcaccaccccactgccttccttcagcacctttagctgcatttgtatgccagtgcttaacacattgccttattcatactagcatgctcatgaccaacacatacacgtcatagaagaaaatagtggtgcttctttctgatctctagtggagatctctttgactgctgtagtactaaagtgtacttaatgttactaagtttaatgcctggccattttccatttatatatattttttaagaggctagagtgcttttagccttttttaaaaactccatttatattacatttgtaaccatgatactttaatcagaagcttagccttgaaattgtgaactcttggaaatgttattagtgaagttcgcaactaaactaaacctgtaaaattatgatgattgtattcaaaagattaatgaaaaataaacatttctgtccccctgaa

SEQ ID NO: 243904 - DNA, 691 bp, Homo sapiens
atgaagggagctgggacagatcaatctcactcctggaaaccatgactctgatgagggtatcctcatcagagtcatggtttccaggagtgagattgatctgtttaacatcaggaaggagtttaggaagaattttgccacctctctttattccatgattaagggagatacatctggggactataagaaagctcttctgctgctctgtggagaagatgactaacgtgtcacggggaagagctccctgctgtgtgcctgcaccaccccactgccttccttcagcacctttagctgcatttgtatgccagtgcttaacacattgccttattcatactagcatgctcatgaccaacacatacacgtcatagaagaaaatagtggtgcttctttctgatctctagtggagatctctttgactgctgtagtactaaagtgtacttaatgttactaagtttaatgcctggccattttccatttatatatattttttaagaggctagagtgcttttagccttttttaaaaactccatttatattacatttgtaaccatgatactttaatcagaagcttagccttgaaattgtgaactcttggaaatgttattagtgaagttcgcaactaaactaaacctgtaaaattatgatgattgtattcaaaagattaatgaaaaataaacatttctgtccccctgaa

SEQ ID NO: 243905 - DNA, 564 bp, Homo sapiens
gcctactactactaaattcgcggccgcgtcgacggagatacatctggggactataagaaagctcttctgctgctctgtggagaagatgactaacgtgtcacggggaagagctccctgctgtgtgcctgcaccaccccactgccttccttcagcacctttagctgcatttgtatgccagtgcttaacacattgccttattcatactagcatgctcatgaccaacacatacacgtcatagaagaaaatagtggtgcttctttctgatctctagtggagatctctttgactgctgtagtactaaagtgtacttaatgttactaagtttaatgcctggccattttccatttatatatattttttaagaggctagagtgcttttagccttttttaaaaactccatttatattacatttgtaaccatgatactttaatcagaagcttagccttgaaattgtgaactcttggaaatgttattagtgaagttcgcaactaaactaaacctgtaaaattatgatgattgtattcaaaagattaatgaaaaataaacatttctgtccccctgaa

SEQ ID NO: 243906 - DNA, 164 bp, Homo sapiens
ttcaagcttctaacgatgtgcggggatttaatcagaagcttagccttgaaattgtgaactcttggaaatgttattagtgaagttcgcaactaaactaaacctgtaaaattatgatgattgtattcaaaagattaatgaaaaataaacatttctgtccccctgaa

SEQ ID NO: 243907 - DNA, 710 bp, Homo sapiens
agtgaagttcacaatttcaaggctaagcttctgattaaagtatcatggttacaaatgtaatataaatggtttaatcagaagcttagccttgaaattgtgaactcttggaaatgttattagtgaagttcgcaactaaactaaacctgtaaaattatgatgattgtattcaaaagattaatgaaaaataaacatttctgtccccctgaaaaaaaaaaaaaaaaaaaaaaaaaaaaaaaaaaaaaaaaaaaaaaagagaggggggggcgccgcccaaaaaatattctccccgcggggggcgcccccattctagcgccgcgccccccgagtttttgttggaaaaagggggcgcccccaatataggggggcggcgtattataaaaagcagaggccgcgcgggcgcgcgcgggttttaaaacagcgcgggagagagcggagaacacaacagcggcgaccctggaggcgatcatcttgggagagaagaaagcacccatcatccccgcggtgggcggggccacacccatatggtggcgaccacacacctccctagcagaggagatattaaaaccgccccaccaggaggaacaaacttaacaacatcacagggtgtcactacggggtcgaaccaacgcgtaatacccgctgcccatagaagaattgccaccacgggctaactttgagacacatttttccgagcctcctatactacccaa

SEQ ID NO: 243908 - DNA, 540 bp, Homo sapiens
ggcacgagcggcacgaggggcacttgggtcccacagtctggtcctgcttcaccttcccctgacctgagtagtcgccatggcacaggttctcagaggcactgtgactgacttccctggatttgatgagcgggctgatgcagaaactcttcggaaggctatgaaaggcttgggcacagatgaggagagcatcctgactctgttgacatcccgaagtaatgctcagcgccaggaaatctctgcagcttttaagactctgtttggcagggatcttctggatgacctgaaatcagaactaactggaaaatttgaaaaattaattgtggctctgatgaaaccctctcggctttatgatgcttatgaactgaaacatgccttgaagggagctggaacaaatgaaaaagtactgacagaaattattgcttcaaggacacctgaagaactgagagccatcaaacaagtttatgaagaagaatatgctcaagcctgaaagatgacgtggtgggggatggagcacccataaggatcctctagatcacccca

SEQ ID NO: 243909 - DNA, 1571 bp, Homo sapiens
ctccgggctgtctgagcgccgccgggtccccgcggacctgcgcttggggagggcacgagttgcaaatggcgcgctaagcccgaggtttcttctcttttgcagtcctgcttcaccttcccctgacctgagtagtcgccatggcacaggttctcagaggcactgtgactgacttccctggatttgatgagcgggctgatgcagaaactcttcggaaggctatgaaaggcttgggcacagatgaggagagcatcctgactctgttgacatcccgaagtaatgctcagcgccaggaaatctctgcagcttttaagactctgtttggcagggatcttctggatgacctgaaatcagaactaactggaaaatttgaaaaattaattgtggctctgatgaaaccctctcggctttatgatgcttatgaactgaaacatgccttgaagggagctggaacaaatgaaaaagtactgacagaaattattgcttcaaggacacctgaagaactgagagccatcaaacaagtttatgaagaagaatatggctcaagcctggaagatgacgtggtgggggacacttcagggtactaccagcggatgttggtggttctccttcaggctaacagagaccctgatgctggaattgatgaagctcaagttgaacaagatgctcaggctttatttcaggctggagaacttaaatgggggacagatgaagaaaagtttatcaccatctttggaacacgaagtgtgtctcatttgagaaaggtgtttgacaagtacatgactatatcaggatttcaaattgaggaaaccattgaccgcgagacttctggcaatttagagcaactactccttgctgttgtgaaatctattcgaagtatacctgcctaccttgcagagaccctctattatgctatgaagggagctgggacagatgatcataccctcatcagagtcatggtttccaggagtgagattgatctgtttaacatcaggaaggagtttaggaagaattttgccacctctctttattccatgattaagggagatacatctggggactataagaaagctcttctgctgctctgtggagaagatgactaacgtgtcacggggaagagctccctgctgtgtgcctgcaccaccccactgccttccttcagcacctttagctgcatttgtatgccagtgcttaacacattgccttattcatactagcatgctcatgaccaacacatacacgtcatagaagaaaatagtggtgcttctttctgatctctagtggagatctctttgactgctgtagtactaaagtgtacttaatgttactaagtttaatgcctggccattttccatttatatatattttttaagaggctagagtgcttttagccttttttaaaaactccatttatattacatttgtaaccatgatactttaatcagaagcttagccttgaaattgtgaactcttggaaatgttattagtgaagttcgcaactaaactaaacctgtaaaattatgatgattgtattcaaaagattaatgaaaaataaacatttctgtccccctgaa

SEQ ID NO: 243910 - DNA, 1628 bp, Homo sapiens
tctgcatagtacgacccggtttaatcggccgagggatagtccctctaggtgcagctgccggatccttcagcgtctgcatctcggcgtcgccccgcgtaccgtcgcccggctctccgccgctctcccggggtttcggggcacttgggtcccacagtctggtcctgcttcaccttcccctgacctgagtagtcgccatggcacaggttctcagaggcactgtgactgacttccctggatttgatgagcgggctgatgcagaaactcttcggaaggctatgaaaggcttgggcacagatgaggagagcatcctgactctgttgacatcccgaagtaatgctcagcgccaggaaatctctgcagcttttaagactctgtttggcagggatcttctggatgacctgaaatcagaactaactggaaaatttgaaaaattaattgtggctctgatgaaaccctctcggctttatgatgcttatgaactgaaacatgccttgaagggagctggaacaaatgaaaaagtactgacagaaattattgcttcaaggacacctgaagaactgagagccatcaaacaagtttatgaagaagaatatggctcaagcctggaagatgacgtggtgggggacacttcagggtactaccagcggatgttggtggttctccttcaggctaacagagaccctgatgctggaattgatgaagctcaagttgaacaagatgctcaggctttatttcaggctggagaacttaaatgggggacagatgaagaaaagtttatcaccatctttggaacacgaagtgtgtctcatttgagaaaggtgtttgacaagtacatgactatatcaggatttcaaattgaggaaaccattgaccgcgagacttctggcaatttagagcaactactccttgctgttgtgaaatctattcgaagtatacctgcctaccttgcagagaccctctattatgctatgaagggagctgggacagatgatcataccctcatcagagtcatggtttccaggagtgagattgatctgtttaacatcaggaaggagtttaggaagaattttgccacctctctttattccatgattaagggagatacatctggggactataagaaagctcttctgctgctctgtggagaagatgactaacgtgtcacggggaagagctccctgctgtgtgcctgcaccaccccactgccttccttcagcacctttagctgcatttgtatgccagtgcttaacacattgccttattcatactagcatgctcatgaccaacacatacacgtcatagaagaaaatagtggtgcttctttctgatctctagtggagatctctttgactgctgtagtactaaagtgtacttaatgttactaagtttaatgcctggccattttccatttatatatattttttaagaggctagagtgcttttagccttttttaaaaactccatttatattacatttgtaaccatgatactttaatcagaagcttagccttgaaattgtgaactcttggaaatgttattagtgaagttcgcaactaaactaaacctgtaaaattatgatgattgtattcaaaagattaatgaaaaataaacatttctgtccccctgaa

SEQ ID NO: 243911 - DNA, 1617 bp, Homo sapiens
tgctgcgtctatctagaggatcccggtttcgcatgttcccggggcgctggcgtttccgttgcttggatcagtctaggtgcagctgccggatccttcagcgtctgcatctcggcgtcgccccgcgtaccgtcgcccggctctccgccgctctcccggggtttcggggcacttgggtcccacagtctggtcctgcttcaccttcccctgacctgagtagtcgccatggcacaggttctcagaggcactgtgactgacttccctggatttgatgagcgggctgatgcagaaactcttcggaaggctatgaaaggcttgggcacagatgaggagagcatcctgactctgttgacatcccgaagtaatgctcagcgccaggaaatctctgcagcttttaagactctgtttggcagggatcttctggatgacctgaaatcagaactaactggaaaatttgaaaaattaattgtggctctgatgaaaccctctcggctttatgatgcttatgaactgaaacatgccttgaagggagctggaacaaatgaaaaagtactgacagaaattattgcttcaaggacacctgaagaactgagagccatcaaacaagtttatgaagaagaatatggctcaagcctggaagatgacgtggtgggggacacttcagggtactaccagcggatgttggtggttctccttcaggctaacagagaccctgatgctggaattgatgaagctcaagttgaacaagatgctcaggctttatttcaggctggagaacttaaatgggggacagatgaagaaaagtttatcaccatctttggaacacgaagtgtgtctcatttgagaaaggtgtttgacaagtacatgactatatcaggatttcaaattgaggaaaccattgaccgcgagacttctggcaatttagagcaactactccttgctgttgtgaaatctattcgaagtatacctgcctaccttgcagagaccctctattatgctatgaagggagctgggacagatgatcataccctcatcagagtcatggtttccaggagtgagattgatctgtttaacatcaggaaggagtttaggaagaattttgccacctctctttattccatgattaagggagatacatctggggactataagaaagctcttctgctgctctgtggagaagatgactaacgtgtcacggggaagagctccctgctgtgtgcctgcaccaccccactgccttccttcagcacctttagctgcatttgtatgccagtgcttaacacattgccttattcatactagcatgctcatgaccaacacatacacgtcatagaagaaaatagtggtgcttctttctgatctctagtggagatctctttgactgctgtagtactaaagtgtacttaatgttactaagtttaatgcctggccattttccatttatatatattttttaagaggctagagtgcttttagccttttttaaaaactccatttatattacatttgtaaccatgatactttaatcagaagcttagccttgaaattgtgaactcttggaaatgttattagtgaagttcgcaactaaactaaacctgtaaaattatgatgattgtattc

SEQ ID NO: 243912 - DNA, 1844 bp, Homo sapiens
tgctgcgtctatctagaggatcccggtttcgcatgttcccggggcgctggcgtttccgttgcttggatcagtctaggtgcagctgccggatccttcagcgtctgcatctcggcgtcgccccgcgtaccgtcgcccggctctccgccgctctcccggggtttcggggcacttgggtcccacagtctggtcctgcttcaccttcccctgacctgagtagtcgccatggcacaggttctcagaggcactgtgactgacttccctggatttgatgagcgggctgatgcagaaactcttcggaaggctatgaaaggcttgggcacagatgaggagagcatcctgactctgttgacatcccgaagtaatgctcagcgccaggaaatctctgcagcttttaagactctgtttggcagggatcttctggatgacctgaaatcagaactaactggaaaatttgaaaaattaattgtggctctgatgaaaccctctcggctttatgatgcttatgaactgaaacatgccttgaagggagctggaacaaatgaaaaagtactgacagaaattattgcttcaaggacacctgaagaactgagagccatcaaacaagtttatgaagaagaatatggctcaagcctggaagatgacgtggtgggggacacttcagggtactaccagcggatgttggtggttctccttcaggctaacagagaccctgatgctggaattgatgaagctcaagttgaacaagatgctcaggctttatttcaggctggagaacttaaatgggggacagatgaagaaaagtttatcaccatctttggaacacgaagtgtgtctcatttgagaaaggtgtttgacaagtacatgactatatcaggatttcaaattgaggaaaccattgaccgcgagacttctggcaatttagagcaactactccttgctgttgtgaaatctattcgaagtatacctgcctaccttgcagagaccctctattatgctatgaagggagctgggacagatgatcataccctcatcagagtcatggtttccaggagtgagattgatctgtttaacatcaggaaggagtttaggaagaattttgccacctctctttattccatgattaagggagatacatctggggactataagaaagctcttctgctgctctgtggagaagatgactaacgtgtcacggggaagagctccctgctgtgtgcctgcaccaccccactgccttccttcagcacctttagctgcatttgtatgccagtgcttaacacattgccttattcatactagcatgctcatgaccaacacatacacgtcatagaagaaaatagtggtgcttctttctgatctctagtggagatctctttgactgctgtagtactaaagtgtacttaatgttactaagtttaatgcctggccattttccatttatatatattttttaagaggctagagtgcttttagccttttttaaaaactccatttatattacatttgtaaccatgatactttaatcagaagcttagccttgaaattgtgaactcttggaaatgttattagtgaagttcgcaactaaactaaacctgtaaaattatgatgattgtattcaaaagattaatgaaaaataaacatttctgtccccctgaaaaaaaacaatataacacaagacaaccacaccacgcaacagacagaaacaacaagcacacactccaacaaaacacacaaaaatacgacggaggcgacagacacatcaaacaccacgagggggcaaaccaaagacacaacgagtcttacaaacgaggcgcagccttgtaggtagcttaaagaaaaagacg

SEQ ID NO: 243913 - DNA, 1701 bp, Homo sapiens
tgctgcgtctatctagaggatcccggtttcgcatgttcccggggcgctggcgtttccgttgcttggatcagtctaggtgcagctgccggatccttcagcgtctgcatctcggcgtcgccccgcgtaccgtcgcccggctctccgccgctctcccggggtttcggggcacttgggtcccacagtctggtcctgcttcaccttcccctgacctgagtagtcgccatggcacaggttctcagaggcactgtgactgacttccctggatttgatgagcgggctgatgcagaaactcttcggaaggctatgaaaggcttgggcacagatgaggagagcatcctgactctgttgacatcccgaagtaatgctcagcgccaggaaatctctgcagcttttaagactctgtttggcagggatcttctggatgacctgaaatcagaactaactggaaaatttgaaaaattaattgtggctctgatgaaaccctctcggctttatgatgcttatgaactgaaacatgccttgaagggagctggaacaaatgaaaaagtactgacagaaattattgcttcaaggacacctgaagaactgagagccatcaaacaagtttatgaagaagaatatggctcaagcctggaagatgacgtggtgggggacacttcagggtactaccagcggatgttggtggttctccttcaggctaacagagaccctgatgctggaattgatgaagctcaagttgaacaagatgctcaggctttatttcaggctggagaacttaaatgggggacagatgaagaaaagtttatcaccatctttggaacacgaagtgtgtctcatttgagaaaggtgtttgacaagtacatgactatatcaggatttcaaattgaggaaaccattgaccgcgagacttctggcaatttagagcaactactccttgctgttgtgaaatctattcgaagtatacctgcctaccttgcagagaccctctattatgctatgaagggagctgggacagatgatcataccctcatcagagtcatggtttccaggagtgagattgatctgtttaacatcaggaaggagtttaggaagaattttgccacctctctttattccatgattaagggagatacatctggggactataagaaagctcttctgctgctctgtggagaagatgactaacgtgtcacggggaagagctccctgctgtgtgcctgcaccaccccactgccttccttcagcacctttagctgcatttgtatgccagtgcttaacacattgccttattcatactagcatgctcatgaccaacacatacacgtcatagaagaaaatagtggtgcttctttctgatctctagtggagatctctttgactgctgtagtactaaagtgtacttaatgttactaagtttaatgcctggccattttccatttatatatattttttaagaggctagagtgcttttagccttttttaaaaactccatttatattacatttgtaaccatgatactttaatcagaagcttagccttgaaattgtgaactcttggaaatgttattagtgaagttcgcaactaaactaaacctgtaaaattatgatgattgtattcaaaagattaatgaaaaataaacatttctgtccccctgaaaaaaaccagaaccatcaaggggcgccccggaacccggcaaggccg

SEQ ID NO: 243914 - DNA, 2301 bp, Homo sapiens
  misc_feature (2297)..(2297): n is a, c, g, or t
tgctgcgtctatctagaggatcccggtttcgcatgttcccggggcgctggcgtttccgttgcttggatcagtctaggtgcagctgccggatccttcagcgtctgcatctcggcgtcgccccgcgtaccgtcgcccggctctccgccgctctcccggggtttcggggcacttgggtcccacagtctggtcctgcttcaccttcccctgacctgagtagtcgccatggcacaggttctcagaggcactgtgactgacttccctggatttgatgagcgggctgatgcagaaactcttcggaaggctatgaaaggcttgggcacagatgaggagagcatcctgactctgttgacatcccgaagtaatgctcagcgccaggaaatctctgcagcttttaagactctgtttggcagggatcttctggatgacctgaaatcagaactaactggaaaatttgaaaaattaattgtggctctgatgaaaccctctcggctttatgatgcttatgaactgaaacatgccttgaagggagctggaacaaatgaaaaagtactgacagaaattattgcttcaaggacacctgaagaactgagagccatcaaacaagtttatgaagaagaatatggctcaagcctggaagatgacgtggtgggggacacttcagggtactaccagcggatgttggtggttctccttcaggctaacagagaccctgatgctggaattgatgaagctcaagttgaacaagatgctcaggctttatttcaggctggagaacttaaatgggggacagatgaagaaaagtttatcaccatctttggaacacgaagtgtgtctcatttgagaaaggtgtttgacaagtacatgactatatcaggatttcaaattgaggaaaccattgaccgcgagacttctggcaatttagagcaactactccttgctgttgtgaaatctattcgaagtatacctgcctaccttgcagagaccctctattatgctatgaagggagctgggacagatgatcataccctcatcagagtcatggtttccaggagtgagattgatctgtttaacatcaggaaggagtttaggaagaattttgccacctctctttattccatgattaagggagatacatctggggactataagaaagctcttctgctgctctgtggagaagatgactaacgtgtcacggggaagagctccctgctgtgtgcctgcaccaccccactgccttccttcagcacctttagctgcatttgtatgccagtgcttaacacattgccttattcatactagcatgctcatgaccaacacatacacgtcatagaagaaaatagtggtgcttctttctgatctctagtggagatctctttgactgctgtagtactaaagtgtacttaatgttactaagtttaatgcctggccattttccatttatatatattttttaagaggctagagtgcttttagccttttttaaaaactccatttatattacatttgtaaccatgatactttaatcagaagcttagccttgaaattgtgaactcttggaaatgttattagtgaagttcgcaactaaactaaacctgtaaaattatgatgattgtattcaaaagattaatgaaaaataaacatttctgtccccctgaaaaaaaaaaaaaaaaaaaaaaaaaaaaaaaaaaaaaaaaaaaaaaaaaaaaaaaaaaaaaaaaaaaaaaaaaaaaaaaagaaaaagaaaaaaaaaaaaaaaaaaaaaaaagaaaacacatgacaaatcaaacaacagaacaaagagacggagaaaggcgaggggcggccgccgcctccctcatgtcctctttcacgcggcggcggcgacccgaactatctcgcctctcctttattttttttgtgtgggtaggcgctcctctgttctgtttatcatttttctaccgacggcggcgcgtctcactttcttaaacatacaacaacaaggtgtggacccaaaaaaagccaacagcgcactactacacattagtatctccagacgcacaaccactacacctacatgacggagcagggcgagaaaaacagaagcggagccgagcaccacaaacaccacgcacacaccatgcacgaagcagccgcaacgcagacaacaaacaaaaccaacgcgcggcctgcatgagaccgcacagccgacgataaaacacacgacacaagacacagcagcgaagccaacagagtcacacacccgcaaaggcatgaacgaaaaacacaacacccgacacgcgagagaacagaacacaagngaac

SEQ ID NO: 243915 - DNA, 2731 bp, Homo sapiens
tgctgcgtctatctagaggatcccggtttcgcatgttcccggggcgctggcgtttccgttgcttggatcagtctaggtgcagctgccggatccttcagcgtctgcatctcggcgtcgccccgcgtaccgtcgcccggctctccgccgctctcccggggtttcggggcacttgggtcccacagtctggtcctgcttcaccttcccctgacctgagtagtcgccatggcacaggttctcagaggcactgtgactgacttccctggatttgatgagcgggctgatgcagaaactcttcggaaggctatgaaaggcttgggcacagatgaggagagcatcctgactctgttgacatcccgaagtaatgctcagcgccaggaaatctctgcagcttttaagactctgtttggcagggatcttctggatgacctgaaatcagaactaactggaaaatttgaaaaattaattgtggctctgatgaaaccctctcggctttatgatgcttatgaactgaaacatgccttgaagggagctggaacaaatgaaaaagtactgacagaaattattgcttcaaggacacctgaagaactgagagccatcaaacaagtttatgaagaagaatatggctcaagcctggaagatgacgtggtgggggacacttcagggtactaccagcggatgttggtggttctccttcaggctaacagagaccctgatgctggaattgatgaagctcaagttgaacaagatgctcaggctttatttcaggctggagaacttaaatgggggacagatgaagaaaagtttatcaccatctttggaacacgaagtgtgtctcatttgagaaaggtgtttgacaagtacatgactatatcaggatttcaaattgaggaaaccattgaccgcgagacttctggcaatttagagcaactactccttgctgttgtgaaatctattcgaagtatacctgcctaccttgcagagaccctctattatgctatgaagggagctgggacagatgatcataccctcatcagagtcatggtttccaggagtgagattgatctgtttaacatcaggaaggagtttaggaagaattttgccacctctctttattccatgattaaggtagtagaacctttctttaaattacgtttgggaatccaaagcagactggtatgttgcatgaaagacaaggataagagaacctgattcttgtgttaagtttaaaattttagtgacacgattagagcaatgagttaaaaagcttagcataatgtttcctgaagtagagatgatggctcccaagtgaaagcatgggtattgatgtggctgaggctcttggtgaactcagaagcattatttagtagtggtaacagatgactcaacaaaccaaaccccttgcctatgataataatgtgttctttctgtcttttatcaattccagctgtctttattagtccttcttttatttcatatcagcttttcctttctttatcgtctgttatcaccttatctctgatgctggtttctaattcaggaaagagccaaccaggtcatattgggagtaaagagcccctaggtattagtatcatttttgttctttttaaaacaaggtgctctgtggcctataattacatttagcttaaagtcttttgacttttttttttttttttccagtaaaggttaatgtggaccatgtgcaaagcaagatttcaattgagcagaagcttttagtttagcatgtttgtggtttggctggcccaaaggacactagagagtttacccatgcacttttagcttgaaacattaatttatcatgcatgtctgcatgtgagacaagcagatgcaaagcatgttctgcccttctgtctcggagggagagccatgacagccctgcagccccagcactgcccgtgttagctgatatataccaagtgatagaaactattctgtctagaaggcttgatttgactatagttgttaaagttgcctggttctttgtgttaccagagggaatactgagtgtctgaggttacattggtaggaaactccctgcataacattcctgatgtgaaagtcacagagattacccacttgggagaagagtcttatgaataaaatttgttgccagttatttagttttaaaattttctatggcttctgtgagtcatggaggttaatggaatacatttggtttcagggagatacatctggggactataagaaagctcttctgctgctctgtggagaagatgactaacgtgtcacggggaagagctccctgctgtgtgcctgcaccaccccactgccttccttcagcacctttagctgcatttgtatgccagtgcttaacacattgccttattcatactagcatgctcatgaccaacacatacacgtcatagaagaaaatagtggtgcttctttctgatctctagtggagatctctttgactgctgtagtactaaagtgtacttaatgttactaagtttaatgcctggccattttccatttatatatattttttaagaggctagagtgcttttagccttttttaaaaactccatttatattacatttgtaaccatgatactttaatcagaagcttagccttgaaattgtgaactcttggaaatgttattagtgaagttcgcaactaaactaaacctgtaaaattatgatgattgtattcaaaagattaatgaaaaataaacatttctgtccccctgaa
